United States Patent Application Publication US 2007/0054278 A1 - sequence listing, part 32

SEQ ID NO: 94157 - DNA, 18124 bp, Homo sapiens
  misc_feature (1)...(18124): n = A,T,C or G
taaagtttttgaaagttgtgaaacttaaatgtgtttagatgtggactttagaggtcaactgaaacatgcctgggggaacacagatgtcaccaggttacaggggaaggaacaactgtgtaaagaccctgggtaacagactaaacacccgaattgaatctgggggactcgagctcaaagtgttgtcatggttacaaccatggccacgtgggtaagtcctcccagaaagtcaccaagtcccaggcacggaacttcaattctgcaaggttgctacgttcatgacacgctcgctcactgggcacatgcaccaggtacatgcactgggtacccgtgagacagaggctacttgggggatacagggtcaatgtggctgagtagtgcctttgggctaagccctggctgtctacaagcccgcagtaccattagtgtacaacggagactgcctactggggcccgttccctgcaggcaaacatacacaggaagccaaaagaaaactgaaggctggctggtgaacactcagccgtgggatacagtgacacaaggagccagttatggaaagcagcagccagatggatggtgaatcccccacctggacagtgagaggctggcacccccgggttcctactcctgctctcccggatagattaagttactaacctctctgatggtgtgcaatgcacagacagacaggcagcagcccgcacagcctgtatcccccactgactcaaaccctaacacagaatgcatccccagtaaataaactgtaggggctacccagggataaggcagggatttctctaggacatcacccacccagcttccttaagctagaacaccagcagccggcgtaactcgctactgagatgaaagtctttctatccgtatttgagtgccacatcaacctttcttcagactcaatttcccatggtgtctaaatcctgagcaaagacaagctggcagtttgtctcattccactgtttttaagaggcaaaaaaaaaaaaaaaaaaaaaaggccaggtaccctggcttacacctgtaatcccagcactttgggaggccaagggggcattgcttgaggccaggaattcgagaccagcttgggcaacatagagagaccccgtttgtgcaaaaatatttttaaaaattagctgggcgcagtagcacatgcccctagtcccagctactcaggaggctgagacaggattgcttgagcccaggagttcaaggcttcaatgagacgtgattgcaccattgcactccagcctgggtgacagtgagaccctgtctcaaaaaacaaagtttggtgctttaaaaggctgtcttttacctgttgcttacaaacctgcactggcctgaccagtactaataccccctcctttgctccactgatcatggcaacttctgatgtaatgccaagtcccaagcaccatcttaggactcagcccggtacccaggatccctcagaacacacaggctcttgaattttagtgacgatgaacagaaaggaaagctagaccttgccagtcaaaaaggtacttcttgaccattatgctgactcacaaattcagtaagtcagcaggagttacaggatgcatgcgaaggaagctacaggttttgtaagaagcatttaccatcatgttgatgtagcaacagggcatcccgttaaggtgcctccaaggcaagaatataatgcagcttattgatatagtaatttttgttttgttgttttactgttctttgtctataaaaagcagcgtcctagacaccctcttcagcaataaacctcagggaggctgggaatggtagcacatgcctgtaacctcagcactttgggaggccaaggtgggaggatcacttgaggccaggagttcgagatcagcctgagcaacatagcaagaccccatctctatgaaaaaatttttttaagctccagctccctctccctctccctctccccacggtctccctctgatgccgagccaaagctggactgtactgctgccatctcggctcactgcaacctccctgcctgattctcctgcctcagcctgccgagtgcctgcgattgcaggaggcgccgccacgcctgactggttttcgtatttttttggtggagacggggtttcgctgtgttggccgggctggtctccagctcctaaccgcgagtgatccgccagcctcggcctcccgaggtgccgggattgcagacggagtctcgttcactcagtgctcaatggtgcccaggctggggtgcagtggcgtgatctcggctcgctacaacttccacctcccagccgcctgccttggcctcccaaagtgccgagattgcagcctctgcccggccgccaccccgtctgggaagtgaggagcgtctctgcctggccacccatcgtctgggatgtgaggagcccctctgcctggctgcccagtctggaaagtgaggagtgtctctgcctggccgcccatcgtctgggatgtgaggagcccctctgcctggctgcccagtctggaaagtgaggagcgcctcttcctggccgccatcccatctaggcagtgaggagcatctctgcccggccgcccatcgtctgagatgtggggagcgtctctgccccgccgccccatctgggatgtgaggagcgtctccgcccggcagccaccccgtccgggagggaggtgggggggtcagccccctgcccggccagccgccccgtccgggaggtgaggggcgcctctgcccggccgcccctactgggaagtgaggagcccctctgcccggccaccaccccgtctgggaggtgtacccaacagctcattgagaacgggccatgatgacaatggcggttttgtggaatagaaaggggggaaaggggcggggaaagattgagaaatcggatggttgctgtgtctgtgtagaaagaagtagacatgggagacttttcattttgttctgtactaagaaaaattcttatgccttgggatcctgttgatctatgaccttacccccaaccctgtgctctctgaaacatgtgctgtgtccactcagggttggatggattaagggcggtgcaagatgtgctttgttgaacagatgcttgaaggcagcatgctcgttgagagtcatcaccactccctaatctcaagtacccagggacacaaacactctgcctaggaaaaccagagacctttgttcacttgtttatctgctgaccttccctccactattgtcctatgaccctgccaaatccccctctgcgagaaacacccaagaatgatcaattaaaaaaaaaaaaaaattttttttaattagccgggtgtggtggtgcacacttatagtcccggctactggacaggctgaggcgggagcatcacttgagcccaagagttggtggttacagtgagctatggtcgcaccactgccctccagcctgggtnnnnnnnnnnnnnnnnnnnnnnnnnnnnnnnnnnnnnnnnnnnnnnnnnnnnnnnnnnnnnnnnnnnnnnnnnnnnnnnnnnnnnnnnnnnnnnnnnnnnnnnnnnnnnnnnnnnnnnnnnnnnnnnnnnnnnnnnnnnnnnnnnnnnnnnnnnnnnnnnnnnnnnnnnnnnnnnnnnnnnnnnnnnnnnnnnnnnnnnnnnnnnnnnnnnnnnnnnnnnnnnnnnnnnnnnnnnnnnnnnnnnnnnnnnnnnnnnnnnnnnnnnnnnnnnnnnnnnnnnnnnnnnnnnnnnnnnnnnnnnnnnnnnnnnnnnnnnnnnnnnnnnnnnnnnnnnnnnnnnnnnnnnnnnnnnnnnnnnnnnnnnnnnnnnnnnnnnnnnnnnnnnnnnnnnnnnnnnnnnnnnnnnnnnnnnnnnnnnnnnnnnnnnnnnnnnnnnnnnnnnnnnnnnnnnnnnnnnnncactgccctccatcctgggtgacagtgtgagactccacctcaaaaatgaataaataaataaataaataaataaataataaacctcagggaactctgctgcagacctccaatgagaaggccacttataaaggtggcaacaagtttaggagaaagaaaacccacccagctgggcgtggtggctcatgcctataatcccagcactttgggaggctgaggtgggcggatcacttgaggtcaggagttcaagaccagcctggccaacatggtgaaaccccgtctttactaaaaatatgaaaattagctgggcatggcggcgtgcgcctgtaatcccagcttctcgggagactgaggcacgagaatcgcttgaaacccggaggcagaagttgcagtgagccgagatcgcaccactgcactccagcctcggtgacagagtgaaacgccatgtcaaaaaaaaaaaaaaaaaaaaaaaaggaagaaagaaaaacccacccaatgtcccaaatgccattagagaatcgagggagggtgtcaggaaagataccaaatagaaacaccttcttccctccattccagtaagagttaaatgtgactatataaactgagaaagacaccaccacttgaaataaggatgtgcgatacccaggctgcggatctttttacaagaaggaatgtgtctgagactatacctcaaagccacacaggaggataccagcagtaggcgggacaaaagaattaatccattggctttagccaaattcccaccctccagctctgaatgattctgacagggattcttaggcaaatctctcactgcgtgtgagacgtgcaggttgatggggtctaatggatcaggatccaagcctggagggaggacgccttggtgcacgctggagttctcaagatcacaactgagctgatgccaacagatctcagagccctggaagtcacgggacactcctctcagacccgtgggcattcgtatacaatcacatgtatttacatatgtgggactagcctccaatgcagtttacaaagtgctatagagataatacttgctttatgcaaaagttgtttctgcatttggccttggccaaacctccctggggatttaagagctgcattccactccacttacaggttttacacaaagacaagagaaccatgggccaccccagttcaagcgcatctgactgggctgggcaacacacccacatcccccagtcctgggctacctcacaaagagggggaacaagacctctcctgagggctaccccagaaccctgaagtccaccagggtggatctgctgacgtccccacccagggcacaccatgggggtgggtgtggggagaggggcaggtctggacgaggccggtgattcagaccgagcagggctccaggagagctgccaagtcccgcgggggccgtcctaagaaacatagtagccgggcaaccctgcctgccagccgcctgcgctcaggcgccttcggatgacccgaagccacctcgagagtttgcacctggatcccacggtcactactcaggctacgacctgacctgggcaaaaccgcaccaggcggctccctgtccagcccatgggagccggggcgcattacctggagaggcagcgtcgcccctctgcgctgcccacccgcccttttccgcggcggcgctccgcagctgaggtggagctcgaggtaaccctctcccaagcgatcgctggtggcgggggcggcgaccggcggggcggggcagggtactgccagccaattccgagcaccggggagtgcgtgcgcccggggcgcgtggagcagcgccaaccgtgcactcaccaacccaccgaccctccccaaagccggggacacaggcgtggctccaggtggctctcctggcgcccccagcacgggcgcccccatggcactggagatgcacggaagagagagaaggagagagaaagagataaaagcagaaagaaacagtgggagaggaaggaggtagaaacagagaaaaacagagacatatatatcgaaagagaaaacaggacagagaaataggttattaagtgaagcgaggggataggaatgcatagcaaggcgggagaggagatggaaacatgcagagagaggagatccggacggtgaaaaggggcggaggcgcgagcggccgggtccctgggctgcgctccggcgacggccgcccgagacgggtgtcgaggacagggatcgcggaggatgtggatcccctccctggcctgcccaggcgcgcgcgtccctccgtctcggggtacgcagcccggccgggcgcactcgccgtttccgggccggcggggcagccaccgggacaagggccacagcgcccccgccgcccggccaaggacgcgcagcccgcgcctccgccccgccccgccggcgcgacccgcacgggcgcgccccccgyagaggggcgtcggcacaaagccgccccacacaatggcccggcccggcgcagcccgccctgcaacccggctccgcgcagctgcactcacatctgggcaacgagggcctgtggtccacgggcacccagatcttctgcactcggctctgcgtcagttccaacggcatcttcgcggctgcgcccgacggcccgcctcccggggccgagatcccgacgctggcaggagagcggccrscgacccccggaacaaaggaggagaggggggcgtgcgccggsgcgcggccgggcgtttcctgcgctgccaggggaaacgtgctttgggctaagttccggaccctcgcctgtgcggggctcgacgtgtgctgcgagggtagcgaggctggggatgcccggcacggccggctcgtccgctcggaaagctctgggatgctcgggcgcagtgacagccgcgctctcgccaccaggccctgcygctcgcctcctctccggcttggctgggatgccccgcgcaccgccggcttttaaagagtccgggctggccgcagacgcgtacgtcagcctcggggcgggccgcattccttgggtcccagcccccttccacgtggggaggagggtgggcgagccgggaagcagcctgcgagctccccctgcgggccggcgacggcggtgcaccagctcccgccgccctgccccgggcctggagcgcgcccagccctgctgaagggtcctggctgctgttatcccctcgtcccgttgtcccctcgggacgtctggcacagcttccccgactaattccggcscctcacctcaactgtgctggccgggaggagagcagagacgcagtcctgcccagtgtagaccgtggaccccgcagccgaatcccttgggaagctgcttaaagtgcatcctaccaatgcagctcctttagggccatggagccccaatactctgcattcctaacacgcgctgtggggcagrcgcagtccaggtaaggacatgggccaggctgctccctgataatacccgtgagcccatcccycgccacgaccygggcgasccgcggggaggaggcttccctgatcctcccacctcacctcrtccttgtccactttsctgaatcccttaraaacctggacttgaactgagccttgctcccctcccctagcccaaagactgggaaccttgagaggcccgcggtgctgggtacgaggagggggcgggaaagccccggggagctggactgaagtggactggggctgggggcagctggcatctggttttcacactcaccatgtacaccattcaataaacctttatcgccccgagtagaagaatgaataaaactagacccatttcgatctgcaattcattacctaagtcgagggaaaactattgggggcggccccttattaggsagactcctaaaattcactccgttatcctgcacaccctgcagctctgcctccccactttttggtgcatgcgtgccccgtctcctttcccggccctcgcagtttgcaccagctcgcgacttgtgacagtcgtgcagtcaggtcagaggcgtgcggggaagatctgggttgcttttggtggggaaccgccgcccgcgccgggacggatgtaacttttgcaaacgaagcctcagtacrggagcgctgcgccgccttgcagagaggtgcacacttagcgctgaggctgggctgtgattggagggaaggcggcgctcgctgaaacctacaccgcggcggaaaagtctgcgcagaggctgccacacgtcgctcacgtcccgcatgctccacagggagggcgcccgcgcccaggcggcgaccggggctgctcccgccccgcgcgcccgccccacccgggcctccactcctcccgacccgccgcctgccgaggggccccggaacgcgcaacatcggccacctggcctgtgccccgccaccctcccccacgcctcgacccccactccccctcccgcctcgacccccactccggcaccccgccccccgcgccgccctctcagagcccctgttcccgcgacagctttgctgacggtctggtttccgcgctctggcggctgttcagaaacccgatgcgttgcatttggacttgttttctgcagtgggagcacatgccagaggcgacaccctaaacgcccaggggagagtcccactccactcctgaaataagagtgggctgacccgaagagggaaacagcaggcagcgagcgcccgcgccaccgggacgagttcccgccctggggttcgcgggggtcggggagggctgtaggctgcgcgcggggagagcggctgcacccctgcaaagagcgcccgcggttcctggggaatgacggtgcacctgcgcgcccgctgcttgcccaccgattttgcacacgtacaggcgaggcaagcggaccagggggccttcttccacactccctacaagcttgcaaacactgctggtttcagctcacagggagagcagagagacggcgtctgccccagcagcggcacatcattcatctcttgacctagataacgcatctgacagcggtcagctcttagggcacagggagttgatgtcccggaggtccagctgaactttcgcagaccgggcacttttcctgtctgtcaataacgcgttccgagtctagagggaagactatgttcttcccccattcgcctcctgcacttgctctgcagcaggcaaaaggaagttaactcaatccccgccccaccaccaccccccgccccccccgccccgctccttacatctaagtgccaactgggagtgcgtgggagcaaggacgaatgcacacctgtttttgtttttttaatggccagctagaactcctgacagcctttacagccccaggtaagttagggtagagccctcatgagagatgaaactgcttcactacaaaatcacttataaacaacccaactgcaactgtattctggtaatttactggttccgagtttactagtttggacatcctcctaactcattccctagctctgctaatgccccatcttcaccccaaatgtccaactagggcttggccaacttccctcctactaacctgggtatcacaaaggcggcccttcagaaaacgctcccaataacgtaaatgttcctctaatacgatgattcttttacagctacaataacaccaaggctagcgcagattgatgatttctcctaggtcrtggtcctagaaactatgaaagatagaaggaaacttcaagactacctagtcaaccccacttgctttatgggaagaagtaaagggagttgagattagagtagtcaaggaaccaggtcagagatcaaagaagaaagccaattaggagcagagtttgctggggtttttgttggtttgtttttgtttttcccttctgcttgacacggacgcagatagctagctccctaggagactcattatagggccaccctaaccccagggtgctgagtggaatcctaatttagccgctgatcaggctgtgattcagactcacctagaacaattgagctgtttgggaaggaaaggtcagagaaggaccttccgtgagtagaatgagacattagcagggcaattattgaaaatgatcctggccagtgcagtggttcgcacctgtaatcccagcactttgggtggctcaggcggacggattgcttgagctcaggagttaagagaccagcctgggcaacatgaaaccccatctctgcaaaaaaaaaaaaaaaaaaaaaaaaaatttaaaaatagctgggcatggtggctcgcacctgtggtcccagttattttggagactgaggtgggaggatcacctgagcccaggaggcagaggttgcagtgagctgtgattgcaccattgcactccagcctgggtgacagagtgagaccctgtcacaaaaaaagaaaaaaaaaaaagcaagtgcctggtgaggtgctcacatagctgaattcactgagctcggtccagccttgagaggacagtggagtggtttttctccaggatcacctttgttcccacacttctgtgccagccaatgtcatctaactcctaccagtgcttccaaatgctgctgtaacaacaaacacaagcaaccgcrtttccgtgatcctgtgccagccatagccaggttaaaacgttcaaaccaagctaggacctacccgctgccccagagagagtgaggtgacaagcatggtagtctgggagcaatcagaagttgctcattagacaccaagtgtcactatttgctcttgagaaaaatcccatgtatgagggagagaagtgagacaccaaacaaaacactgaaacaaacccttccatcatcaccagccaaagacacggggagggggctcttatttcaataaattatttgtaactcacacatgattgagaacagagactgagactatccacacaatgtcatgttgggggttcgaaaaaccaattcataacatgcacatagatgtttataccagctttattggtaattgttaaaatatggaaacaaccaagatgtcctttggtaggtaaatggataaactatggaacatccaaacaatggaatatgatgccgttctaaagagaaatgagctatcaagtcatgaaaagacatggagaggccaggtgtggtggctcacgcctgtaatcccagtactttgggaggccaaggcgggcagatcacttgaggtcaggagttcgagaccagcctggccaacatggcaaaacctcgtctttactaaaaatacaaaaattagctgggtgtggtggtacacacctgtaatcccagctactcgggaggctgaggcacaagaatcacttgaacccaggaggtggaggttgcagtgagccaagattgtgccactgcactccagcctgagtgacagagcgagactctgtctcaaaaaaaattattatttttctacaaatatcatatatttttctccaatctagtggacttagtgtctcattaagtggatgtgaggagaatacacagcagccatagcctggctctgggtgaagtgactcaaattgctcaacttaagtcccggcaaaccctccagtaagtttccatttctctctgccccgaccctgtcactccatctcctgtgggcatttccttttcttttcttttctttttctttttttttttttttgagacggagtctcatgctatcaccctggttggagtgcagtggtaccatctcggcttactgccacctccgcctctcaggttcaagcgattctcctgcctcagcctcctgagtaactggtattacaggcttgtgccaccatgcttggctaattttttttgtatctttagtagagacagcatttcaccatgttggccagtctggtcttgaactcctgacctcagatgatttatctaagtaaattgttccagaaaatagaaaagaataaaagcaactctagtcatttctgaggctagcataaccttgattggtaaaacaaaaagtaaaagaaaaggaaattttaagttcattttatttatgacagacagagatataagattcctatgtaaaatattagatcgtgagagccaaccatatacagttgaccttgaacaacacatttgaatcacacaggtacacctactttctcctgcctctgccacccctgagacagcaagaccagccccctcttcctccttcccagtctactcaacatgaagacgacagagaggaagacctttatgaggattcacttccacttaaggaataatgaatatgttttatcttccttaaaaaaaaaataaaagatgtggaggatggcttgagctttttgtgtatttctcaaaagttttaagatgtcctaatttattggtcaagcaaaagaagaagaaaagaaatacagtcatgtgttggctaatgatggggatatgttctgagaaatgcatcactaagcaattccgtcattgtgcaaacatcacagagtgaacttacacaaacctagatggcagagcctactacacatctaggttacatggtatagcctgttgctcctagggtacaaacctgtacagcatgtgactctacagaatactgtaggcaactgtaacacaatggtaggtatttgtatatctaaacatagaaaatgtactgtaaggccaggtgctgtggctcacacctgtaatcctagaactttgagaagccgaggtgggtggatcatctgagttcaggagttcgagaccagcctgaccaacatggtaaaactactaaaagtacaaaaattagctgggcatggtggcggggacctataatcctagctacttgggaggctgaggcaggacaatcgcttgaacctgggaggcagaggctgcagtgagccgagatcacgccattgcactccagcctgggggacagagcaagactctgtctcaaaaataataataataataataataagtacagtaaaaatgcagtataaaagattaaaacaagccaggtacagtggctcaggcctgtaatcccagcactttgggagcgtgacggggggaggattgcttaaggacaggaatttgagaccagcctgggcaacatagcaagactccatctgtgatggtgaatactgagtgtcaagatgattggattgaaaaatcctgggtgtgtctgtgagggtgttgccaaaggagattaacatttgagtgagtggactgggagaggcagacccaccctccgtctgggtggacaccatctaatcagctgccagcagggcccgaacaaaagcaggcagaagaccgtggaaagactagactggcttagtctctgcgcctacatctttctcctgtgctgaatgcttcctgccctcaaacatcagactccaaattcttcagctttgggactcttggacctttgaccacagactgaaggctgcactattaacttcccacttttgaggttttgggacctggactggcttccttgctcctcagcttgcagacggcctattgtggacctcaccttgtgatcgtgggagtcaatgctccttaataaactccccttatatatacatctatcctattagttctgtccctctacagaaccctgactaatccaccatctctacaaaaaataatacaaaaaattagccgggtgtggtagcaggcgcctgtggtcccagctacttgggaggctgaggtggaagaatcgcttgaaccgggaggtggaggctgcagtgagttgtgattgcaccagtgcactccagcctaggagacagagcgagactccatctcaaaaaagaaaaaaaaaaaaaaggcaagctcacgaggcagcaccctgctgcccgtgctgtctcatgtgccttggctctcaatatctctcccgccctctcccccgaatagtgtttgtccttatgaaagcaaaagaggaaggagagccagaaagcttgattctggaaaattcctctcaaagtcttgaaaacaaggggaggggtagagtagaaaaagagcaggatgttggaacccgcaaccttgccacattaagtagtgacgggcctcacctccccaaaggagatcaccatctgccatgagaataagtgaatggaaaatggactgagaaactcacgtatcacaccaccttggctctgccagagcagccaggacagtagcccgaattctcccttctctgcctcgccacacacaatggcccctaactcccacctaccttctcccccaagagaattctgcggggagccccccgaatactctctgctggcagttgtgatcctcctggaagtgaaccacgtttatctgcattctcttaccagtttgcttggtgactcagtctccctgggtacactgccaaaaccaacttctagaggaaagtctgagtcctgggccgcagtgaccccatgcagacatggccagccacctaggaggcatgtcagggttgcaggggcccttgaacacttggatcttgcttgttttcatgcttagccatggaactatgtcctagaacatgagtagctttgtttcttgccagacaattcctcagtattgtgcagacccagacacaacaagatgaagaaaactctagacgtctgtgaggcccagataaacccgatggaacagccctgggcaaagccccattcagggtaggggaaacatggccactactaatgcctaaaccaccccaccccatgtctcctctctaagggtcttctatgaccctgacaccatcttcttccaaagcgtggatgaaaaaggaacaggaggcgagcgcagtggctcacgcctgtaatcccagcactttgggaggctgaggcaggcagatcactttagctcaggagttcaagaccagactgaccaatgtggtgaaaccccatctctataaaaatacaaaaattagccaggtatggtaagaggtgcctgtaatcccagctactcgggaggccaaggcaggagaatagctcgaacctggaaggcggaggttgcagtgagccgagattgcgccactgcattccagcctgggtgatagagcaagactcagtctcaaaaaaaaaaaaagaaaaaagaaaagaaacaggagcaaaagcccatccttgccatgagaagagtgttggtgttctatgcccttcacagagtgaagctctaagtgcagcaccaggcaaactgtgcaaagggacaaatcaggtggtcactccaaggcccttgaaagctcttgggccagcttcccactgaatccacaaacccctgttgaagagtcctgggatcctcagcttagacctctggctctttggctccaagctgtttactccattatcagatggcgctactggctagaaagacattgcttacactaagctgagttgatcttcctggaaatgcccccttgtctctttctgttgctgcacatgggttaagcctgcatccccctccaacaacaggtgctcgcccttaaatgtttgaaagcagctgtcacgtcccattgaaacaggcatccttcaggctaaggagcccgctcctagactttagcgcagcggaaacatagttttcaaaagtctgtgcaattcactaaagagtgagttcatcttgtgatgtcaagagctgaattaatcagggactcaagaagcaattccagggaacctctgcatatctaggtttagagactcaaccgtgatgaaccaggcttgtcttatctccaaagcttatccaataggaatgggagggcaagacagtgactgcggtaggtggctggggacgtggcttgggagttaggaaccccaacctggtttctgaccctctctacacctcgtctagacctctgctcccttatctgtctaagcatctcttccacttcccaaatggcagacaccaatggttcccattgttctcaatgaaatacaaatattaatagaaactgtcaggcctctgagcccaagctaagccatcatatccccagtgacctgcacatatacatccagatggcctgaagcaactgaagattcacagaagtgaaaatcgacttaactgatgatattccaccattgtgatttgtttctgccccaacctaactgatcaatgtactttgtaatctcccccacccttaagaaggttctttacaatctcccccacccttaagaagtttctttgtaattctccccacccttgagaatgtactttctgagatccacccactgcccccaaaacattgctcttaactccaccgcctatcccaaaacctataagaaccaatgataatcccaccaccctttgctgactccttttttggactcagcccgcctgcacccaggtgaaatcaacagccttgttgctcacacaaagcctgtttggcagtctctccacacggacacctgagacagaaacctgagagtaatcactggactacaggcaacttagaaacagggacagctgttcatctttgaatcaccagatcctaccacagtgtccgacatggagaaggtgttcaatctatgcttgcttaatgaatgaatgaatgtttacctttgcagcgattcaactaatggatacacaatccttttttgttttgttttgttttgtttttttgagacagggtctggctctgttgcccagactgcagtgcagtggtgcaatcacacaaactctagtgcagcctagagtttctgggctcaaactgtcctcccacttcagcctcccgagtatctgggattatgggcgcatgccaccacactcaactaatttctatcttttgtttttgtagagacagggggtctcattatgctgcccaggctggtctcaaactcctggcctcaagcaaatctcctgcctttcaaagtgatgggattacaggcataagccaccatgtccaacctcaatatataatcctaagtaggagcgagtactggctcacataagaagctggaagcagcttccataaatcctgcagggctctgaggtggacagacagccattcacagtaaaatcatctgtagaatgagaacagcagccccatctacctcaagaggtccttacgaagaccaaactggatatgagcaaaagcacttttggaaaaactataaagtattaggtcaaccaatccctggatgagcactttttgtaactgtgcaagcccaccccagatgtctgaatagattccctctgatctgggctgctctatgatttggtcttcaccccttggtttccccagcagatcagtgacatcccccaacacacacacacacacacacacacacacacacacacacacacacacgggtgaggggaagagtcaatgtcaaaacaactgagtttcctaacccaggactagggagaacagaaactggaacccagatcacgttctgctgggtatgggaagcatgcccgggtgacccgcaggggccaggcaaggccggcccatgactgcagtgtaaacacatgccacggagcaaccctaggctggcaagccacagctggcacctctccctgctctgttcccctcatatttcttccttctcccagtggaaaacattctaaaaatagagccaaatcaagccaaaaaaaaaaaaaaaagaagaaagaaaaaaaaaacgggcaggttttggacagcgatgctagctgctgacgagatgttaggaaacctccaggctgggctggatcaatgtgtagggttcaaatgagagaatgggacggtctgtcatcgccagtgttgagactggatcgtgttcccttctgtgtactcctcctcagaaagctgtgtgtgtgtgtgtgtgtgtgtgtgtgtgtgtgtgtgtgtgtgtgtattggggaatgtcattgactctgctgggtaaatcaaggagtgaaggccaaatcacagagtagccaagatcagaagaaatctattcagacatctggggtgggcctggatagttaaaaaaatactcatctagggattgattgaatacagttttaccaagagtgcttttgctcatatccaatttggtcttcataaactcatctacccccagagaacggcgaccagggtgtccgagccacctggacaccatccctacgagaaacggctaaagagcgagacagggagaaggaacaaggctgtgacaggagttagagccactgacgaaggcgcgggggttgtcgtgcatcgcgttgctcctgtgaacagaaaccagatgctgatttgaaggtagaaagagatgccttctctgtacagtggacagcggtgggccagagggacggcaaatgcagcagccagatcctacctgtcgaaaccattccagagggacttccccaacagctgcgactcaaactcgctggcttctgactagccctgga

SEQ ID NO: 94158 - DNA, 99872 bp, Homo sapiens
  misc_feature (1)...(99872): n = A,T,C or G
nnnnnnnnnnnnnnnnnnnnnnnnnnnnnnnnnnnnnnnnnnnnnnnnnnnnnnnnnnnnnnnnnnnnnnnnnnnnnnnnnnnnnnnnnnnnnnnnnnnnnnnnnnnnnnnnnnnnnnnnnnnnnnnnnnnnnnnnnnnnnnnnnnnnnnnnnnnnnnnnnnnnnnnnnnnnnnnnnnnnnnnnnnnnnnnnnnnnnnnnnnnnnnnnnnnnnnnnnnnnnnnnnnnnnnnnnnnnnnnnnnnnnnnnnnnnnnnnnnnnnnnnnnnnnnnnnnnnnnnnnnnnnnnnnnnnnnnnnnnnnnnnnnnnnnnnnnnnnnnnnnnnnnnnnnnnnnnnnnnnnnnnnnnnnnnnnnnnnnnnnnnnnnnnnnnnnnnnnnnnnnnnnnnnnnnnnnnnnnnnnnnnnnnnnnnnnnnnnnnnnnnnnnnnnnnnnnnnnnnnnnnnnnnnnnnnnnnnnnnnnnnnnnnnnnnnnnnnnnnnnnnnnnnnnnnnnnnnnnnnnnnnnnnnnnnnnnnnnnnnnnnnnnnnnnnnnnnnnnnnnnnnnnnnnnnnnnnnnnnnnnnnnnnnnnnnnnnnnnnnnnnnnnnnnnnnnnnnnnnnnnnnnnnnnnnnnnnnnnnnnnnnnnnnnnnnnnnnnnnnnnnnnnnnnnnnnnnnnnnnnnnnnnnnnnnnnnnnnnnnnnnnnnnnnnnnnnnnnnnnnnnnnnnnnnnnnnnnnnnnnnnnnnnnnnnnnnnnnnnnnnnnnnnnnnnnnnnnnnnnnnnnnnnnnnnnnnnnnnnnnnnnnnnnnnnnnnnnnnnnnnnnnnnnnnnnnnnnnnnnnnnnnnnnnnnnnnnnnnnnnnnnnnnnnnnnnnnnnnnnnnnnnnnnnnnnnnnnnnnnnnnnnnnnnnnnnnnnnnnnnnnnnnnnnnnnnnnnnnnnnnnnnnnnnnnnnnnnnnnnnnnnnnnnnnnnnnnnnnnnnnnnnnnnnnnnnnnnnnnnnnnnnnnnnnnnnnnnnnnnnnnnnnnnnnnnnnnnnnnnnnnnnnnnnnnnnnnnnnnnnnnnnnnnnnnnnnnnnnnnnnnnnnnnnnnnnnnnnnnnnnnnnnnnnnnnnnnnnnnnnnnnnnnnnnnnnnnnnnnnnnnnnnnnnnnnnnnnnnnnnnnnnnnnnnnnnnnnnnnnnnnnnnnnnnnnnnnnnnnnnnnnnnnnnnnnnnnnnnnnnnnnnnnnnnnnnnnnnnnnnnnnnnnnnnnnnnnnnnnnnnnnnnnnnnnnnnnnnnnnnnnnnnnnnnnnnnnnnnnnnnnnnnnnnnnnnnnnnnnnnnnnnnnnnnnnnnnnnnnnnnnnnnnnnnnnnnnnnnnnnnnnnnnnnnnnnnnnnnnnnnnnnnnnnnnnnnnnnnnnnnnnnnnnnnnnnnnnnnnnnnnnnnnnnnnnnnnnnnnnnnnnnnnnnnnnnnnnnnnnnnnnnnnnnnnnnnnnnnnnnnnnnnnnnnnnnnnnnnnnnnnnnnnnnnnnnnnnnnnnnnnnnnnnnnnnnnnnnnnnnnnnnnnnnnnnnnnnnnnnnnnnnnnnnnnnnnnnnnnnnnnnnnnnnnnnnnnnnnnnnnnnnnnnnnnnnnnnnnnnnnnnnnnnnnnnnnnnnnnnnnnnnnnnnnnnnnnnnnnnnnnnnnnnnnnnnnnnnnnnnnnnnnnnnnnnnnnnnnnnnnnnnnnnnnnnnnnnnnnnnnnnnnnnnnnnnnnnnnnnnnnnnnnnnnnnnnnnnnnnnnnnnnnnnnnnnnnnnnnnnnnnnnnnnnnnnnnnnnnnnnnnnnnnnnnnnnnnnnnnnnnnnnnnnnnnnnnnnnnnnnnnnnnnnnnnnnnnnnnnnnnnnnnnnnnnnnnnnnnnnnnnnnnnnnnnnnnnnnnnnnnnnnnnnnnnnnnnnnnnnnnnnnnnnnnnnnnnnnnnnnnnnnnnnnnnnnnnnnnnnnnnnnnnnnnnnnnnnnnnnnnnnnnnnnnnnnnnnnnnnnnnnnnnnnnnnnnnnnnnnnnnnnnnnnnnnnnnnnnnnnnnnnnnnnnnnnnnnnnnnnnnnnnnnnnnnnnnnnnnnnnnnnnnnnnnnnnnnnnnnnnnnnnnnnnnnnnnnnnnnnnnnnnnnnnnnnnnnnnnnnnnnnnnnnnnnnnnnnnnnnnnnnnnnnnnnnnnnnnnnnnnnnnnnnnnnnnnnnatcttggctcactgcaacctctgcctcccaggttcaagcccattctcattctcctgccttagcctcccaagtagctgggattaccggcgtgtgccagcatgcctggctaatttttatattttcagtagagatggggttttaccatgttggccgccaggctggtctgaactcctgacctcaggtgatctgctctccttggcctcccaaagtgctgggattacaggcgtgagccaccgggcctggccaagatttactatcactttctgaatcattttgtacaattaactgtaacaggtgtttttgtgatattctgtttaacattctttttttgagatggagtttcgctcttgttgcccaggctggagtgcaatggcgtgatctcggctcaccgcaacctctgcctcccaggttcaagcgattctcttgcctcagcctcctgagtagctgggattacaggcatgcaccaccaagtccggctaattttgtatttttttttttttttttttttagtagcgatggagtttctctatgttggtcaggctggtctggaactccccacctcaggtgatccacccatctcggcctcccaaagtgctgggattgcaggtgtgagccaccgcgccaggcctctgtttaacattcttaccctgaattacattttgttactttcacttttatttacactaatttcttgatagttgtacattcttgatcattgtcctagaagattcttacagcataaaactatggacttttgagaaagaatgctaaaattgccagccctaattgctcaatattttcagtttctttgatcactgtgaagtggacagggtatactgttttcttcaccaacttccttatcacagacatctccccytttcatgatatccctggtcatttgccattttgttttatttttattaatttttttccttggcatgtgaagtaagagctacatttgcccttttggtttactatttttaggccccttctcctgtggctatttgtatacagtttcccaaggtaatacgacatgtaggcaactcatagaaatgagctatgcttattagaatccacttagtattcacctccagagctagcagagcccaccattcttccttcttatgtctgtgggagaccctgatgttggatcaaggtactgtgtccatctggttaaggatgaagggtcaaaatattttactacactttatggcatgccaccaccacagatcttttgccttccttgcatctatcccttagggactaaaaatattcctgttgtgtatttttagattggacctgatgtttgtgaaggagttgtagctttgtgattgtctatgaagtgatatttatctttaattgaagtaaaacactaaatatgttttctgcagctgtagctacagaaatattatatraggaggtattattaaaatcaaaaccaataatcatttactgagtgctaaattttgtaatgacccaagaatgtagcatgttagaggtataaattaaataggcatgaatttatattccagcttttccattgactaactctatgtccctaagaaagtcagtagcatctctgaatggcagcttctttatttgaaaaacggttatatctgagggtggctgtgtgggtttgcggacacgagtaaatatgccaagcttagtgactgtaacatcgtagagcctccttaaatattagtttcttccctcctagttccacatagaaggaagaccaatgctgatctcccgcaatagctttggaaatctaagaaaacaagttgtcacctgatttgtactatcttgtgggcattcattctggttgtttgtagttttttttgtgttgtagattaaaaacttgtcctggattatggcatttcaaaacatttatatatggagagaatggtataatgtactctctctgtacccatcatcctgttttaacaattatcaatttaagtacaataaccaccatcaccacccccttctctcctcccgcactagaatattttaaagcaaatcccagacatcatatagtttgtaaaatcataattttttttttttttgggatggagtttcactcttgttgcccaggctggagtgcaatggcacgatcttggctcactgcaacctccacctcctgggttcaagcgattctcctgcctcagcctcctgagtagctgagactacaggcgcccgccaccaccctcgactaattttttgtatttttagtagagatggggtttcaccatgttggccaggctggtctggaactactgacctcaggtggtccacccacctcagcctcccaaagtgctgggattacaggcgtgagccacggcgcctggcctgtaaaatcataatttatgctcagtggaataagtattatataagaagctaaaaaaacaaaaagcaacaaaaatatgctgtaaaaaaaggcagcatttctttaataatatcttgtattgttattctctcctctgggttgtttcagtggatctagtaagtaatattaggacttttccaagtttagaccttgtaagaccttatgtatgcagtggggtgaaaagaatgtatgtttcaagaagtttccctgtaattgtatgaaaagcatgtatttattcgtgtgtggcctttactgggagagtcttagtctgattgaatcttagttctcaccacactggtgagtgtgtcaccttgcccctctctgcttatcttgtgaatgtgcctttaattaattaatttagtgtttatttgcacatcctgatgtatctgtcttaggacttgttttcttagactataagctatgccaagcttggtgtggtgtctatgtcagttactagaaagcctagaaaaatactactttcaaggaggcattgagaaatttaatatattatgataatgggtattttcagaaacctatttttagagaagctgtgcattaccaggaaatgtttcttatttttcccatatttctgtgtctagctgtggagtagagtgagattgtacaccccagtgttcacaagtaatgggaaagtcttcctttggctaggtaagctgagatccagatctgtagtttgctttaagacagtgaaagatcaccactgcattagtattatggctcagaggagaagataagcaattgacatgaatcattcaattactacgtgcatttcctcgtaggggttttagactcttgaatgaagggaaatttagactggccattattttagtaggataaagtcgaaaaaaattaagatggcattaagttcttggatctgattttgttagatcagtgctaattttaaactaagtttggtgatcttgaaaatttggatttaagagtgttaaaagattacaacatgctgcctttattctcagaaatttttctacggttcatattttactgtgggagaactttaggcaaaacatattttttgttctttgtaaggcctttcagaaaataagtaagcagaactagtactagaatcatcagttcctaattcttcttccactactcatagtatttttgtcaatggggtttcataagctttctttatattgagacttcccttttatgtttttattattccaggtttcttaagaaatagctattaagtgaaaaagttcataggctaagttattaataactaataagataggacttgattatcattaaaaatatatatattatacataaaagagtattatatattatagattaaaagtcaaactatggacatttggaaacttcaaaacttatttttactctctttagtaatatagtttatattagaaaattttattaagttgttttatttctgatcttttctcccagtgagtttttagcagaagacagtcaagagaaattttggaattttgtagaagccagtcaaaatattggatcatcagatcatgacggtaaaattgaagcaaatgcttctttgactttggtgtctgggaaaatattaggaaaaaattgtctctttatagtatgtgtggcatggcagttaatggaaaacattgttgtctttaatgactggagttatgatggtggtcaggaagagccaacacaacacaaattattatttttgaagcaatgtatacctttggctataagtggtacctttgtttttttccccttttgtttttgttctatcgtgatcctttattaaagtgctatgtgaatattttgtggaagtacatttcattttaaatcattcagtattaataaccatctaatctgattcactatttttgttatgaactacacaactgagctattatctgttaagttcattatcattaagttagtatcatccagagtgttttccattatgcctgccagccacccacaacttgagtgttaaggtatcaaatgaatgattatcctgtaaaacctcatttgcagtttttatgatgtgctttcacattttttaaacttcgtataagctatatagggtgtaaacattaatagttggagatgctgatatgtgagtagttaaaaccttgaatattaatttacattgacagatataggttattattatttttttttaatttttattttttgagatgaagtcttgctttgtttccaggctggagtgcagtggtacgatctgggctcactgcaacctccatctcccaggttcaatcatttctcctgactcagccttgcaagtagctgggattacaggcattcgccactacgcctggctaatttttgtatttttagtagagatggggtttccccatgttggccaggctggtctcgaacttttgacctcaagtgatccacccgcctcagcctcccaaagtgctgggattacaggcatgagccactgtgcctggccagatataagttcttacagaagaggaaatgtttcaaaattgtgtgactgctgctgatgttaatgggttgttttttttttcttcttttaaaattatttaattattatttttttaatacaatggagatgaggtctcactgtgttgcccaggctggtctcaaacttctgggctcaagtgatcctccccacctcgggcctcctaaagttctgggattacaggcatgaaccactgcacctggcctgtattgatttttttaactttttaatttttattaaaataattcatattttaaaaattgtctgaatctttttgttttatttttattttatttcacttttttcactctgtgatctagccaaagatttattttatttattattattttttatttgggctaattaaaaaaatttttttttgtggagacagggtctcgctgtgttgcccaggctggtctcagactcctagggctcaagcgatcctcctgccttggcattccaaagtgctgggattacaggcgtgagtgactgcacccagctagattttactttattttattttattttattttattttattttatttattttttcgagacagagtcttactctgttgcccaggctggagtgcagtggcgcgatctcgactcactgcaatctctgccacttgagctcaagctgttctcctgcctcagcctccggagtagctgggattacaggtgcccaccatcgcgcccagctaatttttgtagttttagcagagacggggttttgccatgctggccacgctggtctcaaactcctgacctcaggcaatccacccacctcagcctcccaaagtgctaggattatgggtgtgagtcaccaagcccggcctagttttgattttagaaacagagtctggctctggaggctggagtgcagtggtgtagttcactataatcttgaactcctgagctcaagcagtgttcctgcttcatcttcctcagtagctggtattayaggtgtgtacaaccaggcctggctaatttttaaattttgtaaagatgggtctagctgtgttgcacatgctggtctcaaactcctggcctcaagacatccctgccctgcctctcgccttggcctcctaaagtgatgggattacaggcgtgggccaccatgcccagcctgaatctttttttttttttttttttggagatatagatatgtaaatattttaaacaagcatctgtaggttttactaatttagaggcaactagaattaagttatcaaaaaatactttatttttaagattttatagaacaaatttatcaaagtgggtttataatcaaatttgaactttgacatttaaaataacattttttcagtaaaaatgataatattaattaaagctataggagtatgaattctatgaacaacataaaagcatgttaaacattttatttgtttgaaatattatttatattcctgccacccaaagattgacaccattaacattctggcatcattttgagatatttcttatctagttttacgtagaggatgctgttgcagtataaaaccttttatattctggctcataaaatgttaatatttatattttgttttttacatggaacattttgttttcattatttacttatttattttttgagacagtctcctcttgctcaggctggagtgcagtggcgtaatctcgctgcaacctctgcctcccggattcaagtgattttcctgcctcagctgggattacaggtgcatgccacctcccgtggctaatttttatatttttaayagagatggggtttcaccatgttggccaggctggtcttgaactcctgacctcgggtgatccacccacctgccccttccaaagtgctgggtttacaggcatgagccaccgtgccctgcctatttctrttttttttaaaaagagatgcactatgttaccaaggctgatctcttgagctcctgggctcaagcaatcctcctgcctcggcctcctaaagttttgggattacaagcaagagccactgtgcttgtcctttaaaatggaaaatttaagttttttgcatggatatatgtgattccgaagtcaaagctgtataaaaggttatacacagagaaatcttgtttcttccttgaccctgttccttctgtttctttcctgctttttataacattttaaattaatttgtttagccttaagtgttttttacagcaaatatatacatatgtattcttatttctcattctttctcctggtttaaaaaaaagttactatgtacattgttttgtgcctttgcttttcatttatcctggggattttttcacattcgtatttggatttttttttctttaaaataatttggtccaactttttgtttaaatgcttcttttcaaactttacaatttcattagtattctttaatactgtgtaacttcctcatgacactgctcagttttgtttagtttttggagtagttaccatatgctaggcatcatggatataaggataaataggtcatagcctcttcctctggggaccagaagtctaagtggggtatagatagacagtgaataaataatttagtaaatgatatgataagtgaaagaggtaaacaaagacgtgttctgggattgaggaagaggtttaactggtccattgaagcatggggtagggattgtggagactttctggagtaggtaatttcacagctgaattatttctgaggaagtatgtagctgtaagtcatccaggtaagtgggaaaatagcggtccaggggagggaatagttcgaaaggtgagaagagaggaagagcccaactgcattttgtactccagggagttttaagcatttgttgagagttcaagacaatatactggtaaaacttgccttcacatacctttgtaaacacagctttgtgcttcatgaactatcttctttagatatctctagtcatacgcaattactttggttaatgttcttccttgacaggtaccgattattcctactatcatgcaatattggaggctgcatttcagtttctgtcacccctccagcagaatttgtttaaattttgtctgtcccttcgttcttactcagctacaatccaagccttccagcaggtgggtccagtgctcttaaagaacagcattttagagtgtatatcatgatgaatggatggaccccagttgtcctggaattgaattacagagctattatcacttttttgcctgaaattttctaggatttatgatttttaaaaaaaataataagcaaaattgatgttaagtcttcaacccacagatttaaaaaaataagaraaagaahatatagaaaagagacagcaatattttatttatgcattgcagcctgggagatgtaatcttgttaaaccagtgagccagcatctaattacagcctgtagttctaaaagcagttcacaggaaatacaggaggcaagaaatgtttagcatcaccacagggatgcagtcaggaaaatctagaattcaggaatcgttgtagtaaagtaatctagtttcttcagtacataaattatggaaatttctattgtaattgaaaagaaaaagagggacagaggaacctcaagttaagagagacttaagaagaganaaagatgtcttcaccaacttgatatttgatataaaagcaatgctaattttaaaattattttttattataaaataaaacatggaaaaactcctcacaaaaaaatatagtaatggactattataatgtgaacatccttgtaattttcacccaagtcaagaagcaggacttagtctggcaccatggaaagccctccatgtactgtgtcctgattgtggccacctttcacccctgaaaccaaccaccctgttaatttctgttggaatcacttgcttgttactgtattgtattgcccaaaggtacatcttcacacaataaagtgattttttttttcatttttctttattttgtgacacagtctcgccctgtcacccaggctggagtgcagtggcgcaatcacagctcactgcagcctccacctcctgggtttaagtgattctcctacctgagctggggtagcctgctaccacacccagctaatttttgtatttttagtagagacaggatttcgccgtgttggctaggctggtctcgatctcctgaccacaggagatctgcctgcctctgccccgcaaattgctgggattacaggcatgagccactgtggctggcctgtttttgcatttattgattttgtttttttgagacagggtcttgttctgttgcccaggctggagtgtagttctgtgattacggatcactgcagcctcaacttttcaggctcaagcaatcctcctacctcagcctccttagtagctgggactacaggcgtatgccactgtgcctaattttttattttttttattttttgtagagatggggtctcactatgctgcccaggcttaagtggcaggcttaactgcccaggcttgggcttaagtgatgctcccactctggtctcccaaagtgctgggattacaggcacgagctaccacactcagccagtttcaacaatgttgttttgtcataatttaatcacctattttgattatacatgtctttatctcgtctttggttagaaatttaaaaagtatgtgttgtgtcttatgtgacagatagcagctgatgaacctccaccagaaggatgtaattcgtttttttcagtgcatggaaagaagacttgtgaatctgatacccttgaggctcttctactgacagcctctgaaaggtagattatgtgtttctttattttcatgtcatgcatttccagtgctgcttctgcatttggtctaccttctgattttctcatctgttttgtatcattaggtgtaatggtttagagtatggcttctggaaccagactgactatatttgaatctcagctccgtcacttaaaatagttttgtgaaatgtggcaaattactttctttcctaatctcatttcaaaatggagatgatacaagtatttagtattaactgttactgtttagtaatgactgcatctgagcaatgacatagattttgtcattggcttagtaaggaatactgtgtgtattaaagccaatgcctgaaataatgatattaatgataatatctctcaggatattattagtttcagacaaaggaggatatttgaaagataattgcaggcttgatttgaatattaatttggtaactaatgtaccagctttttgcccaaaggtgggtttcctgtggtagacaactctgctatgtatcattttgctgaccggctagggcagcaagccctctgtacctcctctaatgctgttcataaacagaaccgtgatctctccgtggggttggccggccctctcagtactgctaatggcagttaggtggtgtaggtcttctttagtgagattggctscccagcacccatcctctgcccaccaaatggcattagtgcttcttactcagagtgccgaccaaaaaacagcgtgcgttccagccatctccgggtcaaggcatggacattcagaaatggctgcatggtgatacagtagtgctgtctcttgggggaaacaaaattgatggctttgtaattcttttaaaaaactttaatttgctacaacaataatgcayacctttatgaagaaaagaacaacggtgtctcctctctctgagaggcggtaactgcttttaatggtttggcatatataccttcagacttttttctatggttttaaatttatayatgtaggtagttttatttttataaaaggtatctttcaatttagtacaagtgggtatacctcgttatttttaacacatgcataacctaggtaagactgtcccgtaattggtaatttacctcttacygatggatttttaagtcatttcctcctgttacaataaggctatatggagcatctgtattcatgtctttactttctgctgagttgtatagtttattataatagagactggtaggtcataaagtctgtgcattaagatctgttaatatcttgatgccatccttagataagtttttttgggagaagttttaaaatttatgaggaaaactgaaatgttaagtccattgggggcacaagcctgtagtcccagcactttggcaggctgaggcaggaggatcacttgatcccaggaattccagaccaaccggtgcaayaaagtgagacgcagtttctccaaaaagtagctgggtgtggtggcagtaaccacgcacacgcctttggtcccagctactcgggaggctgtggtgggaggatcactttagcccaggaggtagagactgcagtgagccctgttcatgccactgcactctagcttgggcaacagagtgagaccctgactccaaaacaaaaacagaaacaaaaacgtccattaggaagatcatagtagtaaaaatagtagaggagatagacttagtagaattggcaagtaatatgctgaatgtcatcctgtgctttttgcattatttatacttacatttttatttatttatttattatttatttatttttgagacggagtctcgctctgtcgcccaggctggagtgcagtggtgccatcttggctcactgcaagctccgcctcccaggttcatgccattctcctgcctcagcctcccaagtacaggcacccaccaccatgcccggctagttttttgtatttttagtagagacggggtttcactgtgttagccaggatagtsttgatctcctgacctcgtgatccgcccgcctcggcctcccaaagtgctgggattacaggcgtgagccaccacgactggcctatacttatagtttcaaataaaaagctaatcatattctatttatatggtagaaaaatatacttggccagccatggtggctcacgcctgtaatcccagaactttgggaggctgaggtgggtggatcgcttgagtcaggagtttgagaccagcctgggcaacatgacaaaacccatgtctacaaaatatacaaaatttagttgggcatgatgtcgtgcacctgtagtccctccttgagctctggaggtcgaggctgcagtgagctgagcgatcacgcgactgtgctctagcctaagtgacagactgaggacttctcaaaatataacataatataacatattatattggccaggcctggtggcttttgcctgtaatgccagcactttgggaagctgaggtgggtggatcacctgaggtcaggagtttgagaccagcctggccaacatgatgaaacactgtctctactaaaaatacaaaaattagccgggtgtggtggtggatgcctgtaatcccagctactgaggaggctgaggcaggagaatcacttgaacccaggagggagagttgcagtgagctgagaccatgtcattgcactccagcctgagcaacaggaatgaaactcccttttccaaaaaaaaaaaaaccccnnnnnnnnnnnnnnnnnnnnnnnnnnnnnnnnnnnnnnnnnnnnnnnnnnnnnnnnnnnnnnnnnnnnnnnnnnnnnnnnnnnnnnnnnnnnnnnnnnnnnnnnnnnnnnnnnnnnnnnnnnnnnnnnnnnnnnnnnnnnnnnnnnnnnnnnnnnnnnnnnnnnnnnnnnnnnnnnnnnnnnnnnnnnnnnnnnnnnnnnnnnnnnnnnnnnnnnnnnnnnnnnnnnnnnnnnnnnnnnnnnnnnnnnnnnnnnnnnnnnnnnnnnnnnnnnnnnnnnnnnnnnnnnnnnnnnnnnnnnnnnnnnnnnnnnnnnnnnnnnnnnnnnnnnnntaatcttaatttgaattttcataactgtactttatattttgtgacatttttagtgtttcacaattatttttaaagttttgagcttttattatttattttcagacccaaacctttattgttcaaaggagatcacagatatccctcgtctaatcctgaaagccctgtggtgattttctactctgagattggctctgaggaattttccaattttcaccgccagcttatatcaaaaagcaatgcaggcaaaatcaaytatgtattcagacattatatatttgtaagtattgacttattttacacctgttttgaatgtaatttgcctagcatgactttagaacataagctaataatctccctctttataaaaaaatctagttatttgaatcccttttttgayaaatccagtagtttcattgagtctattatttgcacatatgatgtgctttgcttggctttctgaagaaatataaaacatgctaaaaaagtagctcgataaagtttacattttatttcaaaatgaaccatgtaaataatcttttctgattttaatatggtcatcatactatggaactgattgttgaattcagtttcctttccaaccttttttcttctgttttctctttgccacctttttatttggtggaagggggaggattttctaaacaggcgattcataggtagacttgatgtaatattaagcttttaagactctgtgtaatatttagtcatttaaaatatttatatgtaaaggttgttagccctttaaagtttctatgtcataataagctcagtactaagttcatgcaaaaaaaataaaattttatttattgatttatttatttttgagacagagtctcgctctgtcgcccaggctggagcacagtggcgcgatttcagctcactgcaacctccgcctcctgagttcaagtgactctcctgcctcagcctcccgagtagctgggattacaggcactcaccatcatgccggctaattttttgtatttttagtagagagggggtttcaccatgttggccaggctggtctcaaattcctgacctcaggtgatctgaccgcctcagcctcccaaagtgctgggattacaggcgtgagtcactgtgcctggccataaaattttaaatgaaaatttgtacaagcagaaagttttattgaagtccagtttttgattctccctctgcccccttcattgctgttaggatggatgttaatgtctgaagggccatcttcagtcaggatgctggtgagcctgtgacatctggtcactccaagctcygctcgaaggcatttaaatttaataaaaagcatactcccatgggcctcaaaaaacacctctgggactgagacctcaccagctttcaaccctgctytgtaggttctggaacttctttttctctttctccatttcttatggttgggaccatagcactttcagctgtccattcatctggttttgcttctaccttggaattccattcccacagttgtggcagcctacaacatgtaaaggagcctaggattttataaggagagaatatagactctgrattgatttttaaaacatataatcaatattttaatggtagatacgtgcttttattactcttgagtttttggtaggttttggactaaaaaaatttgtttagtgaactttcttagccatatagttaatatcgttaaaaaacaatttaaagatattttgagggcataatcygaggtaatggctagtagatgcaacattaacatggtcatgccatgtacactgtgacatagaaagagctaggtggtaatgatggaattcttgctttacttgcagaatcccaggaaggagcctgtttacctctctggctatggcgtggaattggccattaagagcactgagtacaaggccaaggatgatactcaggtgaaaggtgaatttgtaaaaatgggaccagtgtgctttcttcaaatatgagttaaaggggagtttgtttccatatgaaaaataatagatttaggtgtatgctgaacctgtgtttgcatcctggttctgttacacctgagtgggtgacccttaagcagattctctagatcccagttttctcttgtgtaaagtacaggtaatgatacatgtctcttccagtattggggaggaataaataagrtgtgtaaggaaagaattttttcatgtactaaaaaaaaaaaaaaaaaacaaaaaccctcaaaaaaagaacctggcacagtggtttgcccaaaaacgttcagcaagtagtagctattgttgttgatgttataggggatttacaaatagccatttatttgtgactccaacgtgaaatcttaaagtatcctatatttaacaaacaattttatgttgtttattatttctgtacatggaacagtttactgtggatactttctgttgtaatactctagggttttgaatttattattttacctacaagttttaaatgmtattttttcatttcttttatgcttattttaaagataaaaaatcaatttgagtagtaaagcagatggaaaataaactactacctcattctattttcttcaataattgtattaggattaagttgactaattataaattcttcagaattttaatattgaaaaattctttgttcatagtgtttgactattaatttcataattgtccataatgtttaaatgtattaattttgaagtttttagcatgtaaaattttcaaagtttaaggaaaaatgcattctttatccaggaacacaggagatattaaaatgcatttatcctgtttgtttaaagaaccattgccaaagggtaattgtgatagtcagcattttaaatggtataatttcaggggtttctgatttttttcacattattcaattttatgaagtttatgagactagtaacgtttttgtttcaaatctgagcaattattaataatatgtattttctattctttcataggaactgaggtaaacaccacagtgattggtgaaaatgatcctattgatgaggttcaggggttcctctttggaaaattaaggtatgtatgttctgtgtattttgggaaacgccctcattttctttaagcctccaggctttcttgcattttaagcatcatcttactcattactgtctgagtttctcatctcctaacagtactttatgtatgcaatcctacgtggaaagtcaaccacttagtttatagtacagtttatgatttcacattattcttttttttttggagacagggtctcgctgtgtcgcccaggttggtgcagtggcgtgatctcaactcactgcaacctccactttccacgttcaagtgattattctgtctcagcctcccaagtagctgggattacaggcatgcgccaccacacccggctaatttttgtatctttagcagagatggtgtttcgccacgttggctaggctggtctcaaactcctggcctcaagtgatccactcgcctcagcctcccaaagtgctgggattacaggcatgagccactgcgtccagcctgaagcacattattcttaattgatagtatggctacctgcccacagtttaagtgcgtttttcttgcctctcagttgatggcattaagttacataccattttttgattgccataagaggagaaattgaattgtttcacttaatattttcccaggaaaaaatgtatttaaaagtttttttcaaacatagtctgagcaaaaatgcgaaatagatatagtaaattttatacatgctcaatgggaaaaacattttattattattttttatttatttatttattttttttgagacagagtcttgctcttttgcccaggctggagtgcagtggtgcaatctcagttcactgcaacctccgtctcctgggttcaagtgattctcctgcctcagccccctgagtagctaggattacaggcacccaccaccatgcctggctaacttttgtatttttagtagagacggggtttcaccatgttggccaggctggtcttgaactcctggcctcaagtggtctgcctgcttcgctctcccagagtgctgggaatacaggcgtgagccatggcccccagctcagaaaaaacattttattagaatttgctttatgtgaaaggaaatggtattttaaaaaattccataattatgtaatcatttaatgaaagcatcatcataacctgttaatgtaagcatcatagtattttatagctggaaagtcttcttaactgttattctttttttttttttttttgagacggagtcttgctctgttgcctaggctggagtgcagtgccacgatcttggctcactgcaagctccgcctcctgggttcacgctattctcctgccttagcctcccaagtagttggaactacaggcatccgccaccacacccggctaattttttgtatttttttttttagtagagatggggtttcactgtgttagccaggatgatcttgatctcctgacctcctggtccgcccgccttggcctcccaaagtgctgggattacaggtgtgagccaccgtgcctggcctggaacgtcttcttagctgttattctaaaagttgaagttatttccctcatggcttgataattgtttagagccctgaattctgctttatctggcagtttttattaggacattttgtgtgtgtgtgtgtgtgtgtgtgtgagagagagagagagagagagagagagcgaaagagagagaaagtgatcaaatagaaatagtatatgctagactcagttttatatacttcagctttgagatttggccaagtgaaataaccagattaacaatttagaagagatatcttagtttacattgaattacatgttgagttcatcctacatatatgtacatttcttctcgtttaacatcagttttgaccttgttagaatgtaatcatattctatttttatttgactcaggctttcagaatccttttctaaaaaaattttttcgagacagggctttgctctgtcactcagactggagagcagtggcacaatcacggctcactgcagccttgacttcctgggctcaagggatcctcctacctcaccctgtcgaatagctgggactacagttgtgtgccaccatgcctggctaattttcaaatgttttgtagagatagagtcttgctatattgcctaggctggtcttgaactttgggttcaagtgattgtcctgccttggcttcccaaagtgttagaattacaggtgtgagctaccactcccagcttcagaatcttttttcacatttgtggtgtttatgtttattttttgggtagcatgatgattttatgcattcacagcacaaaggtattatcaagaatattgaggctgttttaccttttggacattcagaatagttatttagctatccaaagtaattagaccttttttttttgtttgagacaggctcagtctgtcaccaaggctggagtgcagtggcgccatcatggcctgctgcagcctccacctcccgaggctcaggtgatcctctcacttcagtttttgtatttgtggtagagatggggttttgccatgttgcccaggctggtcttgaactcctgggctcaagggatctgcgcaccttggcctcccaaagtgctaggattacaggtgtgagccaccgcgcctggcctcatttttggtatttaagagtttgtataggttgagtgtcttttttctgaaatgcttaaactagaactagagtgtcagatttcaattttggaatatttgcatgatacttaccagttgggcaccccaagtctgaaaatctgaaacctgaaatgcttcaatgaacatttactttgatgtcatgttgacatttaatgagttttggattttggagcattttggatttcagaatttcggatttgggatgctcaggctgtagtaactgacaggaagtgggttggttggacagtgaacagtctgagggaattttaatttctgtatgttgtattaagaaattttgagttagccgggcgcggtagctcacgcctgtaatcccagcactttaggaggctgaggcgggcggatcacgaggtcaggagttcacgccattgcactccagcctgggcaacaagagtgaaactctgtctcaaagaaaaaaaaaaagaaattttgagtttatggcatttaaaagaaaaaagtaatgtactagccgtctgtctgatgtaaatgttatatctctgccccagatcacctctgctttactatagtggaatatgctatatttaaagataaaacccagtaactatggttagcctaaattgtattcatgttactaagagatttatgagcatgtaggctaaaggaaactcattttgggactggcagcagtttttttcccttcagttttactttgagaaattacagtgattcacaaaagcatagagaaaaatttattcccacatacttacaacccagaatagattgctgttgtcatacttgcttttctcttctatagaactatttattaagctttttttttttcccagtataagcctttttttactttaagaacaaaggaaaacaaacaaaaaataaaacaggtcagtaaacactgcaggtatagccgaagtctcctttgttcctttctttctttcattttttctttttttttttaagagacaaggtcttgctgtgttgcacaggctgacctggaactcctgggctcaagtgatcctcctgccttggcctcctcagtggctgggattacaggcgtgagccaccacacctggcctgaaaagtctcctttgttaaccactctcagtctccttatctacctcatagggaatcactattctagcaatttttctataaattttatgagttttaaactagcttctaattttctattttttttaaagaggaataattatacttcattttttccccctatgtcgtagaaaatttcctagggttgggasaggaaaaccatgaagataaagttggtttacttcttcttatgctccgggaaagaaaaaataatgaaaaggactgatttttatgtttcttttagagatctgcaccccgacctggagggacagttgaaagaactcagaaagcatcttgtagagagcaccaatgaaatggcacctttaaargtttggcagttgcaaggtaatgaaaacagggagaggtcattggcctactttttggctaagttttatggctttaaaaaatgcaaaatttgaatttaattgtatgtagtacgtgattctgaaggygcctcagattttaaagataagagtgattaattacgattaatcagggaagaaaggaagtccttttgtaaacagataacactaggtagaagtaatatatataaacaaatggcaagtctttctgtgtgaccatacataaacttgtaatacgagaagcaggtcatagtcctaagttcctatatatatacatttcttcaactgtttatctatagagtgtttaagacatgtcattgtggcaggatgtatgtgtttttctctgttccaaagaactatttttcaagtttttttccccaacgtcatttactaaaagtcttcatgctgtattttgtgatgtattgtaaatttagaaaagggaaaaggacttgggcctgatttagcctctgctacatgcgttagtgtgtgccctagtgttttctgcagatatatcagaaacggctcaactgaatactccagagatctttgaagtgaataaaacctgaaattaaatcatgggcactctctggaatggttgcattcgaagayattcttaattaccatgaaaagagtgggaagtaaatttggattttgttttctgcttctcattgcattagattaatccacttttaattatatttgacattgttgcagatctcagtttccagactgctgctcgaatcttggcttctcctgttgagttggctttggttgtcatgaaggatcttagtcagaattttcctaccaaagccaggtaatgtagaataatgctcttctccttaacatcatacccagtcatcgtcatgttcacttgccaaatgaggtaataacaatatgaaaattcctagaaaattaagattcttttttttttttttttttgagatggagtctcactcttgttgcccaggctagagtgcagtggtgcaatctcggcttaccacaacctccgcctcccaggttcaagcgattctcctgcctcagcctcccaagtagctggtactacagacgtgcrtcaccatgcccagctaagtttttgtatttttagtagagacagggtttcactgtgttggccaggctagtcttgaatgcctgacctcaagtgatctgcccgccttggcctcccaaagtgctgagattacaggcgtgagccaccacgcctggcgaaaattaagattctttatgaccaccaccactactattgcagatggtgctctgtgtcttgaagatggcaagaccatgcattgtgtggttgaagtgacagatttaggttatgttcttagcacttccacttattagttgtgtgacctttgcaaataaacaacctcagtttcctcagcagtggaacgagaattaaaatacctgcctttcaggattggatgagtcttgctcatataactaactaatctagagtctgtcccagaccatagtggttttcttcatgaaaggttttacatatgtcatcttattgaatcttgaagaaactgagtcatagaggctaagtgactagttcatagtgacagaataagattttgtttggaccgggcttggtggctcatgcctgtaatcccagcactttgggaggccaaggcctggctaatttttgtatttttagtagagacagggttttgccatgttgatcagactggtnnnnnnnnnnnnnnnnnnnnnnnnnnnnnnnnnnnnnnnnnnnnnnnnnnnnnnnnnnnnnnnnnnnnnnnnnnnncaggagttccagaccagcctggccaacatggtgaaaccgcttttctactgaaaatacaaaaaattagctgggcgtggtggcaggggtctgtaatcccagttactcgggagtctgatgcaggagaatcgcttgaacccgggaggtgaaggttacagtgagccaagatcatgctattgcactccagcctgagcaacaagaacgaaactccgtctaaaaaaaaaaaaaaagattttgtttgtacgttttctgacattgccttcaattctgtaatattgctgcacatctcataaatgcaaggcaaaattgttttaaaagccacatttttagaaactattgacttgaatggttcccagtcattttcttgagtcactgaatgaagtgttttgacttctgatgtgagatattttataactaagtttgtttatttgggacttagacatcatgtagtgaattctcatttagtccagctgctacttgaaggtatacatgaatgattccacctccaccataagtgcttaagtgggaagagcaatctgctgccttggtgtattcaacattatccttttagcctgagagtagtagagatcatatatagaaatggggtgcatatgttttaagaacttggaaacaactgcacctgttttataatgctatagctgctacatttctttgattttgtatcttacaaaaaatatacacrtctgagaaaggagaaatatatttatcaattataaaaatttaaggtttttcccattcagttttttctaatttattgaataatgtgtttcatattttaaaatatggaaattgaagactttatatcaaatattaagccaagcactcataatgtttttatttccttagagcaataacaaaaacagctgtgagctcagaacttagaaccgaagtggaagagaatcagaaggtattcaccgatagaaaatactgacctgttttgtattctatctttaaagataaggaaatctgagtttaatcagcagcawttaacagtgtcactcttcttttatctaagatggtgattttttcatttctgtgatctttgcatttttagtttttaatgaaagttcagtatgcacrtaactgaaagcatgaagtggtgctaccgtgttgtttaggaaagcagcacccctaacatgtctcaccccgttcctgaagacattcactttcgacatttagctgattcttctgatatttctctccagaattctagcttacattggtactttatttttcacgttcagacattatatattggcctcctatttaaacagtgtggtttaactttctttcactgcctccccctcagtgtcccaccactattctatattggcactgttcctgtctatccatcttctcaatattggatgttgtggttttacctggttttgatgtggtctgagatggactggttgctctttatgcccagggcatgccggtcatcctgagaccttcctttaacctcctttgttggatcctctgttgcttgattccatgtcttttgtgtttttggtttatttccttgttttggtacagctcatcattctttgtgagaaaagttgcctgggaggcaaatttgaaattctgagaaatcaactttctacttgtttttgtttttgttttggagatggagttttgctctgtcacccaggctggagtgcagtggcgtgatctcagctcactgcaagctccgccttccaggttcacgccattcttcttcctcagcctcccaagtagctgggaccacaggcgcctgctaccactcccggctaatttttttgtatttttagtagagacggggtttcaccgtgttagccaggatagtctcgatctcctgacctcatgatccacccgcctcggcctcccaaagtgctgggattacaggcatgagccaccgcgcccagccaactttctacttgtttttattgatagctcgttatacaatattggcaggttatacaattctaggttggaagtcatttcaaaatttgaaacaaggcatcgcctcttggaattttagtttccattgtggctgttgagaaatctgaagcctttgtatgagatctcttaaggatcttttctttgactctagttatctgaaatttcataattatatgtgtttttaaaaaaatctctgtactgttaggtggttcgtgggcccttaaaatcttgaaaatcatttcctttagctttgggaaattttcttaaattctttgtttgtgtttcttctctctggtttctctttcctcttttcctagaaatatgtatttatttattttttaaatgttgcacctctgactagtttggccttttaaaagtctcttctttcctattcttttctctttttcaaaaaaaaaaacactttctggtaagagtttttaacctgtgtgtatctttcttcctttagttgtcaaatatttaattttcaggggttttttttgttctttttatggtgttcccgtgtatctctgaagataatggtgcttgtgttttctgtctgcaaagtctgtttcctcttaagctgcgtttttgggttttggtcttttcagtggtggaggccttccttaggtgtctggtgatcacactcagagtgaggcactaaggacctggttggaagtcctaatgatgtggctttgtgactgtaaggtgttctgttgtgaccatttcctagggaaccccagttacagtatctttgttccttttcttttgggttggtcagtccttgtcagtctccagaaaaggatccgtcagtcttcttgctggtgggtgaaatctgtttgctagagctgtagaagcacagtagggaagagcgtttggtgacttgccttcgattccccattatgtgtgtggggtccctgtcctccttgtgcttgatttgccattgtccacagatgttctgttttgttcttttccagggaatgagccttcattttgctggagtagggggtagcaccgacctcaggcacctggctgtgggaaatcagttggggggctggggggttttgtcttaaagggctttatatcagaacttagctaataatcaccccttgtacatgtcctgtgtgctgccagttcctgagcctttggtgagttccacagggtgacacaggtttcttgttgacctttcctgttgttggtctaacattcagctttctcagggctgttgggacagtgactcctcacccacctctcttccagcttccaaaatttggtggcctttttctttcctgttctctttgtctttgtggatttataactgaaaaagtagctctagtgacatttcagtagaattcaggagggaaaaaagttcttatgttcaattcactatctttaccccaaatttccttaatctttatatctgagatattagtgaattaagtacatctgagggataaataaatgtttctcaaatgtttactaaattgaaaaaccttattgggagtttttatttactttttagtttccaaagtaaaaatatcaaatattatcttaaatttagggcctttttccccactaaggaagacaaaattatactatattgctgtttcatggagtcttaattttttttgagtaaaacattttattaaagcataaatatatactttttttttttttttttgagatagagtcttgctgtgtcgcccaggctggagtgcagtggcatgatctcagctcactgtaaccttcgcctcccggttcaagtgattctcctgcctcagcctcccgagtagctgggactacaggcgcgtgccaccacgcccagctaatttttttatatttttagtagagacggggtttcaccatgttggccaggatgatctcgatctcctgacctcatgatctgcctgccttggcctcccaaagtggtgggattacaggcatgaaccatcatgcttgaccaaaatgtattttttttttgagacagagtcttgctctgttgcccaggctgaatgcagtggcacgatctaggctcatggcaacctctgcctcccaggtacaagcagttatcctgcctcagcctcctaagtagctagaattataggtacctgccaccacgcccagctaattttttgtaattttagtagagatggggtttcaccatgttggtcaggctggtctcaaactcctgacctcaggtaatccacccgcctcggcctctcaaagtgctgggattacaggcatgagccactgtgccctgcccaaaatgtatatatgaaacacaaagagggaagcacacaaattctcagtcattcgtttgatgaactttcccaaaatgaacccatctatattaccagtgtccagacctagaaatagatctgctattcaccagctcagggtcagtcttttttttttttttttttttgagacagtcttgctctgtcgttcaagctggagtgcagtggtgctatctcggctcactgcatgcagcctctacctcctgggttcgagcggttcttgtgcctcagcctcccaggcagctgggactataggagtacaccaccatagctggttaatttttgtatttttaatagagacggggttttgccacgttgtccaggctggtctccaactcctggcctcaagtgatccacctgccttggcctccccaagtgctgagattacaggtgtgagcctctgtgcctggcctggatcagcctttttttatcgtctgatggtgctgtgcactcagccagcgagtgagtagatgtgaattcctctctctcggaagaaattccagttcacaattgatacacctttccatgatctccttatttttttctcttctttttaaaatcgagaagtaaaaattgcatatttttgtggtgtacaacatgtttcgaaatgtgtatacactgtggtattatcccctgtcttacttgccattgaatcccaacagcatcttgaagcaaatcttagccctgccttaggatgccaagatttgtacaggtagtgaagcccagaaacaataaaakttttttwaaaacattctctcacagctccctaataattattaaaatttttcagtatttcaagggaactttaggattacaacctggagattcagccctcttcatcaatggacttcacatggatttagatacacaggatatattcaggtatggataatatttttcattctctgaaaagtttttgtaatgcgtagcaccttgtaacatgttcatattgccgttccttcttgatatggcatgatgcaaagtctgatggcttaccagcccccactgggtggacgtaggtagtaggcacatgccatgatgggtaggcaggatgacatatctccatcttgtgttacagtgtgtgttcaaggcctgagtgttttctgaggctgtccttttagaagctatacttttccacttaaccatgggaacatagaaaagaacaggttctttggcttttggaacagtgtgaagtagatttattaaaaataactgcctctgggcctggcacggtggctcatgcctgaaatcccagcactttgggaggctgargccggcggatcacttgaggtcaggagttcaagaccagcctggccaacatggtgaaaccccatctctgctaaaaatacaaaaattagccatgcctagtagtgtgtatctgtagtaccaactacttggaaggctgaggcaggaggaccacttgaacctgggaggcggaggttgcagtgagctgagattgcacccctgcactccagcctgggcaacagagtgagaatccatctcaaaaaacaaaaaacaaaaaaaaannnnnnnnnnnnnnnnnnnnnnnnnnnnnnnnnnnnnnnnnnnnnnnnnnnnnnnnnnnnnnnnnnnnnnnnnnnnnnnnnnnnnnnnnnnnnnnnnnnnnnnnnnnnnnnnnnnnnnnnnnnnnnnnnnnnnnnnnttcagactttattcatttgttgttttgagatagagtctcaaaagaaatttttttaatcacatcttatttctccttcctttctatcttttttttttttttggagacggagtctcactctgttgcccaggctggagtccagtggcatggtcttggctcactgcaacctctgcctcccgggttcaagagattctcctgcctcacccttctgagtagctgggattacaggcacctgccaccatgcccagctattttttttgtatttttagtggagatggggtttcaccatgttggccaggctggtctcgaactactgaccttgtgatccgcccgccttggcctcccaaagtgctgggattacaggcatgagccaccgcgcccagcccttcatctctatctcttctgtctctcccagcaaacctctaagttgggtgtggattctttcaggcttttttctgtggtcatatgtttgcctctgtgaattggtactgacattgaaacatatattaagcatatataatgtagtatctctttttaatctttattttgagataattgtaaatacatatgcagttataagaaagaatacagagagattaatgtactgtttttaaaatcatgtggtgtaaaagtatagatttagggttattttatcctcaatttgtgtgtttattgcttttttaaatttctcaattaatttgatttggcattgaggttgaactgatacattttttttcatggtgagaattttttttaaaagctttttttcctagtaaatatctctttttgtttttccccccagtctgtttgatgtgttgaggaatgaagctcgggtaatggagggtctgcatagattgggaatagaaggcctttctctgcataatgttttgaagctgaacatccagccctctgaggcagactatgccgtagacatccggagtcctgctatttcagtgagtattttgttagggtgatcaaaggactttctgaccaggaatcttttttatggtttctgatttgtctcttatgagggtgaagttactcccaccatctcttttgttggtgtgaaagatttataattgcttatatgggactttgtgtatgtaataaagtaggcccttaaatgcttcaaaaagttgagttattgttgctaatgtggttaagacagtgatttttttttttttttttcaagacagagtcttgctctgttgtccaggctggagtgcagtggcgcgatcttggcttactgcaacctctgcctcccaggttcaagcaattctcctgcctcagcctcccgagtagctggcattacaggagcctgccaccacgcctgactaatttttgtatttttagtatagacggggtttcacaatattggtcaggctggtctcaaactcctgacctcaggtgatacacccacctctgcctcccaaagtgctgcaattataggcgtgaaccagtgcgcctggnnnnnnnnnnnnnnnnnnnnatttttttcacttgacatgcccctggtattcagctgagcatctcttgggaaaaagcgtttagtttgtattttctcaattgcatacagatcttgtgtgatgtcgtgacatctgtaaattaaaactactattgaaaatgtcactttttagctaagaaccttctttagtaggattttgatatttgagatttgaaggatttatatagacttttgcctgccatatgatctttctgagcctttgtcttgtcatctgtcagagaatgtggggaatagggctgggcttggtggctcgtgcctgtaatcccagcactttgggaggccaaggcgggtggatcacctaaggtcaggagattgagaccagcctggccaacatggtgaaaccccgtctgtactcaaaatacaaaaattagccgggtgtggtggcacacacctcctaatcttagctattcgggaggctgaggcaggagaattgcttcaacctgggggtggaggttacaggtagctgagatcacgccactgcrctccagtctgggtgacagagcaagactccgtcacaaaaaaaaaaaaaaaaatagagaatgtggggaatagtgccatcttgggcagttgtggtaaaaaataaggtgagtggagagctgatcttattttttcttggtttctgtactgcattcattttagaaaaattttatttaagagaaataatgtagaatgtagataatcattacttgaattcatacttggtgatataacttattttgatgaagacattgttaatgtcatttgcttttctgttaaaagtacttataaagagtaaaagataataacatcaacatgacatgtttatgcaaacataaagggactaacaaccataggacccatcatcatgcttactaaatgttaacatttaatcattttgtgtcagatttaactgttttcttgggggaagaaacagttttagttgaagcccttctttgtcccttaccaaccacccctctccttcctgaagttcatatcttttctcaagttggtgtgcattcccttgtcccttattttatccttttattttctatcaaatatatttttctttctttcttttgtttttttagagatgagtctcactatgttgcccaggctggactcaaattcctgcggtcaagcaatcctcttgcttcagcttcctgaatagctggaaccataggcatgcaccaccttacctgactcctatttaatattctaaaaatttgaggccaggcacagtggctcacgcctgtaatcccagcactttgggaggccgaggtgggtggatcatttgaggtgaggagttcgcgaccagcctgggcaacatggtgaaaccccatctctactaaaaatacaaaaattagctgggcgtggtggtacacacctgtaatcccagctccttgggaggctgaggcaggagaattgcttgaattcgggaggcagaggttgcagtgagccgagatcaagccactgtactccagcctgggcgacagagtgagactcttgtctcaaaaaaaaaaaaaaaaaaaaaaaattgggataatccagtcaggcgcggtggctcacgccagtaatcccagcactttgggaggccgtggtgggcggatcactttagctcaggagttggagacctgcctggccaacatggtgaaaccctgctggaatgcaggaatgcaatcatagctcaccacagccttaaactcctgtgtttgagaggtcctcctgcctcagcctcctgaacaattgctctttgtggacatgaagttgtttctgatgttttgctgttgtaaacactactttaattaggctcttttttcctctctttttgtgtatacatgtgaatttatttggggtagatatctggaactagagtattgtattgtgttgtgttgtgttgcattgtgttgcattgcgttgtgttgcattgcagtctcgctctcttgccaggctggaagtgcagtggtgtgatctcagctcactgcaacttccgcctcccaggttcaaacgattctcctgcctcagcctcccgagtagctgggactacaggcgcacaccaccatgcccagctaatttttgtatttttaatagagatggggctttcaccatgttggccaggatggtctcaatctcttgatctcatgatactgcccactttggcctcccaaagtgctgggattacaggcgtgagccaccacacccggcagtactgcatttattttagaaaaattagtactaatatagtcttcaactttattagatccagttctctaaagtgtttgtccacataccagcattgcatgagagttctctttgctctatatcttttcctattcttggtcttgacaaactttcactttttctgtctagcgagtatgaaatttcattgaggtcttagctcatagttcctagattacaattgagggtgtacacatttcttatgtttattgcccatttgggtttccgctgtttatttttcatattctttttttttttccgatttttttttacattttcttttttcctttgttcttaaaaagtttagggctgggtgctgtggctcacacctgtaatcccagcactttgggaggccgaggtgggcggatcacttgaggtcaggagttcaagaccagcctggccaacatggcgaaaccccacctctactaaaagtacaaaaattcactgggcgtgttggtgggtgcctgtaattccagctactcggggggctgaggcacgagaatcgtttgaacccaggaggcagaggtttcagtgagccgagattgctccactgcacttcagcctcgtcaatagagagacttcatctcaaaaacaaaaacaaacaaacaaaaaaaatttcgcttctttcttttatttttatgtcttcttcattcttgacgctagtcctttattgggtttgtaggttacaaatgtcttcatctattctgtggcttatcttttagtcactcatttttccactcgatctttttgtcttttttgtttgtttttttgagatagggtcttgctctgttgttcaggctggagtgcagtggcacaatcatggctcattgcagcctcgaaccccttgggctcaggtgatcatcccgcctcagcctcctgagtggctgggacagcagccaccatgcctggctaatttttatatttttttgcagagatgggggtctcataatattgcccaggctggtcttgaactcctgggctcaagtgatcctcctgccttgtccttccaaagtgctaggattacagatgtgagccactcactgcagccaatctttttatctttgaaaatggtcttgtctcacatgattcttcttaaaatattttaaagtcttattgatattattgcaggttttactaactggttcctaatgtgcatgtatcctgttgtgttattttttgtagtgggtcaacaacctggaggttgatagcagatataattcgtggccttctagtttacaagagttgcttcgacccacctttcctggtgttattcggcagatcaggaaaaacttacataatatggtaagtaaaacttattgtctggctgtgaactctgtttctcccttggcctagtccctctttttttgtcatgtagaatggtcacttctcacctttactagctgcttcctcccccacccttcaccaaatactcttcccctgttcacactggaaaggctttgtagtgtactgaccacttgtggggctgtgggatgtaacaggagcattacagcccccctcagagtgtggggaaatgcttatttttaacacgaaggtttagactattgttttagtcttttaatttgtttttaattttaaaacatttttaattttttaatttttattttttctaatcagcttttccagattgaataagtttccttttcatactcttcacaccattcagtgatgtgtttgtttttattttaagactttatattttttagggcagttttagtttcatagcaatattgttttactagttttaagatagctctttttttacagtatattacagcatattgctactgtttttctttaatatcttaatccctaaaattcagcagtttaatttattcccttaaatatggttgtttgccaactcctacttgttattccttcttgcactgctttagagagagagagagagagggttcttcattggcccactttttccctctcatttctttcccttccctcacacagccgggaaagagatagtggtagggttagtgccaaggttggcctcctcagaacttgcagggaagattaccctctctacttttcttcttgtctgtctcttttcttcccccccactcccgcagaaagagtcttgctctgttgcccaggctggagtgcagtggcaggatctcggctcactgcaacctctgccccctggggttcaagtgattctcctgcctcacctcccagtagtgggaattacaggtgcatgccaccacacctggctgatttttgtatttttagtagagacggggtttcactacattggctgggctggtttcaaactcctgaactcaggtgatccacctgccttggcctcccaaagtgctgggattacaggtgtgagccaccatgcctggccacttttctgtctcttgaaaccacttctttcctttctagtcagaatttaaatctcattctgttttaccacatgtctgaactttattaagcgagagaatacgtctaagttgcttaacacgtaatacgtgtttatatgcttgcctgacagctgtggctgtggtctaagaattaggttctaagtgaattcttaattcagagatcctcagaaatgaatatacaaaaaggcaggctccattttttaaggtgagagagttgctaaacttggttttcatttggtgtagtagaaaaagcggcatcatcactttggagtacagttcccttgttatcagcgtaagtccatgagaaaatcacctagcccttcagtaccaggttttttgaacatagagggaggtagctgctatgtgtgtaattcatcttttatgtggttcaagcgtagctcgaaaaaggttggcttcatgtacagtgactcataacatttttctcggcccacagatacttgaataaatgtcatttcatgtgttcttttccctttcttcaacaggttttcatagttgatcctgcacatgagaccacagcagagttgatgaacacagctgagatgttccttagtaatcatataccactaaggtaacactggtattgatttgatgatgtatctaatttagctgaggttttatttgtcatttttaaatgcaagtctggtgctactgagttgtaggataattaatagtgcacatcactaatggcaattttatcttctggtcagtatgaagccagtgtcttttgggactgagaatttgcttctcaatgaatagaagcttaccaccaatgaattatcaataaatagcccatgtaaaaatagtttctggctgcagcttgcttcccaatggaagggaattttcctaggtgagtgtccacatcacaaaacctatttccactttcagcagagatatagagcattgccaataacttgttagcctgtcaaggactaaacatatacacagccttttgtagatgcaaacagtaacagttacttcacttgtgttgccaaacctgcctacagggtactgagtggctggatttccactgtctttttaagaacagttttttttattttttaaaggttttacatataaatgctaagatattttcacctacattctaaataattctggtaattttacatgttggtgaaattttaattcttagaaaatgtgaaaataaagaagaaaataactctttattcaataaatattactgtgtgttccatgattactactgggctaaatgctgtaaacaygtatgccttattctaccttcttggaaaagatcctctgtatactttcaaaccctttagggagatatatgatcaactgctaggttatgtcctactggttagttataagtgcgttaggatttcagggaaacaaaaaaaatcattgagatatttgggaagccaaaggtttttggagaagttggatttcaaataggctttgaggaaaacagagggttctgatagttggaaatgcagagattttgagtttcatgacatttttcatataaagcatgaatacatctggttagatggaagaacctattactggatcacaaccagagctatgttttgatyaaaagagaaatataaggacacagaagaagttgggtcgtggtacacagttggcactaatacaatatttcttgaattgagggacgagaagagggcatgtggtcttctgattgcaaaggcaggtgagaagaaggcacttgaactcctaggcaactgagagattgtgaatagttggagagagccaggcatacaggctgctctttccttctttgtaggagctcatgtggtcctgcatgttggctgctaaatattgatacattattattaattaaactccatagtttacattaagatttgttatttgtgttgatgacacaaatgtatgatgtaaagtattcacattacaatacagtttaatacagattagtttcactgccctaaaaatctcctgtgcttcacttgtttatctcttcctcccttcccctaaatctttggcaactactgatctttttactgtcttcatagttttgcattttccagaacgttctaggttgcagtcatacggcgtgtgcctattcagattggtgtctttcactgagcaatgtgcatttaagcttcctctgtgtcttctagtggcttgatagctcatttcttcttatcactggataatagtcattatgtggatgtccccccatttatttatccattcacttaattgaaagataccttggttgcctacaagttttggcagttatgaataaacctgctataaacatctgggtgcaggtatttgtgtggacatgtctacagcttcttcgggtaaataccgaggagcgtgattgctgcatcgtgtgttaatagtatgcttagttttgtaagagtatgcttagttttgttctaaagtagcggtaccattttgcatttccaccagcaatgaatgagagatcctgttgctccacagccttgccagcatttggttttaccagtatttaggattttggtcattctgataggtgtgtggtggtatgtcattgttgtttaatttgccgttccctaatgacatatgatgttcaggatctacttatatttatcacctatctgtatatcttgtttggtgaagtgtctgttcagattttttgtccttttcttttttcttctttttttccccctgcccttttgtctccatttttaaaactttggttgttttcttattgttgagttttaagagttctttgtaagccaggtgcaatggctcaygcctataatcccaggactttgggaggccaaggtgggaggatcgcttgaggccaggatttgagatcaccatgggcaacatgagaagacctccatctctacagagaactaaaaaagagtagccaggcgtggtggcacacacctgtagtcccagctacttgggaggctgaagtggaggattgtttgagcccagaggtttgaggctgcaatgagctgattgtgccactgcactctggcctcggcaacagagcaaggccctgttgaaaaacaaacaagaagagttgcatattttgtttacctgtcctttatcagatggttgttttgcaaagattttctgccactctatggcttgtcctttcattctgttaatagtatctttcacagggcagacatttttaattttagtgaagtccaaattaaccaagtgttgtctttcatggattgtgcttttggatctaacatcattgccaagctcgagaccacctaaattttcttctctgctatcgtctgggaatttttgtttttgtgttttacatttagacctgtgatccactttgaatgaatttttgtgaaagatataaagtctggtctagactgattaatatgcatgtgcatgtccagttgttcagcaccatttattgaaaagatgattctttgtccattgaaatgcctttgccccagtatgttcagtgcaaagtcttttttgccagcccatctatagatacataatagtatctctgtggttaattcctttattttaaaatttaaaatctgataaactttaaccttggttattgctttttgtcgtgggacagttgtaaaccttttttggcttttcttttaccaataattctcatactgcatgtgctaaatgtcacaatccccccctttctgtttactttgaaagtgtgaaaatttttattctagtttttgtttaaaatcagaaaaaaaaaatctcttaaaactatagcaacgctcttcatgtcagtaaaggaatcttttcatgacgtggaaatggcttgctttaacagtagaaaggcctaagccacgtttgagagcctgcttttttattaatactttgtaagtggccgggcatggtggctcatgcctgtaatcccagcactttgggaggccgaggctgatggatcacctgaggtcaggagttcgacaccagcctggccaacatggtgaaaccccatctctactaaaaatacaaaaaattagccaggggtagtggcgtataatcgcagctacttgggaggctgaggcaggagaatcgcttgaacctgggagacggaggttgcagtgagccgagattgcaccattgcactccaccctgggcaacaagagtgaaactctgtctaaaaaaaaaaaaaacctttgtaagtggtgtatgtatacctttgccaatcatgttagagtagagtaggctgtgaactgtgcttttcactcaaagagttttcctctgttagctataatgtatgagaagggtacaaggatgtcattctttttaaccatttgcattctttgacatgtttctttttttcttttccctttccctccagaattggttttatctttgtggttaatgactctgaagatgttgatgggatgcaagatgctggagtggctgttcttagagcatataattatgttgcccaagaagtggatgattatcatgccttccagactctgacacatgtacgtttttgttcagaatggcaaataattttttcagatctaacttactcttaataacaatgtgtggtcattgtatgctaggcagctggggtgtatagagctcaggggtgggtcctgaatttaaaagtcatgtctgctgcagtgtatagagatggatctgaggaagggcaaagcaaagtggcagggatgccagttgatgagctgttgcagtgatctccatgagaagtaatggggaaggtagttaagcagggctgcggagaatgaaataggttcaaaagaagtcactcagaatagtaagtattttatactttgttattttattcactttatctctgctaaaggtttgcttttgtttgtttgtttgaatatatcttccacaacggctaccttaaaattttatttatttatgtactttttgagaccagatcttgttgtgttgctcaagctggtctcaaactcctaggcttaagggatcctcccatgtcagtcccaaatagctgggattacggccgtgcaccaccatgcccagagaatattttaactctgctttttaaagtttttatttatttatttattcatttattttttattgttataagtacacatgtttgatcgagggggccaaagaagatagagagatggtactgtacacagctggtataggcttggaggccgaatgtcacacagagacagacacagaaacagtccagcactcagcagggaaagctgggcagtattctgaggcttgtaacacttggttggcaggtgacagtcagcaggggatctggcctagggctgaaggggcgcaggcatcctggaggctcccagatctgagatcccgggtggcacctgctgtggcgcctgggttcagctcacatcattcagggacttgcaggcaaacttgggcagtacgaaggcagcactgtacacatctgagcagctgcacctgctccacctgctgccgtgtcacttgttgcatgggcttctggaagttggtgctcgggtttttgctgcagagcatgaaggcaatctggccactgggataggtggggacagtgcagtaggcgtgtgccaccatggagaagagtgactggcagaactaccgtgtctgcttgatgaggtccaggtgcagccactggtactcgccctggcagcagagaatgctgtcctcgttgagggccatcttcatgagtggtaataggattccttgaagaggctctcagcggatcccaggagtcagtgatcataatattgaaggcatcctggttctgcttcaygaaatcaaaatcgtcacccatatgcagggtcagcttagagctagagaagccaatggccatacccggcaggaatttcttagagacctgagtgccatccttttcagtctatcatcggaccacagactccacagaggggtgcttcaccaccttgtgcaggatgccgtctttgtccccgacgatcagcaccttttgtgggatggggtggttgctgaatggcaggttgattctcatctagtaggagaacttgtccctgtccatgcaggggatgatgccatccaacaccagcacactgctgtgggtcttactgtggaaaacaaggatatcctgggagcgtgagcgctggcagtggagcagctgctccatctgtagcaacaaggcttccctgggctcaggctgcagatctcatggaaccagccctcctaaatggcagcgtgaccattgaagccaggctccatgtctcttgggctctgcggcctgagactgcaggctgtgcagagccacagcacaacaggaccagctacacccaccacccactgtttattttattttattaaaaaattttttttagagacaggatctcactgttgcccaggctggattgcagcagcgcagtcagggtttactacagccttgaactcctggccctaagtgatcctcctgcctcagcttcctggaatagctgagactacaggcatgcatcaccatacccagctaattttgttgttgtttttaatttttggtagagatgatgtctcactatgtttcccaggctggtctcgaactmctgagcttaaacaatcttactgccttggcctcccaaagtgctgggattttacgtgtgagccactggggcttggctgctgttttttatttcagaagtgaagtaatactgctcactgtaaaaacacttgaggccaggcgcagtggctcacacctataattccagcactttgggaggccaagggagggagatcacctgaggtcaggagtttgagaccagcctggccaacatggtgaaaccccgtttctactaaaaatacaaaaattggccatgtgtggtggctcatgcctgtaattccagcactttgggtggccgaggtgggtggatcatttgaggtcaggaattcgagaccagcctggccaacatggggaaacctcatctctactaaaaatacaaaaattgggccgggcacggtggctcatgcctgcaatcctagtactttggggaggccgaggcaggtggatcacgagatcaggagatcaagagatcaagaccatcctggctttaacacagtgaaacctgtctctattaaaaattaaaaaaaattaaatgggcgtggtggcaggcgcctgtggtcccagctactcgggaggctgaggcaggagaatggcatgaacctggcaggcagagcttgcaatgagccaagatcgagccactgnnnnnnnnnnnnnnnnnnnnnnnnnnnnnnnnnnnnnnnnnnnnnnnnnnnnnnnnnnnnnnnnnnnnnnnnnnnnnnnnnnnnnnnnnnnnnnnnnnnnnnnnnnnnnnnnnnnnnnnnnnnnnnnnnnnnnnnnnnnnnnnnnnnnnnnnnnnnnnnnnnnnnnnnnnnnnnnnnnnnnnnnnnnnnnnnnnnnnnnnnnnnnnnnnnnnnnnnnnnnnnnnnnnnnnnnnnnnnnnnnnnnnnnnnnnnnnnnnnnnnnnnnnnnnnnnnnnnnnnnnnnnnnnnnnnnnnnnnnnnnnnnnnnnnnnnnnnnnnnnnnnnnnnnnnnnnnnnnnnnnnnnnnnnnnnnnnnnnnnnnnnnnnnnnnnnnnnnnnnnnnnnnnnnnnnnnnnnnnnnnnnnnnnnnnnnnnnnnnnnnnnnnnnnnnnnnnnnnnnnnnnnnnnnnnnnnnnnnnnnnnnnnnnnnnnnnnnnnnnnnnnnnnnnnnnnnnnnnnnnnnnnnnnnnnnnnnnnnnnnnnnnnnnnnnnnnnnnnnnnnnnnnnnnnnnnnnnnnnnnnnnnnnnnnnnnnnnnnnnnnnnnnnnnnnnnnnnnnnnnnnnnnnntccaccatgcctgcctggcctatttagatttttcttaactaatgtattttttcatttgacacttaacaagactgagctgattccggccaggtgtggtggctcatgcctgtaatcccagcactttgggaggccgaggcgggcgaatcacgaggtcaggagttcaagaccagcctagccagtatggtgaaaccccgtctctactaaaaaatacaaaaattagctgggcgtggaggcgtgtgcctgtagtcccagctactcaggaggctgaggcaggagaagcgcttgaacctgggaggtagaggttgtagtgagccaagattgtgccactgcactccaacctgggtgacagagtgagactccatctcaaaaaaaaaaaaaaaaagaatatttaatttccaacctaggaagccatcttagtaaggtatatggaaaaggaagaattgctaacatgtcccaatttgacctttcaagaaaagtaattggccaggcgcagtggctcatgcctgtaatcccagcactttgggagactgaggcgggtggatcacctgaggtcagggtttcaagaccagcctggccaacatggtgaaacctgtctctactaaaaatacaaaaaattagctgggcgtggtggcaggtgtctaatcccagctattctggaggctgagacaggagattcacacgaatccggaaggcggaggttcagtgagccgagattgtgccattgcactccaacctgggtgacagcaaaactccgtctcaaaaaaaaaaaaagaaaaataagtatattttcctctaaattcagaaaaatgtggaataaacactttgaaatttgaacttaaaagtgtagttaaccaactgttttttctttcttcagatctataacaaggtgaggactggagaaaaagtgaaagttgaacatgtggtcagtgtcctggagaagaaatatccgtatgtagaagtgaatagcattttggggattgattctgcttatgatcggaatcggaaggtaaaaaatttctttgtgtttcttatttgattgcaacattgtactgtccttaaccccgtgtttgggggctttggttaataatggcgatggtggttaaagtgtttcagtacttagcatttaaaagtttagaaaccagatcacttttcagtgtttgaaaaagtttttatttcagtcttgtgaagatatgactgatttttaacttgcttattaacttttaatggaactgtttaagtctcattttctcttatcctgttgaagaraaagtaccagtagctttttattgtggatgattatgatatcaaaagtatttacttgaaaaatgatgagtagagtggacaaactggggaaaggagtatttttatatctttacatgtgtcgaaatcttgattgtgctgaaaaattgaatgagagtatcacacaccatgctccttagtttcctagacttggccatctgtactgattagaggctcttctgtatacaaacaggtcatattatttatatttcatccatttaattgtctagctttttgaatagaagtactcttaaggcagggatgtggagagtatcccagaagtcctaacaatctaatgactaatgagattttttttttttttaactacagcagctttacccctatacaaaaagtccaatggaatggattcttttgaaatggttaattttaggaaaaatggctgcttctaataaatgtcattgcacttgtaaatctgttccttttgttatagtgaagctatgatatcttctatgtctgaaagaagtaattattttaaaaagtaggcaatgcaattaaagtagaaattttaaactgatgagaatatatagtctgataggtatatatttatatctttcaaagccagtaagataatgatattaggaaaagttctaacctacgtgggcaaacactttacctttagcatattatcttcgagtccttactaatctcagttgtttgtgagtggctcagtataaaactaccaaaaattaatgtttgttaattatttatcattatttaatatttttagttagctgttgatagaaaatttgtccatatgaattttcagtttggctgtttgataattgtgctgcattctgttatttggtcttgtaaactatttctgagtggtgaaaaaggaagctacatagtccaaacacctccctgtcactcctgacttccactcagttactgtttgcagacaaaaccaatgttatttatcttattgtatcttggaattataatgtaagttttctggtcttgttttaattggttgacagggatgattttcaaaactaaagttagatgaaaattgagttttaatggatatctatgaaatagtcgagatgtcaaagaacagaattaacatggtaagagttttaggagtgtatatttaaaacatttaaactatgatgtagagaagtggcttgaaccaacctagaaggctttttaggctgtgccatgttttaggctgtcagtttctgtgctgttacctgttattgagcttgtctgattagaaagtaagcagtctgttaccgatgactcggattagttacccaatgggagttcttttctactggtgctatctaaaatggttataaataattaaattctgctattttcagaaaatggcaattacaaggtgtgcgatagacatttgtaaagttgcccactttacatcttgggtggtaatacagtttttactctgaaaagttaatctgagggacaagcacctatgttgacagtcaggaaaaatgtctgtcttaggtacatttgccgttttgttgccccagtattttctggccagtgaacctcttttgtcctggagaagggaaaagattggatgtattgtgtcttagagcaattgttgagcactgtttccccacaaaccttgttttgttttctgcaggtgtaatttctttgttagtgatatggacccttatttagaattgggtgcaaatatttacctcaggctttttgcatagagcgcttataatttatggtagcaaaacctgtgcacctcattttggcagcccatggtcacatgtagattttaaaatggaaattaattaaagatttagttacttggtcatagttggcaggtttcaggtgctcagtagttacatgaggttagtgactactgcattggacagcacagacaagcacagatagaatatttccatcattgcagaaagttctgttgtatagtgctgaccgtagaatatgtagttcagttttgacagcctgtgctacacacacacacaaacacacacacacacacacacacaaacacacgtacacacacacgcacttcataatttgcaagcttttgtggtcttgtaaaaacttgaactcagtaattcaatctcagatttacatagtaggatattaactttgatgtcatttttcatttttttaaaaagaaatatcttgagttattttttctttacaatatttctattgattgttgttagaacaggcatgtaagaaaaatatgctgtgttccatttgtctcacaaaaggcaaaaatatactgtttttgtggttacttgtgtttcaggaagcaagaggctactatgagcagactggagttggacctctgcccgttgtgctgttcaatggaatgccctttgaaagggaacagctagaccctgatgagttagaaaccatcacaatgcataaaatcctggagaccaccaccttcttccaaagagcggtgtacttggtgagtcacgtttcaaggctgattttttaaagagaacagttggcttatattttttgttgcctctatagtaggcagtaaaattcttagtatcactatttgggaggctgaggcgagaggatggtttgagggtaggaagtctgagaccaacctgggcaatatggcaagaccccatttctaaaaaagaaattaaaaaattagctaggcttggtggtgcacgcctgtagtcctagctactcaggaagcttaggtggaaggatcgcttgagcccaggagtttaaggttgcagtgagctgtgattaccccactgtaccccagcctggktgatggagtgagaccctgtcccgttaaaaaaaacaaaacaaaacaaaaaactattttctgtaagtcacttgtaattggtttgcaaactcttggcaagtcctatgatgaaaatattcrtaaatcttctatatatggtaatttaaataactagtattattgatttcaggattaaatgtttattttaaaaattgcaggcagttctaagaaacatttattctatttgtagggaattttggctttggagagactcaatattatttttcatttatatataaatattaatatatatagttcttgagatataattcagacagtataaaagtcagccttttgaacggtacaattcagtagtttttattctctacacacagttatgtaactaccacctctaattttcagaacattatcatcacccccaaaagaaaccccacatccagtagcaattactcctctccattttgcccattttgtcctactcccagccaccctgccattggcaaacacaaacctactttctgcttaatagatttgcttgttctggacgttgtatacaaatcaaatttgcagagaacaggatgatattggacagatagcttgttgctcagaaccccaactctctaatcatgtggttggtctttctagtgttaccagcccccaacctgagtcattgcattagcacagactctcgggccccactgtgcatcaacccgtagtataaaccaccatgtgtgtcctaaggggctcaccatgaatgacaaagacactcctatcactggatttagagtttacatcccagaaactagggccagccaaattatttaccacacacagtccttttctcttccctcctctcattctggaaatatgcacatggtggtactctctcatgtcccacagatctctttatgttcctcagactggataatctcagtttatctatcttcaaattcacttattctttcttctgtcaactaaaatctgctattgagcctctctagtgaatgcttcatttcagttattataaatccagatttctatttggttctttttgatratttcctttggtttatagatattatttggtgagatgttggtcttaaactttactttggtagacatggtttcttttagttcttgaatatatttgaaatcatttatttaaattctttttctaattaagtccaatgtttggacttactcagaataatatgaacataatgtaagaatatacattacacattttacttatataatagtaagaatagtatgtcttggcctcttctcttcctgagtatacaccatacttttttctttctgcatgtctttttttttttgtttctgatacagggtctcgctctgtcacccgggttggagtacagtgacatgatcttagctcactgtggcctccaactcctggacttaaatgatcttcccaactcagcctctcgagtagctgggactataggtgcatgccaccatacatggctaatttttgtatctttttgtggagatgagatctttctatgttgcccaggcaggtctcaggtcgcgaactcctgggcccaagtgatctttccgccttggcctcccacagtgctgggattacaggcatgagccaccatttctgcatatttaataattttgtttttgacaactaggaatttgaaataatataatgtgacacttcttcaccgtaccagggtttatgttgttctttgttgttgttgtaactgttatttgtttagtgactttcctgaaccaattctttcttttattttctttcctttttttgagacagagtttcgctctattgcccaggctggagtgcagtggtgccatctcagctcactgcaacctccgcctcctgggttcaagtgattctcctgcctcagcctcccgagtagctgggattacaggagcacaccaccacacccaactaatttttatatttttagtagagatggggttttaccacatcggccaggctctaatttcagaacattggtctcgaactcctgtcctcaagtgatccactcacctcggccttccaaagtgctgtgactacaggcatgtgccaccatgctcggccctgaaccaattccttaacatctgtattctttttcatgtgtggcttctgaagtttcagcttgtttaacttactggtcagctgatgaacgaacagagatttcctttgatgcatgaattcaaaaagtctcccagttttccccaagggtctctgtgttgtgttggggcacactttccacactcaaccaggcagttggcaactctgccttagtcttccatttttgcttgcacagagccccaaggttagaggcaagggtttaagaccttctaagattttccctgggcattcacgtacccctgggcatggtgcttatggtctctcaaattccaagaagtttgtcagagcttttcaaagtcccttatggacatcccattccccagcctttttttttctttgttttttgaccagctttgtgttagcccatgtgttatctgccacctcaggcagctaagatgttaaacaattgcccagttgtgtttgacagatacccccagggaaaaggctgttggnnnnnnnnnnnnnnnnnnnnattccattataaaaaataggccgggcgcgatggctcatgcctgtaatcccagcactttgggaggccgaggcgggcggataatgaggtcaggagattgagaccatcctggctaacacggtgaaaccctgtctctactaaaaacacacaaaaaaaattaggccgggcgcggtggctcacttgggaaaccgaggtgggcggatcatgaggtcaggagatcaagatcattctggctaacatggtgaaaccccatctctactaaaaatccaaaaaaaaaaaaaattagctggacatggtggcgggcgcctgtagtcccagctactcaggaggctgaggcaggagaatcgcttgaacctgggaggcagaggttccctctgggaaccaagtgcagccgagattgcgccactgcactccagccagggtgacagagcaagactccgtctcaagaaaaaaaaaaaataataataataattagctgggcgtggtggctcatgcctgtaatcccagctactcgggaggctgaggcaggagaatcgcttgaacgcaggaggccgaggttgcagtgagccaagatcgtgacattgcactccagcctgggcgacaagagtgaaactctgtctcaaaaaatatataagtaaaataaaataaacatttacttcattccctagtattggacattacttctacattttcactagttacagacagtgctacagtgaatattctaatatgtatatacctttgtacattgtcttgaaaaataccaagtactggaaaatttgaactaaatgcactacaaaaagatgtgttatcagccagttgtggtggctgacgcctgtaatacaacacttcgagaggctgaggctggaggattagttgagcccaggagattgagaccagcctggctaacataacgagacctcatctctacaaaataaaaaaaattagccaggcattgtggcatgcacctgtagtctgagctacttcgggagactaaggcaggagggttgcttgaggattgaggctgtagtgggctataatcatgccactgcactctagtctgagcaacagggcatgaccttgtttctttaaaaagaattaagagatatgctatgccagtggtatgaaattcaaaacagaaatgtaaatgaagagaaacttttagccatacacccctgtgctgtactactcatgatttcttcctcaagacaactaccgtgtgtgtgtgtgtgtctgtgtgtgcacgcatgtgtgcatgtgtgtgtatacaagggctggtcagaaggtgttacatttacaattatttattttttttaattaataacttttttttttttttttttttacaaatgtttaytatatgtacaacaggcttcaggacaacacttcattccagctataggtggcaaaagatgctatggcagggaatacagatgtttaaatatgaatgaaatcaagggtcaccatctcctcaggcacaaggcacagcttacttgttgccagatttttttttcttttctgtttttgagatggagcctcgctttgtcacccaggctagagttcagtggtgtgatctcggtttactgcaacttctgcatcccagattcaggtgattcacctgcctcaggctcctgagtagctgagattacaggcgcccgccaccatgcccggctaatttttgtatttttagtagagacagggttttgccattttggctaggctggtcttgaactcctgacctcaggttatccacccgcctcagcctcccaaagtgctgggattataggcatgagccattgcacccggcccagatttcttaatttcacctgcagccaggggtcccttccccatagccttctattttagctcctatttttgtttcttctgctcctctttttgtttctgcttgaaagtcttaccttcctcgtccatctccttggcctgcttcttgggctgtttcagcagcaccttcacaggcagacatggcgcctgccacrccttccccaggccctgcaaccctacttttaaaatttttatagactttgccaaattcccctccttgaactcgatgggcttctaattggagtcaagtagatttataatattgaccaaagttgtatacatgggccaacatgtacagtgagccatctaatatctttgtcttttgatttgtatgattggttcatatgctccttattaaatagctacaaataatgtctaattggaattatttagacttgaatgtgtatatttgattcacatcttttatcttgaaaatgacttcaggtcgggcacggtgagagaggatctcttgagcccaggagtttgagactagcctgggcaatgtggtgaaaccccatctctacaaaaatacaaaaattagctgggtgtggtggcacatgcctgtagtcccagctatttgggaggttaaggtaggaagatcscttgagccctggaggtcaaggctgcagtgagctgtggttttgattatactactacactccagcctggrtgaaagagcaagaccttgtctcaaaggaaaaaaaaagaaaatgactttaaagtatacytgtgtgttaaatattttaagtttgataaatctgcacatttgcacagttgttgacacatggctctgagatcaccttcaagaagtataactatttctgtaatattagctgtgcaaaagggaagaataaatgacaatgatttcctatcctctcattgtaattctgactctggagatgtaagtttatttggatggctgagattgaacaaagatgggagtggtttttattacaaagtatattaactgcttgagagaagaccttttcctattttttttttttccttgggacagagtctcactctgtagcccagtgcagtggcatgatcttggctcactgcaacctctgcctcccaggttcaagtgattctcctgcctcagcttcctgagaagctgggattaccggcacctgccaccatgcccggctacttttgtatttttagtaaagatggcatgttggccaggctggtcttgaactcataacctcaagtgatctgccttcctcagcctcccaaagtgctgggattacaggcatgagccaccattcctggcctgggtttgcatttcataatcactttgcattagctttgtgagtttgagtaagttatttaacctttctgtgccttagcttcctcatctttacaatgaatgtcaacaatatctgcctcacgttgttgatagaggtagagatgctgtaggtgatgtgcccaggtatactcggcagtgacagggaccaataacatagtaacttctgtcttaactattattagcacagaggaagccatttataaagttaataattttttggttcctaatgaattattattgctaaaatttgctttaccctcccccctcaacctcctttttttttcttgcagggtgaactgccccatgatcaagatgtggtagagtatatcatgaatcagccaaatgttgttccacgaatcaattctaggattttgacagctgaacgagactacctggatttaacagcgagtagtaaggagcatttcaggaacaaccttatgctttttttgacttgtgcttcagaatctttacatttttcagattttaatattctgattatcttctgcagtgttcagaagatagcccaagattgtgacaaaattttatgtgtaaactctttgcacctttagttcataatatgagattctaaattcacaagagtttcctcctaaagaagaaaacatcttctgggcaaaaccctgtgaactttgaaaaatatttagtgccatttaaatgccaactaaacagacaatagatgatgagaatggacctggattgttcgcttctctagtcataaagcagttctctttcttcatcctcattctagagtcagtcagccataatgtcaacaaatatctcagtgaattttactctgagaacttaggaaggcctttagcagcttcatcaagatatgatgtatatgccataaaactcaaccttttaaagtatacaattcaatggtttttttaatgaaaaaaaccccacaaagtttgtgcagtcatcaccactgtctaatgatacatcattatcatcaccccccaaaaattccccagaattccatgtacctattagtrgtcactctctgttcctcccttcccctatcctctggcaacaactaatctactttctgtgtctatggatttgcctattctagacatttcatataattggaagccttttgtgcctggcttgtttaatttagcatattgttaaggcttatgcatgttgttgtgtatgtcagcatttcattcctttttatagtccactttatggatagtccacatatatctgttcctcagttggtggacagttggcagttttctgctagaataccttataagagccaaatatgttaagcccaggtgcaatttgttccttgtgccttcctcgagattctgaggcctcttcagcaaacacctggaaataagatggaactgtcatcactagcccatgaaatctcactggggaaggaaagatgtgtgtaatgaagtcataaccagctatttattgttatagttgagtataatgaacatatcaatctatttatggttgttaacgtaatgcactatctctaatagacttgaaactgaaagtttgttttaggtagaggaaaaatacatgtatatatmcacacacacacacacacacacactcctatacataagcacacacacactgaggaaaaagtgtaaatataggcttatatttgagaaagaaactacccagaaagtgagctttttcttcacagccgggttttcctttcttccctgaagtttcagtagagcaaggtgagcgtgttgtggctcttcatcctaagtgtttattgttttcatcatttttatttaaatttgaagggttgtctctggaatacacatgaataaggaacataatagyggttttgtttttgaatttccttttccattgagtgttgcagcaatgagctatgaaacagtgctagtccacagtggcaaagtgccacctgtcagctgaacatagtgcagacatcaattaggaggctctggcatcctcttgacctggtggtggtggcattgtcactcaggtttctttggctttggctgtcctggaacctttttagtaggatactaatttttaccagcatggtaaaatttttaattttatactaatttttatcggcatggtgtgctctcccttcccccacgtgatatcatggaccgtgtgtgacttattttctacggttttcctggatagtattctatggatagtaggtgttcagtgtgcattgtcaagtgacagtgtagatggatgagcatgtgcacagatgaataaatgagtgggtaggcaggcaagctgtgtctgacagactgtgatgagaagactgacatttgtatagggtgcaataatgtttaagattggggagattgttagagacagagagtttacagtactaggctgtaagaaattactgggtagtttagagcaagagaatgacttgatgaaactggaattctaggaataataatttgagggaaaatgagtaatgaggattgccctttgacactaattggagaagggacatatgcaaaaagagtgaaaatgaccttttatttctgttaagggtttaaaaggtgatattttgttagacctgaaaaataaaaatcagttttcttacgtattttctcttttacccctgcttcctctgtaggaacaggaagagcttactccactggttggactagggaagggagaaatgagttaaggggatctctttgagattgtcctccagttgacaagtgacaggaatgggaataggatgaattcagccattaaactgacacatacttatatgatagctgtgtgagatatgtatgtttccatcaaccttgtgtctttgatgtgtgacttcagtagggataggggccatgttgtgaagttgttcagtaaacatrgaacttaatatacttcactcacgcatttctataaatcttatattatgatcaagtcaggttatcagttgaatattaagaatagattgaactggaactaatatatacgtatttcattttttctcccagataacttctttgtggatgattatgctagatttactatcttggattcccaaggcaagactgctgctgtagccaatagtatgaactatctgacaaagaaaggtaatccatttgaggcttattatcttgcattcaacatttttttgaaagtatttgcatattcatcttaatgtgcaaattaagagagaaaagggaaagagacttcataatttttcttatttcttataaagctttgagtctagaacatatctatttaaagtttaattctttgtatatttgttgaaagtatatatttgtttaaaaattcagatgtcttcataaattttgtattacctgttttaccttttgactaaagtcaaaaggaaaaatatttcatagttcaaatggaaaaacatttgtgatgtaaaaatgggttaatgaattaaaaatgactgtacagggttaatattattttggggtttataagataaagttggttttagaaagccttgtataatctttgaagctgattttatgcagaggtatttatttaggctaagattgtgtaaaatgacgccctgtagtggcggacagattctgtcgccctcgggtcagtgcttcagaaaagcactggctgttattttaagtcagctatttttaccgcctttttaaatccccgctgtggtctctccccaagagaagttctggtttctcagctrtatgtaaagtacaagcaattactccatttggttctttaaagaaactgtttcttagggtactgggacagcgccatgacaccgacaggactaagcagcaggaagaaccatagaccgtgttagccattgtttagactttcaatttttacagtaggcattcattccagaaatgatactttttttctactcttttctctttacctttgttcaggaatgtcctccaaggaaatctatggtaacttaaaacttcagaatgttctatttcttaattttcttctttggtttcagtgaccattgtaatttagaatttatcaacacttaattgtactgtttccggaatctgtgggtaacaggaagctatatcaatgtagataattttttttttttttttttttgagacagagtctcattctgtcacccaggctggagtgcagtaccatgatctcggctcactgcaagctccgccttctgggttcaagtgatttcaagtgattctcctgcctcagccttccaagtagctgggattacaggcacccgccaccacgtccagctaacttttttgtatttttagtagggatggggttttaccattttggccaggctggttttgaactcctgacctcaagtgatccaccctcctgaacctcccaaagtgctaggattacaggcgtgagccactgcacccggccaatgtagataaattttgtataaacatttgtaaagaattagtttcagaaaattacaaattagtatgattaaaaatgacaatatgttacccacatgttcaaaggctgtttttcattttacatgctaacagatgcccagaccagtgcattaatcagtagaattaatcagtgcatgttcctagtctgtaactaaactctgtggaagattcccctgctttcctatagtaaaggtttacgactttttcttctatctttattaagcttgtcattttcttctttttgcatggttcttacaaattatttggtcaatttcattttcagaatgttgaaacacagaatgtgcttctctcctctgactcaattagctgtttttgtttttctacagatgattcttttattaggccagtaactttttggattgttggggattttgatagcccttctggacggcagttactgtatgatgccatcaaacatcaggcaagtatctatgacttcattttatatttttgtttgtggctgtagttgtcttcatgggcttcgctgtgcggctaggattgttcagtgggagttgggagtcctgctttcttaatgctcgagggaacggagaattgtatctctagagatctgccagctctcaagaaaagagatctaagactacagtatccaggctttgttgaacgggatagattcttatagagaaaaaaataaatagcgagatcctcatcatagacaagttttattgcatacctgttcatgttcttggagcagagttgctccaacaattgtgttgtgtactgtatcggggagatggggtccttaccacgacagaggtctggacatgggggcagtagcacacaggaatggtagtgtgtgtgtttagtagaagtagatccagatgcactgagggatacacacataggtgttctgaaaagatatgctgccattaatagttgggcttgagtgagtggcaatggcaggtggttgggaagcagctgattcttctggagagtgtcatcgttagaggatgagatgtcaaaattctttttcctgggctgtttcagtttgcatcttcatccatacctcacaaccctcctcatggtcccctttccaccctgtacctgggaaggtttactgaaataaagaaatatccaggtggtttcagttttactcatatgccgagttcctttattgttcaaggagtggaccaaatgctgtggtcaatttgaagttagaacagggcagttctagctaagggcgatagttatatgtgaaaggcactctaacacaaatgcgtaaatcttcaaatggtagtagggtaggagaatggggaaggagagttgcattttttaataactattttaattgaagtaaaatgtaggttcacaagaagtgctcaaatcataggacacacagtgtcacaaagagaacacactcttgtgaccaccactcaggtcaaaaaatagagaattctcaagttcctgaaagccctcccacacttgtgcccacccacacttgtgcccagacactacgcctcttccctcttctcatattagggaataggtttgcctatcttttagtttattaaaatggaatgttatgcaatttcatttgtgtttggtttctttacccaatcttttgtaagatttattcatgatgttacaagtaggggtatagagtcctttttcattctgtagtattatatcatatggctgtaccacaaagttttatttgtttaagctatttgaaggacagttgggtttttagcttggtgctattataagactgctgcaatgaatattctcgtatgtcttttggtacacccaaatataaatgtctgttgcttatgttattggtacaagcccttttttggctttgtgtgtcctgggtgtattcttccacttggattcttgtcttttcacccagggagagattgaattgtactaggaatgtgggaaggctgtatgaatgaagaagggtttgaggagagcactgaaaacacttctaaaacaagtgcgttagaagaatacaaaatgtgtggcataagaatataaactgtgttgggtaaagataggactctgagggtctgtaatttatgctatatttaccgggaaggtaagaaatgaagttggaaaggtgggctgggggccacttcatgtagggttttgaatgcttgatgatggcatttttaattttattttgaatgaggaggagaactatctgagactttttttttttttttttttttaatgagacggagtcttactctgtcatccaggctggagtgcagtggtgtgatcttggctcagtgcaacctccacctcccragttcaagcgattctcctgccacagccttgcgagtagctggaattacaggcgcccaccaccatgcctggctaatcttttgtatttttagtagagacagagtttcactctgttggccaggctggtctcgaactcctgatctcgtggtccgcccgctttggctttccaaagtgctgggattacaggcatgagccactgcgcccggcctgagacttttaagagagatattatttgctacttattgaacatgactgatgttaatgctgctttttaagttcaaaaatatctacaatatgactcccgtttcccattttgtgaacagaaatccagtaacaatgttagaataagcatgatcaataatcctgccaaagagataagctatgagaacactcagatctccagagcaatctgggcagctctccaaactcagacttccaacgctgctaagaacttcatcaccaaaatggccaaggagggggctgcagaggccctggctgcaggagctgacattgcggagttctctgttggggtaaggctctgagcctctcatgaggctgccccattttgtctgccacggaagctcacccactgcagcttacgtgtccggttcatgatcacgatttgtcattttagtcctgagtctcagggaatttttttttttaatttggaagtttccctttattacttttaaccttgcctagctttcatgtggtgcatgatttgagtttttgtgtgttttaagtatggagccatttgttatgcacagtttttaagagagacaatatggcttatttatagagcaaaaaacggagatttgaaccacttataggttcaaggcttatatgttcttgatgtgtttccagaataagcctgtgtttattcatttatattttatgttacttatttttttgacacagttttgtagtttttaaattttttacagaatgatgagtatatactatttgacgtttgagttaggaaaacaggctgtcactggaaattagcaggatttaaaaatgcagagtaaaggaatgatgaatagtctgctagtcgaacaaatcacaggaaaagataaggaaatagcagttactctaagtagtagggagatggcggggagactggagaattgacacatcttaatgttaattatgaaaattagttattactttccagggaaagaaatttttatggtttattcrctgtgtttatttgtttatatggtttgcttagtaacgactatttttccttaataatgattactttcctagggaatggatttcagtctttttaaagaggtctttgagtcttccaaaatggatttcattttgtctcatgccgtgtactgcagggatgttctgaagctgaagaagggacagagggcagtgatcagcaatggaagggtgaggatttgtcaagcttgacttcacattagatccgtgaacagtctttgcagcattctcctctgaagctagtaaactcttcagacagagccactcttttttcaaaggtgattggggcttatgaagtgccattgatgtttctgcctcctatttccaaggagctgtgctttttgacatagacaaatatccccatatggagccttcctgctgtcggtgagagtgtggtggctctcagaaagtcagtcagtatggactttgacacataaagtagcctttgttgtttttattcaggtagaattaatgaaaactactttacgattttattttactttgtccttgaggaattgataagtaaataactacaagtatttgytttgggcttcactttgtattatttcactgattttatctaaacatgtacctgtctcaggtctttaagatgttctggcgtatgaggtagcctgaggacgccagagggttccttaccagcttgctgagtgcaggcagccttccagagctaagcgcctgctcttctctccttcacagatcattgggccactggaggatagtgagctctttaatcaagacgatttccacctcctcgaaaatatcatcttaaaaacctcaggacagaaaataaaatctcatattcaacagcttcgggtagaagaagatgtgtaagttttgccataggaggaattacaggggttatataattggactttcctcattgatcagttagaattatatgttgttactcatactacatatcccaaggagttttatttccagtttaaaatctaataatactcttcaattccagttttaatgtatgcttctgttgaaacaagataatttattttgtagggtactatttaaggaactgaactagttctctctttttatttttataatttttggttgtggaaaatttcaaatatatgcagaagtaaagaggctagtttatttattacctggaatacttatgtaaagtgatacttttcatcattatctatttggttacccttcagttttattttgttcaggaaaggaaaggcagtttaaatgtttcttttatttaccagtgcagaatactgagttgtttcccttgtatcttcaaaggtgatgatgaattggttgttgtcggtttttaattttaattttcagtgttattataagctgatgtgttttagtgtgttattttcttaatggaagaaaataaattgtttggatggaccctggagtccattgttacatatatgtagtttctgcattaaatatcaaatgactatgtagttggaggatctatttctatgtttaattgtttgaggaaccacaatacctttcccacagtggctgtaccattttacattcccactggcaatgctcaagggtgccggtttctccacatcctcacaacacttgtaattttctggggggttttttgtttgtttgtttgctttttataatagccatcctcgtgggtatgaagtgctgtctccttgtggtttgattcacatttccctaatgattggtgatgttgagcatcttgtcatgtgcagattggccatttatatatctttgggaaaatgtctattcaagtcttttgcccatttttaattgcgttttttttttttgtcgttgagatgtagcagttctttatacattttggatgtcactttcttactagatacatgatttgtaaacattttctcctattctgtggagatgtgttctttgatgcatagttggaggatataaaattttaaagttctgcttgcgaggttgcaatgagctgagattgcgccactgcactccagcttgggtgacaaagtgagactgtgtctccaaaaaaaaaaagttctgctgggtttttttcttacatcatcatgctgcagagttcaagagcatgttttagagaagtgttgacttggatagctgtcaaagtcagctgttgccatgtcttgtatgacctgggaagaaatcttttctcattttggccaatactggggctacaaataaggaggatccatccctcttacctcagtggctcctgagtgatgccccttgtcccgacctgtgaaatgcttccctgatgtaggtcaggaggtactcgtgactcgaagcagccatgtcacaggcataggcttggtgtggcatgctgttggaccactgcagggagctccttggggtcttcttgggctatataactgccagactgtgcctagaagacttgccttttgccaatgagagatggctctcgatctttcctgggtgaatttagggaaatcaggtagtcatggggccaaaagactaatgctaaaactcttaggcttcccaaaattaccttgtctgcatcaggttttcattagcgccagagctgctccaccttggagtggcccccttccccgtgacagccacagctatcattcatgacccagtctgcatccccaaggctgccctgaagcttggctgtgtatactttgatcattgttcttcatcagccttcagggagtttcttgttggcctgctcactccagtccacgtaaccaagtgccccttgacatgttttgtagccgtgttgacacatcacaggaagagaatggcctgtattatatatatttggcatttatattgagaagttgaaccaaaatagttaattttatatatttgctgggttcataggaaatgtatgtaggcttttaattacagttcaaatacattcacagtgctcttttaaaattcttattcaggatttagtctttggttcagcaaattggagtgttttttttttttttttttcaggtttagttcaagatctttttcagttagaaatcaattttaggctgggcgtggtggctcacacctgtaatcccagcacttgggaaggccgaggcgggcggatcatgaggtcaggagatcgagaccatcttggctaacacggtgaaaccccgtctctactaaaaatacaaaaaattagccgggcatggtggcgggcgcctgtgatcccagctactcaggaggctgaggcaggagaatggcgtgaacccgggaggcagagcttgcagtgagcgagatcgcgccactgcactccagcctgggcgatagagtgagactccgtctcaaaaaaaaaaaaattaattttagaagaggcagggacaataaaattctttttaaagtggtttacttcagtgttaattgtaatagtgaaattagaaacaacacagatgttcagtagttggcttaatatttagattattttgtatccataaatgtaacattatgcagtcataaatatattgaaataggctgggcacggtggctcacacctgtaatcccagcactttgggaggttgagatgggcagattgtgtgagcccaggagttcaagaccagcctggcctgtactaaaaccctgtctgtactaaaaatacataaaaattagctgggcctggtgctgcatgcctgtagtcccagccagtcgggaggctgaggtgggagaatcacctgagcctggaaggtcgaggatgctgagatcaagccctgggcaactagagtgagaccctgactcaaacaaacaaacaaacaaacaaaaatattgaaatatcactgtatttattaaccaaggaaaggatttttataatatgtttttaagtgaaaaagcaggctgccagtataatttgtttatatgtatttaaaagtatagaattatgagccaaaatatcagaccttgttacttgatattatgtgtaatttcaatttttggcttttatgtttattttccagtgaattattactctaatagtcataaaaagtaatagttttaaaaggasaagggagaatgtaaataatactgacagcctgtaatgggccagggcctcagctaggtgcattgcagagttgtgcagttttactagagtcatgcagcgtgggtgctgtctccatttcacatgtgggaaagtgagtaacttctccaaggttataccactaatcactctttctcatgcctatcagtacggactttataccttgttcaaaccatcttgttagaattcagtatttgggctgatgatatgtttggcaataattggaaaactttcagttaaaaagatgttaagatttctctaaccccttctttcagggcaagcgacttggtaatgaaggtggatgctcttctgtcagcgcaaccaaaaggagatccaagaatcgagtaccagttttttgaagacagacacaggtatagaattaatgttgaatttgtgcatattcttgaatattaaactcttatgtttgctttacctcagctccttcatttttccatataagatttatatataagttcttacaggaattgaacatttgtttggtgtgcagttttcacatgtatatatttgtgttcatatataaaattcatatgcaaatctcagttgtatgaaaactgacatttatttctaaatgaatctgaaataactctgagtgcacccttgtagtagaaaatagactgcatttaattaaacagagaagttgtacttttcttaaattcgagaataaacacaggcaggtcaagatagctcatgcttgtaattccagcactttgggaggccagtgtgggaggatcgcttgagcccagaagctcgagaccagcaaacaaagggagaccctgtctctacaaaaaaattttaaaacattagctgggtgtggtggcatgtgcatgttgtcccagctactctggaggtagaggctgcagtgagccatgatctcatcactgcacttccagcctgagcaacagactgagaccctgtctcacaaaaaaattaaacagagattggctgggcgtggtggctcatgcctgtaatcccagcactttgcgaggctgaggccagcggatcacctgaggtcaggagtttgagaccagcctggccaacatggtgaaaccccatctctacaaaaatacaaaaattagccagtcatggtggcagatgcctgtaataccagctactcaggagcctgagacaggagaatcgcttgaacccaggaggtagaggttgcagtgagcagagatcgtgccattgcactccagccttggagacagagcaagactccatctcaaaatcataataatagtaagataaacagattattaaagtacttgtctcattcatcttttattgaaaactttttttaaaaaaaaaaaacagggtttcattctgtcatctgggctagaatgcagtagcgtgatctcagctcactgcaccttccgccttctgggctcaagtgatcttcctacctcaacctcctgtgtggaagagaccacaggcgcttgccaccatgcctggctagtttttgtattttttatagagatggggtctcactgtgttgcccaggctggtctcaaactcctaggctcaagttattcatctgcctcagcctcccaaggtgcttggccgaaaacttttgttttaaataagcttagcatagtgagggagtttgcctttttgttcttcacttttttgttttgaaaagtttaaaacctagaaatagttgaaagactaatataatgagcacccaaatatccttcacttagattcaccagttgttggtgtgtcacatttgctttatctctgtcatctgcacacgtgcatgttgtgtgcgtgtgtctgcatgtgtgtgtttgtgtagtacttctagtaactgctttagtagtttatttatatgtttgcatacacacggtcatattttttcctgcaccatttggaaatacgttgcagacatcctgatgtaacatgtctgacgttttccgcatgtgtatcctgagtgctaggacttctccgcagtactgttagctgacctcagaaatgtaaccttgatacagtaatattaaaacacaatttctgttcacatgactccagtatctttgtaatgaccttctacaactgttttttgtatttgttttggtccagattacatattacagagttgtgtctctttggtctcctttaatctggaagagttctttgccattttttttcctagtcttttgtcttttatgatgacattttttaagagtccaggacagttgtcttatggaatgtctcacagtctgagttgcttcctcatgattagatttaattgtttctaggaaagagccctgcgcagtaatgtatatagcctttgctgtagctggcaagtatatacatatacactgattgtgcctcggaatccccagggaggctttaaatatagatgcctgtgtcctattcctctgtgwttctgagctgatcagtctggcatggattggactttggtttagtgggcctgtgttttttatgacccatccttgtggggatcaggtgtgcgtggtgagatcatttgatgattgtaggctggaatggaggccctctctgtttgcactggttgtgtgtcctaattttttatgtcagcagtgggtgaagattcttatggctcctggataatccttgttgaatttggccattagcacccagattgcacccattttctcaacattttgtgaactttcaggaagtaactcattagtcaccagcgggaggaaacctttcctaatcaacctgccatcttgtttacccttcttgcccaaggtagcgagtcctgagcaaagacctcttcccttttcagaaatcttcttctccatgggtctccatgttttgtataattaaaataccttaattataaattctattatgagacaaattataattcctattagagaagttcctcttattgggagttgtgtcagttaaatgaatgtttattacatttaactcagaagtttctcatttatgctagaaatagaaagatctgaaccatcagttatgtatattcttgccctcaaagtgtggtccatggaccagcagcaagacattgtctgggagcctgttggaaatgcaggctttggacccaccccagtcctgaggaatcagcacctgcattttaacaagttgctcctgggggattcccgtgtgcattcatgctactaagcacagtattcgttgacatttactctacgaaccataggcaaatgtgtataatctccaaatcttgttcctgtctctgtcacttttagttttattctggtcttttctctgcacaatatagtgaatacatttaaacatgatgttgttcatattgttcccatttccacacaaatactcctctttccttgttttttttcgagtccctttttcttgttctagagatgtggggtaagtaaaggacctcacaaggtcaatttgtggtgtgcctgttgctgatcacctagaacactgctggctcagaatgtgaacatgttgtgtgaatctctaccccaaacctggtgtgggcaggcatgaccagatgttacactcttgtgtagagtcctttttgagactctctctctggttcccttgtgagcctttgtataatgctattttctaatgagtttttccttctagaattctagaatagcagagaggtgcaaattatattagggcagtggctctcaaaatttggcttttacttagagtttgttaaaatgcagattgctggacccgtccccagagtttctgattcagtaagtctgggttggatcctgacttgcttctcacaaatgcccaggggaagctgatgccactgctctggagtcacactttgagaacagttgtattagagtaacagaagttttgttgtgttagaagaataatgattggcagtggacttaatctgaaattgttaataatgccagagatcgaaagcacctacctcaacacagatacaaagctattctcatggttatttccaaagcagtgaagatgtgaagtaacctccatgagcatgtaaattgtttccagttttcttcgttatgctgttttgtggtattcttttgtattcatcccacttaggtaaatgttgtttggtaaaaaaaaagtaaaagtagtggttagtattgtaaccacattatagtattgttcagagcaaacaaagtataatggtttaaacagttaatggttttcaaaaattgggtataattttaaatcctttcaagttgagtccttttaaaagttcattagaggttcctgctccttttaagtcaccagtctgtgtgacttcacagggagtccatgcaacaggaagttaccattcagttaagaacagacaagggggctgggcatgatggctcatgcctgtaatcccagtgctttgggaggccaaggcaggcagatcacttgaggccaggagttcaagaccagcctggccaacatggcaaaacaccgtctctactaacaatacacaaattagctgggcatggtggcatgtgcctgtaatcccagctactttggtggctggggcgcgaggattgcttgagccggggaggtggaggttgcagtgaaccgagatcacgccactatactcccagcctgggtgaatgagcgagactctgtctttaaaaaaaaaaaaaaaaaaaaaaaaaaaaaaaaaaaaaaaaaaagacaaggaccaggtgtggtggcttatgccattgctttgagaagccaaggcaggaggatcacttgaggccaggagtttgagactagtctggtcaatatggtgagacccgtatctctacaaaaaaatataaattagcccggcatggtggcatgtgtctgtagtcctagctacttaggaggctaagttgagaggatcatttcaacccagaagttagaggcttcagtgaaccatgatcacgccactgcactccagcctgggccacagagtgagaccttgtctctaaaaaagtaaataaggaaaagaacaggcaaaatatctatctataacttaatgctgacgaaggatgtggtgaaatttattttttggccttgtaaatttgtttagttcttcaggaaatgtggttgacaatacttattagccgcaaagtatttgtatcctttgtctccataatctcatgtctagcacttccttgactctaaagaaatttccaaatgtggagaaagttggttgtacaaattgtttacaggttgaaagccatctctatgtccagcagtaaagaaaagctggagtaaactctgacagcttcatttggtgaatagcatattatttcttatagaggatgcttgttgtgtaacagcatgtggaaatctttatgctacagtagtgagagacggaaggaaattgttttgaaattgctaatctgtatctacaactaatgtttatacaggcatctagaaaggattacgtagagatgcagctaagtgggctgggatagtgaatattttgtgattatatttttcctttttctttgttttgcaggttttctggaatgttctttcattattttttaaaaattgatttattccttttctttttgtactcttcttgccaagaagtaaaaactggcataatgttatcagaagctaacttcagtagcttttctcagtttttggttaaatacagtttcaagctgcttttcctctctttacatggacctttcagtccatttcagatccattattaaggttttgcaatctttgggatagacagaatcatatagttggccactgtcatagtctagtctttctagatctaaagttctttgaaatgctaagaaggttgaaggttatattgtacaaaaaaaacttttgtttcctgtgtcctccaggttaatgttttatccttgtgatctttcagtgcaatcaaactgaggccgaaggaaggggagacatactttgatgttgtggctgtcgttgaccctgtcaccagagaagcacagagacttgctcctttgctcttggtaggaacgctgtgcaggaagtgtacatcacctttgtttgaagttgtcacatgctctgaaattcactgagagcttcgttttccttgagttgccttcaacaggcactggacaatgctatggggttctagggcagagcaatctttacaaagattgacagtggctgtgaaacagcctcacagccctagaaagttggtgcaagtgtggttggctgcctcatgtaatttaaaaaagtgattaacatcctcatttagagtaaaacatcctggaattaaggtatgctatattttaatttataatatcagagataaaataaatatgttttttcakttttccttttttataactaccatggattttttgtcttggcatgtcttttagacatgtacagtgtgttacaattttaggacatttaaaagacctttgacaaagacagtcgctccaacattcattgccgaataaatctctaaccttttttgtgagtattggtatctctgttttttcatcctttggcatgtgagcggtgactctgaggcctgtagtttttccatgatctgcctgctgcttccccacaggaactgccttcgtgtgaggagcagtgagctgcagcagcctacttcccattgcttttggccacgtcctatgtatgtgtgatgtagattgtgcagtagagttgtgatttccagaagtttcgccagtgcagactctgtggctgttatctttatatcttttcttgagatattaatagctcagtgtcaaataataaatttctgaagaaaaaaatcctaaatattttgtcatctggttttccttctaggttttggctcagctgataaacatgaatctgagagtatttatgaactgccaatccaaactttctgacatgcctttaaaaaggtaaaacatgctatgtaagaaaacagttgaagaaattgtactgaatccaagttctgatattgcatgttagaggatcagatggatttataggtggacatcatgtttgaaatggtcatttactaaatgttcagttttgccaaatttcattctaatcagaagttctaagaacatagtgtgtttgtagcatttaggtggcattaacccaggctgcttgcatttgtgccttttctttctttttttcgagatggagtctcgctctgtcgcccagattggagtgcagtggcatgatcttggctcactgcagcctctgcctcccgggttcaagggattctcctgcttcagcctccttagtagctgggattacaggtgcacactaccatgcccagctaatttttgtatttttagtagagacggggtttcaccatgttgaccagcctggtctcgaactcctgacctcaagtgatccgtctgcctcacttcccaaagtgctgggtttacaggtgtgagctaccacgcctggccccatttgtgcttttcatcttaaaagaagaatattcatttcaagttggaatatacatgttagaggaagcttgcttagctatatattgtcatgagctttggaatggtcatttatgaaaaaagtgatacagaaagcagttagcgttgtggctatgggaaatttctaacttgccagtgtgctgtgttttataggttagcttctaagtggattgaaacagcatttgaaagtaaccaaagggttcccagcttccaccattattctcgtataggggaaatgtttacattattagtgttttcaggactagcctgagagcccaatcagyatttaggaattggttttaaagagaaaaatgagtcctccttgaagggaggaaaatgcccaggacctaactgtgaccctgacagccatccatgtgaacgagtggcctccgttcaagtgattggattttggcttgcaggtggacagtatagtggctgctgagtatgagctagagtacctgttactagaaggtcattgctacgacatcaccacaggccaccactgagcactcctcctcagtgctgtccttgtttgccttttcttgcatctgcagcaaccacaaggaggcatcataaggtcaaagatggttttggaaacacttttsccaatctggaagggtactcctccaaatctaatttgttttaaccagttgttacctgtgtaagggctgtgcactcaagtcctgttgtcacatcgaaaattatctaacactttccttttcaatttcagcttttaccgttatgtcttagaaccagagatttctttcacttcagacaatagttttgctaagggtccaatcgcaaaatttttggatatgcctcagtctccactgttcactctgaatttgaacacacctgagagctggatggtagaatctgtcagaacaccatatgatcttgataatatttatttagaagaggtaagaccatatctattgcttccaaatacctaatcatgtataatacagcagattgaatcatagtctaggtgggcctctgagacatcagtgttcaggtatgatatttttttaaacaacagctttattcacatggaactcatataccataaaattctccccattaacgtgtacagttgagaggttttagtatcttcacggagttgtgcagccatcaccactatgtaattgtaggatgttttcagcatccccagtgaaagccccatactcattagcagtcactcttcatttccccagcccctggcaactgctggtctactttgtatctctatggatttgcctattctgacattttgtctaaatagaatcaaatgtggtcttctgtaactggcttctttcacataacaaattgttttcaagatccatccatgctgtagtatgtatcgacgcttcactctttttaacttgccagataatattttatttatggacatatcacgtttcatttatcctttcacgaatggacatttgagttgttttcactttttggttgttatgaataatgctgctatgaatgttgtgtgcaagtttttctactgatacgtgagtacaggatgtctttgcatttaggtctttaatttttttcaacatttagtatcttatcctcgttcgtatttttagaataacgtccttattgtttttttctcctttctctttccaacctagtttttataattgtatacagtcattaaccaccactatagccacgatgcagaacatttccattaccccaaaaagttcttttatacccctttgcagacagtagcctcctctcgcctggtttcaggcaacaactgatctgctttctgtcattatacttttgtcttttcttgaatttcttaaaatatgatcatatattatgtaagtcctttttgtctgcttcctttactttgcataatgcatttcagatttattcatgttgtctctgagtgcattcaagtgattggattttggcttgcaggtggacagtgtagtggctgctgagtatgagctggaatacctgttactggaaggtcattgctacgacatcaccacaggccagcctccacggggactacagtttaccttaggaacttcagccaacccggtcattgtggacaccattgttatggccaatctggtaaataatctgttcatcagatagtgatattgtagttacgttaatttgggcactataatttatgatggagcaattagcattcttaaccatagagtgagattaaaattcattatgggctgaatttggtcaatatagaaatcattagttcagctaaatttgtaggttagaattacatgtcaaaagaaaaaacatgctggaatactcagctataactgaattggccccctgaaaatagattgctcatgagctgacagcctttttcttttctttggaagtgcaacacttaytcatgcatcacacgttgattcttccctgaagcacagctaaagagcagatgatttattggtgtgactggcctttattgtactagtttttttttttttttttttgagactcctgcccaggctggagtgcagtggtgtgatctcagctcactgyaacctccgcctcccaggttcaagcaattctcctgccccagcctcctgagtagctgggattacgggcacccaccaccatgcccggctaatttttgtccttttttagtagagatggggtttcaccatgttagccaggctggtctcgaactcctcacctcagttgatccacctgccgtggtctcccgaagtgctgggattacaggcgtgagccaccgcacctggtctgtgctagagtttttaatgtgtagttttggttttttaagagttgcattgatttgtttactgtgttattcacattatagttgattgatatttcagaaatagaagtaactgttcctcagaaataacattttggtgttttgaagagagctaactggacttttcttcttgtcctagggctactttcagctgaaagccaacccaggagcttggatcctcagacttaggaagggacgctctgaagatatttatagaatttacaggtaggagtaagtgatgcagttacattatcccagaacttttagaaatgagcattagctctaattgaatactaccctggcagttagccaggcaacatgaatttaatttgcagttgtatgtgatgaaacagtggtttttccaggaaattaaatatggaagaattgttagaatagaattagataataagaggtatagatgctaatgagtatagtcaggctttattctttaattattcctttgtgctaacaatatcccagaatcaaatcattctatcagtgtgatgcggctcatagataggcagatgagaaacttgaagaaaggagaaaagaaagaaagaacagccacacttttctgcccagagagtgtatgtgttgaccctgagtgatttgcaaatgcacagtacatggaagctttggtcttgaagctgtgctgttagtgctggtattccttggtctgtggtggcatagtaagaacattccctctatagccagcttttaccttaaggtttactgcacatatttattagtttaaaaataattatgttgcctttaaaaaagtttgatataaattctgcttaacacaatttaaattagttttaaactgtgtgaagaggcttcccgtcaggttgtgtaggggatgatttccattagggcacatttgaagcactctgtagtatgtccttgccttaattagctccgtagcgacacacatgaaacagtggattagtgcctggttcttacccaggaaatagaagaattctgtattataataacaccattgtaaacagtagaagsttttttyccacataacattttcctcagataaggttttacaaaatttgggatgcacttccgaactccttcccttttggatgccctggcccttgccagccctccccttcccaggagcatggtgccccctcttcctagctgttcagggccccacccccattagaatcttcctttgcctgagaaccctactctctgctagatgacagcaaatgcagtgaattcatgttgtaattatgactttctgcaccttgaaatttggtgactggaaattttaggcattgctgttgattagtagggaaacatacatttaatttttcttcctctgctcctgtctgcctgcaaatagaatttgttacagtttttctggtagcgtatagacaccaggttgagtacagggcctattgttgactgattgttgcctccggcagaaagagcgagcagatttcctttacaacactattccagttaaagagtagtggccgggagtgatgggtgatggctcacgcctgtaatcccaacactttgggaggccgaggagggtggatcacttaaggtcaggagtttgagaccagcctagccactatggtgaaaccctgtctctactaaaatacaaaaattagccaggcgtggtggtgggtgcctgtaaactcagctacctgaaggctgaagcaggagaatcacttgaaccccggaggtggaggttgcattgagccgagattgctctactgcactccagggcaacagagcaaaactctgtctcaaaaaaaaaaaaaaaaaaaaaaaagagcggaggcagtgtggttccaataatggttcagggggcctgttccctgcattcctttatcgaaggctctgtgcttggctcagagcttgtgaacacaggcggttgtttagtactcaccatgtggttaccacacatgggtgcctctcactacgtgatgggtaatttgcaagaggactcacaaaggaggtttgggcatgcaccttatataaagagaggtttcaacacgtgcttctgtgcagctcgaaggagcttaaggagcaagaagatagctggatctggaaaactcctttatgagaaggatgatggactcagatgctctgagagcatttgctgccttttgagaattgtgccttgtaatattgatctttcttttctcgcaaagccacgatggcacygattctccccctgatgctgatgaggtggttatcgtcctcaacaacttcaaaagcaaaattattaaagtgaaggtgagtttggtaaaagtagtggcattctgttattggacagctgtcatttaaaaatatgtatcttggaaccagcccaagagtctctttggaatttgctatggcaattatagggatactgctttaaggcaaaatgtctttgtaactgtgagtttgtggcttccctcaactgaaagattgtaccttttgggtaatctcggtgtgcagaacatgtcccatcttatataaaatattctcatagatgctatgttgtttatatagccacaattcatagtgttgttgatgattcttttctcaatattgggggaactggcaatggaaattttcaacaataataaaatgatagtcctatttaatttcttttgacttgtactttccgttctctgaatgttgaagctcttagtgccttaaattcaagtacagtatattcttgaagaaagaatcattacacacagtgaaacctaaaataggccatccattgttgagaagaaaaatggtcactgtactgccaagaagaaacccctgtttgtgctagtgaatcctgaaaactggtcataacatgaaatacctccctcccaacagctagagcccccagcagccacactcttccctggaactagctgttgactcattgaatcgtgcttctggtttcactgcacagttgagtttgcggctctttgcctatgttgcaagctgaaaatggggttcatctaattaaaagaggttgctgtctcctcacataaggttatgatgtgaatgtcctggcgaagatacttctattgaatccttctagactctgggtggggttgtgcctgtttgtgagagaattgattgataattccctattgatgacaggctcacagtgtatatccagtgagaggcagttttatgcctgtgagacatactgggagtaaggtttatcacatttgattgcaggttcagaagaaggcagatatggtgaacgaagacttgctgagtgatggaacgagtgagaatgaatctggattttgggattccttcaaatggtaagttgacattgtaagagttatgtttttaaggaaaaactgagatataagcaccatccatccctcctttttgcatcttgtgattctgtctgggcctttcacattctactttgtgcagctacatctcacacttatatttggcatagatgagtattttccactcgattgatccaaaagaggttcatgtctcctagtggggaagttacttctgctccatactttgtgactctcattgcctgtacctgctctttggaaatwtgactgctccctgctcagtttacttcccgttgtgtaagttgcattctggtgcagcctgtgttcagtctcttcctaaaacaacactgtcggagagtgaacattctttttgtaggttggttttgtcagtcttgtggtctctccagggtgtgagggaagcttcataaccactcctgctgcagctcacccgctagggaaggatgggaagcgcagtctctttcctcttactttcaaaggccgtgtgtctgtaygagtgtttcaagtggtcttttttttacccttattgttataggggctttacaggacagaagactgaggaagtgaagcaagataaagatgacataattaatattttctccgttgcatctggtcatctctacgaaagatttcttcggtcagtcttgttgattatttcattatatatgatgaatgaattggtcagtgttcttatttagagaggaaaggttttgtgggattctgctcattatactcctgtgtctttgaagcactctgagcattgtgactggcttgccatttatcattggatttgttttgatcccgccgtctctgtgaagttgaactatgtagtgagtgcttctggatattacaaggctgcagccctttaacgtcactgtacacattcatagactgtactgtttactgcctgccaaacattgcttaacccagagattaggaggttgacatagagaatagaatcagaacagaaccatggaatacttcactgccttgtaaagattcacaggattttagagccaggagagagcttagttcttacatgtgaacacttctgttttataaacaggctgaggccccgagtgtgaagggacttgtctaaggtcacacagctacagccagaagaggccacgggctagggctgcctgatgtagtggtcaccagaggcactgtcaggaaggcctgagagtcacttttctcattgccagggctctgttcactcttaatttttcactacagatctagtatagaaaatcaaaatgtcatttgtctcatttttagccctcttatttccaagaaataatatcctacctaaaatagtgacaataataacaaccgaatttggttaaattcctccattcaaaaatgtggttttgttttctgagtaaggaggccggagctggtagccttcctctctaaagcagggcctctgtgtaggctgcaggaggcgctgtggttacacattcttcccttagcaccagatgctgatgtcatgtgacaggagttttggggagtgatgtcagttaccccgatttccagggttcatctggaccataactaatatatcagttcatgaagcagtttatttagaggtgtaacagaattaaaacatttgcctctgtcagttaagtgtagttttataggtgaggaatgccccttctctttagtgataacttcataagttggagtaagtacaatttttcattttccatcactgagcgtctccctcggcctaattgagccattagttagctctgccgtaaagagcatttaggtgtctcgtgattgactctacataatgttgaggttaaataacattggaaagctgttattaattacctgcttttgtttggcagcataatgatgctatccgtgctgaagaataccaagactcctgtgaaattctggttcttgaagaattacttgtcccccacatttaaggtttgtttcacagagaaagggaaaacattcttattaaggagatatttactgtatatttttcatgacttttgttttatctgtatactttagcaaattttccatttactaagataccctaatttggttgcatatttttattttgattattcttccagattggtctatttgaaggaaacagttaaattgtgtttaaaaacttggatgatatggtaggagagtcttttgttgttgttattattagcagtgtcttactgagataacgtttccttcctctgaagcctgcatgcttgctttaatttagaaagcacagcgatggtttacattgaagagaatgattggtgttagcatgaaccactcctagatgatgtatggaagtagtgcttcctctgtgcaaaacaaaacacgtacttggaatgttttctgcattacttatatcagtcagtatttgtcatctaagttgatttatttgcatcctttttttttcttgtagaatttactaagtgacttttaatatattcaataaccattctccttgataagcactttactgctggcgcctaaaggtgcttatacttagaatctgaaagacttattcaaaaaggacaacacatttgtccagagttctggctttgcagtgttattccctgggttagatctggcctcgaggaaggcttgtcatcaagctcagtaaatgccttactgaaatcaagtttagacaaatggacttaaagttcatgtgctgtaaaaacacacacagagggatatacatctaaaatccttctcttgaacattctgtcatttcatgtggtgaccagaagtcataaagaaatggggatttgacaaaggtttatatctgttcttctatgtagtcatgagtgggtcacggccggtctttgtaagaccactgttttggtaaatgtgttttatttgtcccgtatcatggtggttggcttacattatgaaagcagttttcttaatcagaagaaatgattatttgttgttcccatgtctaaaaataggagtttataccttacatggcaaatgaatacaatttccagtatgagcttgttcagtacaaatggccccggtggcttcatcaacaaactgaaaaacagcgtatcatctggggttacaagatcctcttcctggatgtacttttcccactagttgttgacaagttcctgtttgtggatgctgatcaggtaggcccttaaaggccaagttttgacagtttgtattaaaagcaacaaattgcttctttttaaatgctattttttccacttatggaaaaggacatgcttattttacatttagaaaatatgaaaatatgtatcacatagatgtcatcactttttaaatttgcatttagcttatctcctttacatctttttctctgtctttttaacatcattgtgatgacataatgtgtgcagttttgtatctgacttaattcatttaacatgaaaactaaaaattagaaaattaacatttagcagtgcttgccatcatctctaattatctgcccaaaagataggagttattgtcatgggtaatagacgaagcttaagtggatacatggctttggcagtagggaacctccggatattcttccggccgtcagggtttgacttagtgaaagggaacatgtgattttagagcatacaaactcaaacagcataagtgtacgtctgcccacagccttccacttcagcccgagcgggcggaaacccaagtcagccacctgagtggaaggatgtaatgtgtgtgaaagtcactgggacagagacttcactcacctctttggaattctcttccactggcttagcctgaagtgtgccttcctgattgtaacatagccacatttaatccttgttgagtacttacgatgggcaaggcattattctacatctgtccatccatatgttaacttacataatcctcccagcaaccctgtgagataggtactgtcattatcattatctccattttacagatgaagaaactgaggcacagaaaggctaagcagttgaaatttgttttattcctactcccacacaccttgctaagaagtgtcttacatgttagtgagtcaaccaggtaataagtggagcaatcaaagtgcatctgcccctagtgcctgtgccactaaccacrgagcagccttccatgctgccttaagcgagccactctgtatctgaaggaaaccgcattagagctgtctgcatggttgcttaacaaatgactttttatattctccagattgtacgaacagatctgaaagagttaagagatttcaatttggatggtgctccttatggttacactcctttctgtgacagccgaagagaaatggacggctacaggttctggaartcagggtactgggccagtcatttagccgggcgaaagtatcatatcaggtactgaaaagaagcactcctaacactgttacggggttttccttaaaattgattttgtgtggttaaaattgtgaataggtaatacattggtatggttgaaaaataaaaatgataaaaaatacacagtggctgggtgcagtggctcatgccttaatcccagcactttgggatgccaaggcaggtggatcacctgaggtcaggatttcaagaccagcctggccaacatggcgaaaccccgtctctactaaaaatacaaaaattagctgggcatggtggtgggcgcctgtaatcccagctactcgggaggctaaggcaggagaattgcttgaacccaggaggcggaggttgcagtgagctgagatcacgccgctgcactccagcctggatgacagagtgagattccatctcaaaaaaaaaaaaaaaatacagtgtaaaaaaaacttcctaatcctgtctctctctttcctactcagttcctgttctcacagcagataacctcccaacttattgactgtctatccttccagattttcttaattcttacagaaacagctgtgaatgtgtattctttttttttttacacaaaatatgctacctatttatacattttgtaacttggcttttttttttttttttttacttaatgtcatatacatcttctcagtgaatagagagagacctgattccttttcatagctgcatattattccagtgtgtgagtgttatttatagttttccctgtgacctacaatgttgcaatgaataatctactaaataatttttcatatctcatatatttgtgagataaattcctagacgtagaccttttaggtcgaacagtgtgtgtgttgttacatttctaatgagcaccccattctcttctctgcgagaagtgtgatttgaagatgtgcagggaagaggaacgtgtaggaagcggcacatgcagagatcactgctggggtttagtgatggtggcttcattctttacattcctggtccaaaagaactgtaaggactgtaacactctggggttttcccccccctgtaacattgaagacatcatcaggatatcattgaataatggttgtttatcagttactatggcttttgttactgccgcatatgctagaaatctttggtctgagattatttctttcggatggcaaatacagaacagtaacaaaagcatagcacagtatagattttgcagtgactttcttagagatctttaaagtagcacactttaactccactgtagggctgtagcataccttttcaaagaaaagccagaatatttggctagtggcctgttccattattcattgggtttagttttcctgtcgtaatccatggttggttgtaacaagcgggtcttctttattcagtgcactatatgttgtggatctgaagaagtttaggaaaatagctgctggtgacagactcaggggacagtaccaaggtctgagtcaggaccctaacagcctttcaaatcttgatcaagtaagtgtccattttttatggttaactgtgagtgacgggtatacagtgttgcatcagaaaatgaagtattacttgtgtcttcagtcctctcctcacaggatggcgtcttgttttttcatggtgtgtgtgtgtgtgtgtgtgtgtgtgwragagagagagagagagagagagatttttatctgccctcaagacatatcagcgtgaaaaatgtcatagatttgatgctggctggggagagagatggaaggagaatgctgcctctctgaaccattagcatatctttgtattttgtactcaaactaatctcataggtttgtttctctacctactagggtcagtttgtttttctgctgtaggaactaaatagctcaggattcgtagtatagaatcacagtatagtatcacagcttcccctttttctatgtcagaaaccatgatgtgtttcaaggctagctaaattactgtttgttaatgttaagcatttttcagaggtgagattgtagtttaagggttttggatacatatttcacatattttaagcattttattttgcttaagtctacttaaatgtttttaaacctttattgtgatatgtagcatccataaagaaaagtatacaaaaaacatacatacatattcacatacatccaggaattattatgaagcaaatacccagataccacaacctagttcaagaactagaacattatcagcatcccagaagccatccttcctccctaacaaaagtgtctagcatcacgacttttatggtaatcatttttgtttctttatagatttactgtttaagcatgtatccataaacactagtttaatttgctcattttcttctcctctatctcaatggaataataaaaggtaaacttttttgtttgtttgtttgttttgagacagaatctcactctgtttcccaggctggagtgcagtggcatgctctgggttgcactcactgcaacctccacctcccgggttcaagtgatcctcctgcctcagcctsctgagtaactaggattacaggcacgcaccaccactcctggctaatttttgtattttcagtagagacagggtttcaccatgttggccaggctggtctcaaactcctgacctcaagtgatccacccgctttggcctcccaaagtgccgggattacaatcacgagccacagtgcccggctctacttactttaaaatttgtgtgatacctggtatcttctaatttatggagctactatggatctgattctgttgtattatttctgttattcttttgttcatactgtctatcacatatttgtttatcttctgtagtgtgtcaggcgttgtttttgcagaattattttggggaataatttgagttcaaaaatggtatcacccaacagtatttgtttctctcttttttttttttttttggagatggagctttgttcttgtagcccaggctggagtgcagtggcgtaatctcagctcactgcaacctcagcctcccgagcaggtgggattacagaggcgtgccaccacacccagctaatttttctgtatttttagttgagacagggtttcaccatgttggccaggctggtcttgaactcctgacctcaggtgatccacccaccttggcctcccaaagtgctgggattgcaggtgtgagccaccgtgcccggcctttttttttttttttttttttttagacaaggtctcactctgtcacccaggctggagtgcagtgatgcgatcatggctcactgcagcctcgaactcccaggctcaggcgatcctcccacctcagcctcctgagcagctgggacgacaggctcacaccaccaggcccagctaattttttgtattttttatagagatggggttttgccatgttgccctggccagtcttggaactcccgggctcaagcgatctacccacttcagcagctatttttaaattttagtctgttggcagggttttgtagagaagtatcatctatttatttttgtaccatcatggaacattctttacaagtatcgcagtcaatcatttctgtacatttccttgttccatgtaagtcttaggacaatggaacattttattgtggcaaagtcagaaggactccacaggaaaaaggtttaaagcatagggtagcattggctagaaaaaatgtcgtctatttgggagcaagtctcaatagacaaggtagattcagaacttccttgacagaagcctgcaaaatttacgaaccaccactctatttagttgactttcagaagtcagtaggagtatttttctcaggattgccctaatgaagggagggttaggtgcaggctgtttgtaagttttaagccaaagcttttcagttgcttattatgggcagatgttttatggatcctctaaaatttgtagttttgaataacttctctaaggcattggtaaggaccttttccattttaaacatttgtgattggcatgtgatctgtaacgagcagctgtacatcactgatgttctatacgtttgtctccacacgaactggctgggtgcagtggctcatgcctataatctcagcactttgtgaggctaaggtgggtggatcgcctaagctcagcagtttgagaccaacctggggcaacatggcaaaacgcatctctagtaaaaatacaaaaattggccaggcatggtggcgggcccctgtagtcccagctactcaggaggctgaggcaggagaatctcttgaacctgggaggtggaggctgcagtgagccgagatcgtactactgcactccaacctgggtgacagagtgggaccccatctctcaataaataaataaataaatatcgccagaactttagatacatgtattttatttttatttttttttaaccaaacaggatctgcccaataacatgattcatcaggtgccaattaaatccctccctcaagaatggctttggtgtgaaacgtggtgtgatgacgcctctaagaaaagggcaaaaaccattgatttggtaagccgtatgtggtgtgcttctgcatgttcatccactggatgtgtgagygaatcacgattaatgatttttatttagattcttaaatttaagaatttcctagattcttatttagactttctctgtaattgtgtagtttgtcggggctattcttatcttacagaatattcttataaatattcttatcttatagaattagtatmgtttgttgtatagtaagcataagtatatagtttgttggggctattcttatagaatattcttataaatattcttatcttatagaatatttcactggttttatttccctgcttacattaggaaaccaaatcccttagcacttaatgggactgtttkcacaacttacaatctgctgagtcactccttggcttccagtttatctctgtgccttgtaatttttccaaatggactttcacttttcctgccttccattagccactcacacattctttgtagatgtaaatacagctttacatagcccactaccatattgcttctggtagtatatcatttggttccttactattgttttcttgtccagttaggacttgtaacccaagaacctttgaattctctatcatgtggcctttcttcaactcagctgaagtgtgttcttttggtttcacagtgtaataatccgatgaccaaagagccgaaactggaagcagctgtgcggattgtcccggagtggcaggactacgaccaagagatcaaacagctacagatccgctttcagaaggagaaagaaacgggagcactgtacaaagagaagacaaaagaaccaagccgagaaggtaagcacaaaccgttggttttaggacagtacttctttccatttctgatttctgcttgttgtaaagacaatagaataatggataaaaggaagagaaaaatctcctattaatccttccattctaacatcaaccagtatatatttttcattttccttttatgttggtcttctaaacagtatttattagtgcaattgctatgtttttttttttttctcgtttttctggtgagggggagaaagggtattttaattgtgattatagttatttaggttcatgagttttgtgatacataaaccaaaccttttgcagagttcttcttagattccttgttttttttttcattaaatctgtcagtgtactagtgaatgaaaaaatttagatcaacacaaatatgtagttgaagaaactttttttttttttttttgagacagagtctcactctgttgcccaggctggagtgcagtggcatgatcttggctcactgcagcctccacctcccaggttcatgtgtttctcatgcctcagcctcccaagtagctggaattacaggcatgcaccaccacacccagctatttttaaattttatttattttttattttttgtagttttagtagagacagggtttcaccatgttgcccaggctggtctcaaactcctgacccaagtgatccgcccgcctcagcctcccaaagtgctaggattacagacgtgaggcactgcgcctggccgaaaaaagtattctttaaaacaagcatgttgggatggagatggaatgcttgtatttaatttagtgttaagtctttaatgtcttccctgttgtgtgtgtcttgaatgatagctacttgaaaaaatcattagaatacgaaattgactttttaaaatattaataagttgggctctagatttaagaaaaattttaaatgtatttatttttaaattgtcacgtaataattgtacatatttgtggagtccatagtgatgttttggtatgtacatgggctctggatttttaagatttattctgctttagactaattctaaaaaagtggctgggcacagtggctcatgcctataatcctagcctctcaggaggctgaagtcggaggattgcttgagcctggaggtcaaggttgcagtgagcgactgcactccagcctaggtaacagagagagaacctgtgaccaagcaagaccctgtctcaaaataaaaaaatccagaacatggatcttgggtgatttgcctatacatccctcagactgtactatgatattaaatatcacagctggaaggttatatagtaaccataaaagtaattaattccgattcatcagtaaaaccctgaggatttccatagataaatgggcaaagaatgtggacacactgttcaagtaagaggaaacacaaataataaatgaatttgaggaaacagtaatcaaattaaagcagtctatcactagtatctgctacatggaagaaaacagacatagtgataatgccatttgtttgggaggcggtgatgaaaccgttgtggatgtagcttgatgaagctttgtgtattggaatagcccttgttacaaagcagtacatctgccattagaagcccgtaaggcgtttatataccctcaagaattactctcttgagaatatatctgaaagaaataattcaacagaaaaaacaaagttgtatacatgaaaaaatttattttactattacttataagccaraagcatcaaaaacagtttaaacatccaagaatgagctacactgatacatagaaaatgtttagatgctattaaatgataaaagaaaaatcccgactaaaaaaatgcatgcaacgtttactgaaagtaaatattgtatttgtgaaaacaattcagttggagtggggtttacagatagtttccatttttaaaaaatctttaatttagtttttgctttcaaaatacagtacaaaagcacaaatcccaaagatttagtaagtgagataagatgaaggtggaggtacaaagaataggttccagtgatgaaaaatgcccactcagtggtgtttgtaatttgaagatcatctgttttcttttctgtggttctccttttccttaggtcctcagaaacgtgaagaattatgatctctggagaaggacaggaaatcaccccawttgaaaaacagtttttataataaatgctagttttttctgatctgtctatacaactgctgataagccggctgggcaggagtgccacaccttttgattctgagcatttgattctgacttctgtactctggtggccactggatctttgggattaaagctctrttggatttgtacctcagaggaagaccaagtggctgatcctttggactctgtaaagagcattcttctagtcagagggtggaatggcagcagcaactggaagaaaatgagttttttggtgcccacacccaagagcacacacatgctgcactgtctcggaaagcagggccagctagagccaccatgttcttccttacctcagtttacctgcggcctgcgctgcactgcagatgcccaccctgccctgggtctggccggcggaagctctgtccaaggtccacacacctccaggtttacgccaacatccttgtgccctccccaccttctcttccaacgcattaggtgcattgtttaattgaaatccaaccaacaattgtgtgtcaaggctggtttggtgcagtggctgggcaaattaattttgggccaggatgggggtgggttgcagtgagggtagggaaaatgtcaggagtaggaaggttcgggggttaagggaagggaaggaagaccagaactggccatcctcttttataatccattagtagcaccatggctcatttgaaatgaaaatattacacttattccccacccaaccgcagtgaactttctaggtaattgttttgaaaacaatttttgtatctgtgaaagtctttgctttttctttccaccttctagaaaagtctgctaccagtttccttactgaatacagccatactcagcccctctygcatccagcccgtcagggtcagggtcagggtcaggctccctcaagacgagcaccgcattgtctgccctcttttgcgtaggatttttctctcagacccaggggacattgccttggacttttctctacaaatgccctcagatgtaagaccagaaatgattctgcttgtggaactcgtggctttctgtcctattttccttttatgtgagccctgcaggttgcctttggcgcccacaccagttctgtcttcatgtcgctgcatcgtgaagccccatttgcctttagtccctgctttgtgtgtcttcacttccacagccagtgttgcccctcagggcatactttgctggtgaacgggctgtagagtcttgagtatgttattggcctaagtgggcatgaggccccagcatccgactccatctgccaggctgcagggcacagcagcactggcatagacaggcacgctctgtcttccaacgtgcaccagccttttcttacatattttgcctgtttttaaaaaatacgaggagagggtgcagatggatactgtgccctcaccctcctaagccaggtaatatattgatgtgcagacttttaagaaatcttagtcttatcacaaatatcaagtaatttattttttccattttcaaatgcaaaagttagcctaggaagcctcccagtcatcctgaaggaccttttgactttgcttttataattctgttaaaaattgaggaggggattaatgagtacaatgaaaacaaaacaaaacaaaaaattaagaagaggaaagctcaaaagaggataagagactgaaaaggcacctcagaatggctgctgtgggcagagtctgtgacatgacttttccccgccctgcccctctgttcagagcagctggaaagatgggatcagtaagattaaaaaacttttgttcggccaggcgtggtggctcacacctgtaatcccagcactttgggaggctgaggcggacrgatcatgaggtcaggagttcaagaccagcctggccaatatggtgaaaccccgtctctactaaaaatacaaaaattagccgggtgttgtggctcaccctctattcccagctactcgggaggcagagacaggagaatcgcctgaacccaggaggcagaggttgcagtgagctgagatcgtgccactgcactccagcctgggtgacagagcgagactccatctcagaaaacaaacaaacaaaaagaaacttttgttcaagctgcatcttcacattgaatgaaagcattcagacgggtgactgctgctgtccacaactgtgggcggaagtgtgccttttcccagtttctcgtccaggaggttgcatagcaaatactcaagtcactgggatatatgctttccaaatgctggcccccatagcacctttccccatgtctttctaccaagcctcttatgtttaatctgtgcagggaagacaagagtagaccatattctctgtgtgctgtgcatgtcctggtgtcactcattgcctcttatctgtcgccattctaatataagtcagcttaatagttgactctgaataatgcaaaacccagcttgcttccagaatggcctaggaccctcctcctcctgccagtttttttttttttttttggttcatgtggcataatcatctttcaaaattaaccraatgccccagaaaatgatgttaccactaaaatattttctccaagaaggcatactgtaacagaaaagataggtaagatatttttttcccaagaagtaagaattgattgtgctgaatgttcaaactctggaaactgttcacagtatgttgttcttagctgttatttatataaagtgaattattttctctctcaatcatgccatagtggagacttttgtttgtgagtaagtgacagagtaatatgaaataatgtgatatgtcagagtgacatgcagcatcctgagcctgtttttatgttctgtgtacagtggcatttgattgagatcaaagcctgtcacagcctgctgctgggggtgtggggatatgccagagtcctgtgtttggttttagaagtttactgaatgtttcccacatggagaataatggatggcatgttagtttctttaagagtggtaaagttgtacatctgtcattgttgcatttcgaattgaacacatagatgcttgcctgtctgcttgggtgaatgcctcttgggagagcgaagattacgtgcatgatgtatgttaagaaacagtttccggtcaggcacagtggcttacacctgtaatcccagcactttgggaagccgaggcgggcggattatgaggtcaagagatagagaccatcctggccaacacggtgaaaccccgtctctactaaaaatacaaaaattagctgggcatggtggcacacacctgtagtcccagctactcgggaggctgaggcaggagaatcacttgaacccgggaggtggaggttgcagtgagccgagatcatgccactgcactccagcctggcaatagagcgagactccgtctcaaaaaaaaaaaaaaaaaaaaaaaaaaaattaaaacagtttccataaatggagcttaatttgctctgctgtccttaagccctcgtgggtttttttttaagagagtctcattctgtcacccaggctggagtgcagtggtgcgatcttggctcacttcaacctctgcctcccaagttcaaacaattctcctgcctcagcctcctgagtagctgggattacaggcgcctgccaccatgcctggttaatttttgtatttttagtagagatggggttttaccatgttggttggccaggctgatctcaaactcctgacctcaggtggtgatctgcccacctcggcctcccaaagtgctgggattacaggcgtgagccactatgtccggtcaagccctcgtgttctgaaccttgtcaaggctctgcctgaatgagttttcatctgattgtggggaccaagtccctgagtagagggccaagagctagggacagggggaagagactggcccaggtggtagggaggaaagaactcccagagtttcctttagccaggaaacctgctctactgaccccgtgacttggacagtcagacatcaccctgagagtgacaagtgtaaaatgactcccttcctcccccgccctccggaagtatatttagatacttgaaagcagtccttttctaaaatggccttacctatgtggcctgaacgattaaaagaaagaactcagagttacaagggaaaaagaaaaagagttacaagggaattgtagtctttttctgaatagaatattagtactgtggtattgcatttcatgggaatggaaatgtattggtaaagctacctgatggaagctttctcttggtaacaaaaatggagggtgtattatgtgcagttatttaaatatatgtattccattgttgcgtggtttttttcccccctcaagacagagatttgctcttgttgcccagggtggagtacaatggtgtgaccttggctcactgcaacctctgcctcctgggttcaggtgattctcctgcctcagccttccgagtagctgggattacaggtgtgcgccaccacacccggctaatttttgctttttttttttttgagacagaatctcgctctgttgctcaggctggagtggagtgcagtggcacaatctcagctcactgcagcctctgcctcccgggttcaagagattctcctgactcaacctcctgagtagctgggattacaggtgcctgccactatgcctagctaatttttgtatttttagtagagacggggttttgccatgttggccagggtggtctcgaactcctgacctcaagtgatccacccgcatcggccccccaaagtgctgggattataggcgtgaaccaccgcgcctgtcccattgttgtgtaattttaataattagttttttaagtacttgattttatgggcacatttttgtgggatgattggagttaatcaaataaagcttgtcatgtgtgtagtttggtaagataacttctttaaattcatgttttctctgccttgaggtagtgagggaaagatcttaatcagtattttggtaattaactgattgaattcaagcaaatgagacatcatgaacttcagtggttattgatatttcagggtatatacctgaaatgcctagaggatacagatttctcatttcattctttggtctttcatttctctatatacagaaatgaaatgacacttctgggaggcagtagaagcaggaagtcaatgaattgagtagagggtcccattccctcaggctgtcattgatcagtgacaatttataaaaacaaactgcaaagtctgtggcaagtggctgcctgcttcctagaaggagcccatgaaggttaaactctgtggtcggtatttgcaagcgccgggcgtggtggctcacgcctgtaatcctagcaccttgggaggccaaggcaggcggatcacccgaggtcaggagtttgaggatttgcaagcaaaaggtcctctcctgagtctttcccagatacccagcagtgcagaggctagctgtggaaggttgcagtgggacaggaatgtattgtatgccttgccttacttgtcaccattgagatttccagagaaatgggcataacgtctcttaacaacaacagcagaaagcaaaatacattaacttaaggttgacaacaaaagattatcaagtaccatgttttccaaccaaccagttattcgtggtaataataaaataaaggtgggaaaatgttataatttttaaggaaactgtgtactttaaaaatcttctttatgaatatccaatgttactgtaatcctgctccattaaatgcagcattgttgtcaggtgctgcctcttgcttgggaacagcattgggcttttaaatgtctgcagaatctctgcgttcgaagggaattgagaatgaacttcctggtactgtaatgaaaataaggtctgctcaacacagtaaacgtttcctctcttctttaaaactgcgcagtcatttggcctttgtgtttaggaagggcagattgatagagcacaaagtccaaccccttcatctagcagaagctgcaaacccagacagaggaacgagggctttacctgagtcttgtctgctgctggggctggcttcgggttgcatccagttctttggattctgaggatccaaagcacccaggtctcctccaggtcctcaacctctgggagctgccccaggcagaacttggcaggcaggcataacaggtggggtgggagggggaacctcaaggcaagaaggtgtcatgagacccctgggccggcagagttccttaggagggtggcatggactttgcattttgccagttctctgagctcctactccggggtggatatgcattgaggatgtagtctctgtgtgatgatggggagggcggggaggggcacctggtgcctgtgaaggcgcaagagagggccctaaggtgcaggaccaggactaagctgctacaaggaggtggtgcttaggttgaagcctgaggactaagtaggggcgaggggtgggcagaggggaggagcttgagctagtgtttttgagggagctgcatggaagcctgcacgtggccaggagagggggaatgggtttgatcctgggggcacaagaaggcccttcaggggtttaaactgggtgctggcactaaatgggttttttcttgtaataaactttgtgttgaggtctgtagcacatactgaaaagtacataaacacacaccttgatagtttttcacaaagtgaaagcactagcatatccatcatccagataaagaaaaggaagttggagtttattttaacacttaaacatctgattacagtctggcatccaggaagggcagagcagcatgtgtcagaccagcctacgcctgatcattacacacactatttgaaaagcactagagcctgctgagataccggcaagagagggagagcacgaaccatcagaagaagtgaaacctcatgtggctcacagggaataaaacagaaggtggcaggcttactaggcccaggagccaagtcacttcaggacgttcttggccgctgcacacttgtgtgggggcacatcccagaaaggaggaagccatagaagcccccaactttgccttgtatagtctcatcaagttcttggcgggttcctgtattatacataaacagggcagaattccaaatggaaagcaacacttggaaggctggaaaagctgagtagagatttcagaagatgtgctggggagaagaagtttagaattcattttccatcaaattagagggatttggtaactatttcagactttgcatcgaaaacccagggtgtaggccttaggattaggaccacatcacagaactcaaatctagggtctaggactgagggcaacactaagatagacctaccctcgtaaagcctaaaatgaaggcttcgcagaatcagggtgatcgctagtaaccaaactctgctaaaacaaaagtttttgtgggaaaaaactgaatccagagtgtctatagtatattattcagaatgtcctgtatataaccacatcagtaggcacgacaggaagtgggaacatatgacgtgatcaagaaaaaaaatcaggctgggtgcggtggtgcacacctgtaaccccaggactttgggaagccgaggcggttggattgttggagcccaggagtttgagaccagcctcggcaacatggtgaaaccccatctctacaaaaaatacaaaaaattagccaggcatggtggtatgtgcctgtagtcccagctactcagaaggctgcggtgggaagatcatttgagcctgggaggttgaggctgtggtgagctgtgatagtgccattgcactccagcctgggtgacagagtgagaccctgtctcaaaaaaacaaaatcaaaacaacccataaaccaaggtgttgaaatcattcaataaaaatgttaaaataattataaacgtttttctcagacataagtggatgcttttttattgccttttgatacgtcctgagtttgtgtgtgtgtgtaggtatatgtgtatatatatatttattaatttaattgacaaagattgtgtatattccaggtgtcccgtgtgatgatttgctacacatgtgcattgtgtgattatcaccactgaattaggacacccatccccacctgtgctgcacattagatccccagaacttatctttttttctttttttgagacggagcctcggtctgtcgcccaggctgaagtgcagtggtgtgatcttagctcactgcaaccgccgcctcccagattcaagcaattctcctgcctcagcctcctgagtagcagggattataggcgtgcgccaccatgcccggctaatttttgtatttttagtagagacggggtttcaccatgttgttcaggctggtctcaaattcctgacctcatgatccgcccgccttggcctcccaaagtgctagggttagaggcgtgagcccccacacctggcctatcgcgcaggcttaagtgcaatgttgcgatctggcctcactgcaacctccacttcctgggttcaagcaattctcctgcctcagcctcctgagtagctgggattacaggcaactgccactgcacctggctaatttttgtatttttattagagatggagtttcaccatgttggtcaggctggtctcaaactcctgaccttaggcaatctgcccaccttggcctcccaaagtgctgggattacaggcatgaaccaccacgcccagccccacagaacttatctttaaactgagagtttgtactcttttgatctgcatctccccatttccccatttgcagaagaaaagtcagtgaacttgaagacacgttaatagaaattatctaaattgaaaaacaaagtggaagaagagattgaaaaagaataaatgagcagagactcagtaaactgtgagacagtataacaaatgcgtaactagaatcccaggagaggagagaaaatgtggcagaaaaaaaaatacggagaaatattggccaaaattgtttgttttttgaaaatgcggtcttggcccagttttgaggccctagctttgaggtcctggctagaggccagtcagtcctctagagcagccaatcaagtttacaccctcaactacctcccttcttc

SEQ ID NO: 94159 - DNA, 197104 bp, Homo sapiens
ggggggattacagctaaagtgtattcagattgtgctaagtatttttggcaatacttcatttaatccttataatatccctaatagggatggaaagcagtccaatttgctaaaaggtaatttgccaacgaatcagtttgctatatttaccaaatacttgttttagagaatattcacctcaatatatttaatgaatgtattctttttttttttttttttttgagacatgatcttgctctaccacccaggctggagtgcagtggtgcggcaaccttgacctctcgggctcaagtgatcctcccacctctcaaccaagcagcctctcagtcccacagggtttcaccatgttgcctaggctggtcttaaactcctgggctcaagcaatcctcccacctctgcctcccaaagtgctgggattacaggtgtgagccatcgtgcctggccaatgaatgtattcttggtacacttttttaatgaattcacttttgatgaaatgattttttttttttttttgagacagggtctcactctgttgcccaggctgcagtacagtggcaacactatgactccactaactcagtcatagatgtacgtttgtcttatattaactttattactcttttgagttctcgcacctcataggtccaccagaatcctatgctcatgaggctcaaggctcactgcagccttgacctccccaagctcaagctatccttccacctcagcccccaagtagctgggactacaggcatgcaccatcgcacccagctaatttttgtatttctggtagagatggatttttgccacgttgcccagcctggtctcgaactcctgggctcaggcaatcctcccgcattggcctcccaaagtgctgtgattacagagttgagccactgtgcctggccctgacagttaatattcttaaatgaagaactataccttaaaaaaaaatagatatgataaaactaaattccaaatccaatgtaataagagtagcatatcttattatgacaactttcttagtttttcctgggggctacctgatgaagataatgaaggtaagatggttctctttgcttttctgtggtgctctgctcttttctttttttttttaaactatcagaaattgccatctatctggagtcaactaccatttatatgtgacacatagaacccactaaccacctttaaattgttatctcaaatatttgtttcatcatcaatgtaggtggtattatttatttgacaatacgaaaaaagtcatcataattctgctttccgggatatgagaatttgaaatcctttttaactcaactctgtagtgctcatggttcatagctgtacacagtggaggtcactctaggagtttagtggagagcagcaactcctctttggggacatttagaaatacatggggaattttttattgttacagtggcatgtagtgcatgggggccagggatgttaaatgtcctgcacaatgaaaaactgtttcaccaaaaatgccagaagccccatttgagaaacccaagcgctcagagccatcaacttcatgaacatgcgacaagtatagtcacacagggcccagtgcttggtttaatgctctgtagtcactgtcttgaaaattgtaatacttttatgtttgactatctgttttgtaagtccagtggtatagcagagcataatatgcaagcagaggtatgtatcctttcttccttgccgttctatttgcatatggtctccatgatgcctcatgacaaaggattctggtggacctatgaggtgcaggaactcaagagagtaacaaagttaatacaaaacaagcatgtaacatctatgactgagttagtggaggcatagacagttccaagaggctacacttttcattcaaatccgaacttgcttcaggtgcagaaagaaggcaacagcatctttaagaaacacaagtgattacatcacatccttccttactcatgtgttacttaccactattagccaaccatttacacaaaaaatgatgacaaagaatgaaagggaaagtagggcaactcagcactccctttcctttcatccttccttactcatcagtaagcagaagatggagaatgttggtagaatgtgtgcatatcaagaaggaaaacaaaaatagttttgttttgtgcagagtttacactgctctgatagcacaaaatacatatgcatttacaagctatgaattgtataattttggtgattccacatacaattgaaatgctcttatatttgcattttaaaacggcattacacaatataaagatgaatggtaaaattcatcctaagaattaaaaaatttaatttttcttctcatagaatgacattaaaaagcaaatttaaaaacactatgacaagtggagagagcgacgacagaacaaagaaaaagctttatattttaatacagataatagcacattttcccctgtgttggaacaagaggccttacgttttcattttgctctgggctccacaaattatgtagctggctgtgactgggctggttgaagcaaaaagggattaaaagatactatttagttcacagatctctcagagggccagagaaccagacttggataaaccaagctagaaacaacatccaagaaaaaccaaaccacaaagaacacccatcccacatcacaaagctattctagtggaaacccatcccagcaatgcctgccagtcagcacctatgactctagaacagatgccacaactcctccctacctacccagaggaaccagatacctccttcatggtatttgtcagaagatacttatctccctgagtgcagttgaagcatcatgttgctcgctctcacatccatgtcctgaatgggtacatctgattgctggaaactaggtcatatactgaagccaacttctgattgtcagcatcctttccaactaactccacatttactgaagtcactctggtagaggacacatttgtaccatgtagtcccaactagttggcaggttgaggtgggaggagcctagcagttcaagaccagcctgggcaacatcgtgagaccctgttcctcaaaaagaaagcaaaccgaattggccaatgctacaaattagggccttccctcttctctagccattgttaaacatttactgatcacaccattgatctcacaccagcaatctagctgcaaaggagtctgagaactgtagtttgttttccagcttttaaagtacagaaaagtaagcaagaagagggttggatgaatactgaataagccatcttatagtatctgccacaaaagtatggtagctactactgtctgttctagattataaactgctaacaggcagatgttaacagatgttgaacagtattggtaaaggagacttggtaggcttttactaaaggcagacatgctaagtacatgtcagtgaactagaagagatgattaaatgttaattgatatgattaaaatacatttttaggatgctagactataaaccttataagggaagggaccatgtctgttttgtttctcaccatatctcaaatctcctggcaagaaatagccacctaaaaaaaaaaagaaagcacagtcaggtgtggtggctcacacctgcaatcccagcactttgggaggccaaagtaggcagatcgtgaggttaggagttcgagaccagcctggccaacatggtgaaaccccatctctactaataatacaaaaattatccaggcgtggtggcacatgcctgtagtcccagctcctcgggaggctgaggcaggagaattacttgaacccgggaggtggaggttgcagtgagccaagattgtgccactggactccagcctgggtgacagagtgagactctgtctcaaaaaaaaaaaaaaaaaagcattaaggatattaagtatagagttcaatttttgcatttctcatactgtatgtagataagtcaattccaagtgattttactgtttctcaatgaatcagacttctggatatgaacattttactatattttcacatacattatctcatttgagccttataacatccctgagaagttaaaacaggaattactatccatttcacagatgaggaaataaattccaaaaaataagtgagcacttagctaaatgatggtttaatattcacattctctgactcaaaattccagaactttttcttacttcaggaagaatatacatataaaacacatttgatagtggttaattagggggctattgtcaggttttcaatttgagcatcaacttaaaactaaattacatgcaatgaacacaacattcctaatttcatgctgcaaatgtttttcttcaagagtgaacattcttggagttctagaaggatttgacttgtggttgcaactgccttttcttaaagtaaataatgttgattcaagaggtaaggggaaagaaaccctcttctagaaatcgcaaatctgttaatttgatgcttttaccattttctagttaggaatattataatttaaaagttatggatacactgattataatatagtacaaggattctcaattttattttgcttaagaatcacggggtggcaagtagtgttgctaacaatacagattcccaggccccatcccccaaaatataattcagtaagagccaaaatatcaacacttaaagaattctaggtgtcatggaacactgagaatcactgatattgtgtatctgacattcggcgtgtacaaaatatttattttataaaaaatacattttagcatggtagtcatattttaaaatcacttctatagccttctaaaatttcagatcaagagattttgcctcttaaaaatattagctaatttccagcatattagtagaaatcttgccacgtatgtttataatcatgctctgaggttaaaaactacaagctaatttactgtagtaatcagtctcaaatccctcggagcgtaagttcttattatagcatttatatgttagggaatttatagacagcttcttaccagtgagctgtctctttgggccttttgattttcctatttgaaaatccacaacggttccaaacgagtagctctcacaccacttcaaayacgtggcaacctggtaaccactaaaatgcacctgtataacacacaaatgtaaaagaacgatctctacttggatgggttagaaatgtgtcaagggtcctaattcaggggcaaatttcgaacttgaacccacgctttctgcctcctacagcttgcatctttttgttgagaagaaacccttcaggattagtttttaagagaaaccttcccgttttacatatgtagaaactgagcccaaagaaacaaaattatttgtccaaggtcacgcccaatatcagtggccaagtcagagaggaaccccttgtttccaatttaatagccaagccagctgcatgttactactctttaaaacaaaaattccctaactgcatcgcttcaccccctctcgatttttgaataaagttgtttattcaaaacggcccttccccacggtggtgcttttatgccttcgggtagtaaaaccttccataacgtgttagtgaaaaacacgaggaggccacgtctaacgcggtgactttcacaggcctttttctttggccaaaattttctcggaaagactgttaatcctacattccgctgggggaggagcgacgagggaggagggaggtcaccggcagctgacaagtccttacatgtacttgcgcgtgcccgggacgcagcctgcggggccgaggaaaccaacgaaggatgtattaggacgagagggaaggaagggggcgggagaaaaacacggtagtgggaaatccctgtgcactggatctgccaacccctcgcaaagctgagaagagccgtgcgtgaataaatctcattaaatggcccggcgcagacactgcagcagcaaagaggagggggcaccgcggctcgcgcggcacgttcgggaagggggaacgccagggcggcccttttataggccgaagcccgcgcccgcgcgcccccacccttcgcaccgcccccgggccacgcgcggagccgcggcgttacctgagaagggccggctgcgtccgcacccggccccgcccgttccgccgcccgcccgcccttccctcccgcgaggccgcagcggcacgagatctgcgcctcgcctccctcctcacgcgggcggattttcttaccttgtgaaaaaccgtctcagcggctgcccccgcctcctctgctggatgtgaaatggcggtcggcgaggcaagtgtgagcatcgcagctcctgccaatcctgcatagccgccaaaacggccccgaacactggcgcccccctcccgcaagcccctcggagcccatccatgagatcggtgctccgccgccccttccgctgcccctcacccaggtgaccgtgcccgccagccgagtcatcgatcccgcgcgggcgctgccggccgccggccgcctccctcgccgcgtgcccggggagggggagaaagccccttctcggcccccgccctccgtgtcccgcccgggcgcccgccctctcgctccttttcccgccgagccccctcccccgcactactcgcagcctcccttcgccacacacacccccctctcccctccccccagtggttgcgtccgtgacatcatcatcatggcaacaagagctgcagcctgggaccgaggagcccgtgtgattcccggcggtggcggcagtggcggcagcaccagcaccgacgaaagctcgagggcttctctcctgcggccccttgccgggtgctcctgaggaggcggcggcagcagcgcctacaccgccccgcccgccgctcctcgaggtgcctctgtgtgaggggagggggccgtgccgagaaggggagggggcgccgccgccgctgcggagggagccgccgccgctgctgctgccgctgccgggtcgccagtgaagggaggcagtggcggcggcggcgaacatgttttcagtaaggatagtgactgcagactactacatggccagcccgctgcaggggctggatacctgccaatcccccctcacccaggcccctgtcaagaaggtgccggtggtgcgagtcttcggagcgaccccggcaggtaagcgggcgccgggcgcggggcgggagcgggagtcggcggggcgccggggccgccctccccgccgcgcacacgcgcacacgccaccggcgccggccgtctccgtggatcgctgccgcgtcttccctcccctccgccctcctcgccttttctctcgtgcgtgacaagagccgcaaaaatgtgggtccgcgcgagcgctgcgcggcgcccccacccccgggcagggaggtggcgagcgccgcgtgtttagactgcgtgtggcggccgggagcgggagccgcactccagggcgcgggccgggagagcgaaagccgcgggcgccccggacggcgggccaggtggccgcgccatgtccatcggtggacgggttcgtagggcctgctctgaggtcggtcgctagtgggacatcccttgtgtcccccaagtgccgctttctggaaacggggaagtgtcagccttgttgtcagtcgctccccatggtctcttctcaccctcgctctcctctgccagttccggagatgcagtgggccggagagagtggcgcttggggccagataatctttctcactggggtgaccgtgtggctctgctgtgagtgcaggtcgtgactccttagagtttagtgcctgagcgtcgggggacagggcagcatccttaggtgcagtgctttcaggaaatgtgcatccatggaagtaggaaatgcgtgtttatgttgcccaacctaaaacatcacacttaatggggtgaatttattaggaaccacagccagactcagcagcacagacattttgaaatgctcctaggctgggctgtaggattgcgttttaagtacaggtatatattttttaaacacaactatgttgaagaagggatgggaaggggagacagccgtgacagaaggtacgttctcaaaaactcctggggcttatgataatataaaaaagatagaggcccagtttactaggtgttttaaaatggttttgcttttttgcatgctttgaactgcttccatgaaataatggagttctaggaaataatgcatcttaggaaaggttgttcttccctctagctatgaattgccctatgggattttagatagcatttcccacttgatgctccttgccctcatcaccattcatcttattactacagtcagtttctgtggactaccaagataatagcgctttcccaaacacaagcactcattttaaagcagttatcttttaatgtgaattctctttgttaaaatgtcaatgttgtgagatttggtagcatattcctatttaaactagtgaatatgattttgatatgaaccttgaaagatggggaatttgagtgcttttaacgtgttgaaagtgtaacacttgaaactttggaggctgggaaatcgaggcgatgaagtgttctataagataggttttctgcccttttaaatatagtggtgctgtctttgtttccaattggaatttcagtgtaatgcactgttctcacttcagatgcagaggaaggataaaatagtgaagttgatatggccctgttcagccaaatttccgaatcataaagtgacatgctaataggatatactgtggcatttctgtgtattacagcttgtatggtttgagttacttttccacacataattttttctcctccacacaagtcattaaatatgttttcctgagagatagtcaagctttgttgtataggaaagtttcgtttgtggaaataaatgagtttcactgtaagctaatgtaattctattacgtgaggaaatgttccttaaaaaataaagaatattatatactgttgttttcctgaatattttttaaaagacacattaactatttcctatttmatccttcatggacatcccacaatagattaccagcaccttaaaaaaaaaaaaaaaaacaaaaacgaaaaaaccaaagactaaaaacccccattggggttttttttttggtacatactttgaaatttatattttaaatgaattaaaaagtaacactttttatatgtacattgaaagacataaaacttgatacagagaaagtcaaattttaaattgttaaggattatcaaattgaatttgccatgtagttcacagtttccaacaaaatgtttgtttcaacaagaaaaaatttgaagtcattggcatacatttagagtttacacttttcataaaccaagccagcatttttattagcacgtcagaaactcccagtgagattaatattaattaaacataatcaaaaactgcagaattacctgcttttgaattatctccccaaggaaaactagtccaataaaataaaacttgaaaattattaatataaaagagaggccagtctgacttagtaaaactctgaatgctagaatttttaatgaagacagatttatttgaaagtaaagatgtaaacataatgcaaagatataaacatggtttgtattatatctttatagtttatatctttactaacaagtaaaataaggtaataaaaatgtgtaacacatgataaacctatgctacataaaatagcataaacatacttttttcatatataagaattactttgggaggtccttaatgctttactttggtttggagagaaaatgttttaaaattgactttgctttacaaatgagatcctgaaaaatagcaaccaaagatattttttctcaaatgaagtggccgtttcaaaattatattacaaattctgaactgattggattaatacccttttactagtttagtttttctattattgcctgaaaagcatttttctgctttagaaaacagtccagttgacttttgattgttctgtgttttgaggacgtatcttgagtaatttaagaaataaagtgttttgggtttaaaagctcccatgtcttaagttggtgaaatttgaaaaggtatttttaaaaagagggatattcagggctgggtgctgtggctcatgcctgtaatcccaacactttggaagacagaggcaggaggatcgcttgaacccaggagttggagaccagcctgggcgacatagtctgtacaaaacaaacaaacaaacaaacaaaattggctgggcgtggtggtgtgcacctgtagtactagctatttggaaagctgagacaggagaatcgcttcagcccagaaggttgaggctgcagtgagccaagatcacgccactgcactccagcctgggcaacagagcaagagcctgtcttaaaaaaaaaaaaaaaaaaggcggggggggatattcagatttgaatggtaaatcctgactgatttaatcccttgccaactgaggatattgattcctaagggaatcacttaaagtttcttcatctgagttatggaattttttaaaaaacaaaaacaaatttcctctccatttttttaactagtttttaaaatgtcttgaacattattttgacataatcaaattgagcagtatcatttgtagaataaattgttaattttttcttttagaacaacattttggtaacttgttttaatggagggaagaaaggttgtgaataaagtataggacaatgttttttcatttagatttgaatataggtgtgaccactcagaggattcactacaaatgaaatcatcaggcttcatttaaggatttgactgaggtggacttgggaagctgtccattttccacatctcgacttttgcttagttgcttgatgtaactcacttcatgctgagtttagacagctctcacagtttcctcagcaccaggttaaacagaactatcctttcaaagagcttccctgctgagatgcagagtaggagtaaatagaagagtgtgggatgtccacaaagcaagkaattaaacaaagtaggccagacagactatagagggagctgcttgtctttaagattactctaaggaactctgccacttcctctagcttagtgaatattttggtagattgttctagatactgttagccatgaaatcaagcttttcaacataaggaattgataattctgaaatgctatataagtttatgtagatgcttatccaattataaatatattctcattgtttatattttataaaattaaatataagaaactaccagaataacctttttttttttttttggtaaattggagttaaatttgcaataagaataattttgaaaattagcgtgtatcaacaactcaggttcaaaagtttctctaatagaatctgctttgttcatagtctgttttttactaagctatttaaaaatattttaagatcatataacacctatttgattacaattattggagagattttcaggaacgctatggagatgtaatgactcatcacaaacaaattggtcactttttttaaagtaggtatttgaagccctgagtagcaagttgttttagctttaagtgccttaagaacagctttactctccagaagctcacaatgtagtagagatgatgggcatgtaaacgtaagtcaaatgcagtatgactggactatagaaatgtgtataagacaaagcaaggattcattgggagacatgttctatatccaggcaaaaaggggagtcagggaagacttcgtgaaggaaatatggattagtcatgttaaaggaatttttaaggaacttaaaatttcagatagaggaacagctacaaggtaattgacagatgaagacaactgctctttgcagggcagtttggcaatgtatattagaatccttgaagtgttcttttttgacccagtaattctagttttagggattttaatctatgagcataaatcttttggcaaatctggttgtcttttgaatccgtctacttcttttcataatccatcaccaccctaaactactagcatttttggtcaggtttactacagtagcctcctaatcttggtttatcccaatctactttgtccccttctgatctgtttcctacactgtaatcagagggatcttttaaaaatgcaaacctgattacatcaccctactgtttgatatgcttcagtagctttccattgcattcaggatatggacagaactctgtgtcttatatggtggcatctgcctgtcttacaaggtcttgcatagtctggcccttacctttctgtctagtcatgacttgagccatgttcttgacttactctttttgttccagccttgttggccttatctcagtcccttgttcttgccatgctccttcccacagtgagggctttgtacctgccgttgcccctgctgagaatgtttttacttttctttcacctaaacttcgatttatctttcctcagggaaggcttccctatcacagactctcagagcaccatgaactctcctcatagcacttgctgtcattgtaatttcatatgtgttggagattaacatctgtttttccaaatagattgtaacctccagaaatcctgataatgtgtttctttttcctcaccattatagagttaatgcttaccacagtgcttgaaactcgtctattaattcttggaactcatttgtggcaaggattaataaatagatgataatcatcacagagaacaactctaagtgttcaacaattggcaaatggttgcataaactgggtatattcatttgggaggatgtgtttaaaacatgttgtagaagtatgtgtaataacatgggaaagtgctgtcatattatgtgaaaaaattagtttacaaaatagtcacttattaaaagtgtggaaaaaaatacaccgaagtataaaagttggttatctctggaaggtatgttttatattttcagattttttacagataacatgtgctgattttataatttaaaaaaaccatgtacaaaattaaggaaaaattgattttctagatatggttccagaaatgtagtgggagacatgagattcgtaatggtctccaaaatatgtgtcaaccaaaatgcatgattgcatgatgatcatattgaacttaattatataaattccatttagaaattgcaaaatgattcataaattaaagcaagccagtaatttctggttgtattattcttacttgtatgtaaagtggttttaattttaaaatgttttgaaaagtaacatggttttggcacatgacagcactaaaacagagtaaagactagaattaacttaaatatatatgagagcttaatataggttgagcatcccttatctaaaactccataatctgaaatccttcaaaatctgaaatgttttgaacaccaacatgatgccacaagtagaaaattccacacctgacctcatgatgggtcgcagtcaaaacttcgtttcaggctggatgcagtggctcatgtctgtaatcccaacactttgggaggctaaggtgggaggattgcttcagcccaggagttcaagaccagcctgggcaacatggaaagacgctatctctacaaaaaaatacaaaagttagccaggcagggtggtacacgtttgtggttccagctacttgggaggctgaggcaggaggatcgcttgagcccaggaggtgaaggctgcagtgagccatgattgtatgactgcattccagcctgggtgacagagcaagtccctgtctcaaaaacaatcaaaacaactttgtttcatgtgtaacattatttaaaattatataaaattacattcaggtttggtcccatcctcaggatatctcatgtatgtgcaaatattctaaaatctgaaacacttctggtcccaagcatttcagataaggggtattcaacttgtatatgaaaatggatcccaccttcatttatgagtagggaaaagaagaattgtttaataaacagtgttgggatagccagttagtcatctggaaaaataatgttggcttccagaggagttaaagatttaaatatgaaacaaagaaacaaaaaaggtagggtaattattttttacgtaatccaggattggtgaagtcctttaatagcatactgggttgctggattttaggacataaaaataaaattctgtacaggggaaaaaatcaaacaaagttaaragagaaacagactagtaaaacttatttgtatacttcacaaagggctaagttcctcttaatacaaagaactagaaaataatccagtagaaaaattagcaaagagaattcatatgaaaaaatgtacaactttatttataatataataaagatgtaaattcaagctacaacatactctttgtcacctatcaaatgagcaaaggttatgtatagtataactcgggaaaggtgagaagagaaaatggtcagccttatacattgctggtgggattataaagtattcatactctatagaaagcagtttgaaaatggttttcaaaaattaaaacacagatttatttcgttctagtaattccattataggattttattctctrgaagattttgcatatatgtcaaataaatatctaagaatatttgtggcagcattatttgttactgcaaaagattggaaacatgctaaacatatcagtagggaagtagttaggtgaattatggtgtatatattcaacagaatactagtcagcctttaaaaataatgagagaatactatgtgtactgctgtggtgctatgtcaaagatatgaggaaaaaaagcaagaggcatgactgcatgtgcagtttgctgccattcgtgtggttaaaatatatatttttatatgctatatatgcctatgtattagaataaaattctttattataataaaatccwtakgtgtgtgtgtgtgtgtgtgtgtgtgtgtgtgtgtrtrtatataggcagctatagaatgtaatgtgcatgggaggatacgggagagtctgatgacagtaattgctccagtgtgtagaagtggttgcctagaggacaaagatggactaacttttaaagtatactgtttggtaatttttcagtattttaaaatcatgtgcatgtaatactattcaragttaatatttttaagttatgttttgcttacaggaattggtaagaaggaaaaaataagagaccataatagttgttacaaacaaatgattactgcaatactgtttttaactttagttattgttagagatcttctaattcaaagttttcagttgatgttacatggctcacagaagggtagtcctagtagaatgggggctgaaggaaggcgttggggttcctgtgaacaaatagcatggtgagtgacaaccaacagttaaaagcagcatactgctccttttgatattttaagtgcattaaatgaggtgtgccttactacttggaatctacttcagcagccagccacagtgtacagctgccttttgtgggaaagggatcatggaattgttactggagtttgtattcacggtgccgaaggaacatgccacctaccacaaggtgcaacccacttacaatgagaggacaaggaagcagggagggtgtctctggtggcccagctccaggcctgactatctgtattcacctgtattggatgctgctcaccacgtgcgtttgatatgctctgcaaggtgactgcctaatagtgcatgtatgtttgtcagaaataaagcatgattttaattttgaaatattcttgatgtgaaaatgtttggttttgaaattcatattaaaattttcagcattacatgtgtcaaaaaatatctaccataacactttacattttttcttctgtaattagaaaatatgataattttttttcaccaggcactgtgtagatgcctccaaatgccctcctgttgtccagtgtgctaaatttttttttgctgacaagttttgtttgcaatgttaaaagggttgagaagcatcattctagtcaaatgtactcattttgtatgaagaaaactgaaatctacatagcaggctcagggatttgtccagtgtcctacagttggttggtgtgaggctggatttgaaaattggggatcttggatcttgactcttcagctctcatcacctcacactgaccccctctccccccgaaacatgagggaatattggaggaaggcattgatgataattgaaagacaaaaatacagaacctcagaggaattattaaaagaactgcacatatgtagttcagaaatctttgagaccctactgtatctaatagtgcttagaatcttcttatataataatattattaatattctataatctagaatagattatagtaggattcgttttatgatgacttgggctgtatctttaagaaaacaaaagattatagcaaaaggagtttagggcaaacataaataaaaattgatactaaaatcgtatgtatgctatttccaaaaaagggaggagggaatatatgagacctttcaagttcctctggtactataattacattttctctcatcttgcttttgattggattagaattcacgcaattaaagataatctagggccaggcacctataatcccagcactttgggaagcagaggcaggaagattgcctgagcccaggattttgagaccagtctgggcaacatggcaagaccccgtctctttaaaaaaaaaaaaaaatctaagtgaaaaatgattcamgtctaaataggttgggttaaagtaggttttagaggatgttgtcattggtgctggatatttcaaagaaatagtttgaacttacttataaagtaagaaatgggccatggtatgaggtatgtcactctggtatctggctgccattttaacatcatagtgataataagaggaaataatgggagttaaggaacagtaaactttgggtgaaattgtgttaacttgtaatttccatgtagatacagataaggcaggaatgagtgtcttaggcaattagaaataactcagtctactgtccaaacatgatgtggattttgagaccaaaacaaattataagtaaaagtaagaccctcttaatgacagcctatttaacctttttggtgtttttgtttggtgtgtgtgtgtgttttctgtcgttccttctaagttttccagatgatcttgtgtttcttccagctctctgtgggtttttaaatatttcattttataaatgaaaaatactttgttgtttaattagcattggtaaactggactgttttctgtagcagaaattgaatacaagcctagcaaagtaaattctgagaaaaatgagtagtaattgtcaatggaaaatttcgtggtttttttttttcttttttggccaattctatttttttagatgatagttttgggaaatactaagaatttgagctcaatttactttggggcagttatttaattttctttgggttcagagagcattactactatataaacaattcaaataataaaagagtgttacctcaaaaatgccttgtgtaatatataacagttcacaagawtactatttttcttccatttattacgattacaargaagtataacaagaattaaaagaaatatattattttgcatatatatttatacttcaaagtaatttatatactaaattaggttttgtttgagatggtgaaatgaaagactttgtaaataagaatacatgttgatatgtgaaaaatgtaaagttaaaacatgttggcatactcgcagtttctcagaacaagaaaatgactaatctaaatttcatttcagaataaaacccaagacaagccacataaaagcaacctaaaaattaaactgtcatcatattatttgttttaaaactatggaataatatatctgaggaagatttctctcaaaattgtttttctcaatttcaagtaagtaatttattttggttaatatattgggggtgaggggggtgggggtgagccttggcattgaagttggtaaatcctactcacccttaactaacaacttaaatatcaacctctttaaagccttctgtgactcctttgcccattcccaaagattatctccttggttttccaagtcttcatccccttccacattgctgttaaaaaaggatctgttacaatggatattgtgtttgtctctaagaatagtcatgtggcactaccttcatgggccccacctcatacttctcaaccccactgccttctgttgctgagagaccccgagcaagttattatacttatgttagccttaatttcctcctctgtaaagtgagttttaataatttctacagcatagcattattatgattgaataagataaccagctaatgtctggcatacatagtaacataaatgttactttctttacctgtcttatctccagaatctgctacattacctcatatactgagtactctttaaaatgtttgaattgaaatgaaacatggaatttttgtagcaggtattcctcacattaggagaaactaaaacatctgcacattgtggtatgagattttttacatttcgttagtgacatatctacagtctaggtaattgcctgtttaaaacactttttaaaaatttggctatgttttataagtggtccatcaggacctgaaaagaaccttattttccaaagccatcactagtgccttaaaaaaaaaaaggtgatagaacatgttgaaagtatgtatgctagatgtcacagtaaaggtgacatgtcagtaggatttattgctctcttgtgaatttgtaacacacacaaaaatggaagcctttgtattttaaacgtacttaggattgtggaatgtggactaaatgatttattattgcccagagcttcacctctcatcaccatatattttctacatacattcctaggttttgtttaataacattgtcttttacttatttatttttatttatttatttttttgagacagagtctcactctgttgcccaggctggagtgtagtggcacaatcttggctccgtgcaacctccacctcccgagttcaaatgattctcctgcctcagcctcccaagtagctggaattacagccacgtgccaccacacccggctactttttgtatttttagtagagatggaatttcaccatgttggccaggctggtttcgaactcctgacctcaggtgatctgctcaccttggcctcccaaagtgccgggattacaggcgtgagccatcaccacaccccggcatgtcttttaattttttaatgaggtcattagaaagatatccaaattaattatgatgtctcacaccttagttgataatgcttagtgttttgaaaatagaagccatgttattatagttaaaagaccttaattttacgtcattttactaaacgaggtggtaaaccgtttattaaggactgtgtgccctgttataagcgatgtaatcttcacaacagttctataaaataggactgttatccccattttacagttgaggaaatgaggcatagagaggttaattaactttgcctaaagtgatgcagcataatgtttacctcataccatgtgaggattaaatgagaaaacatgtattaggccattacccacttaaacagaagaaacagtgaagcagaatttgagatgagtgtcttctaacacttccagaatttgataatagccattattgagatgtgacagtgaccgtgaatatattcttattcacatttgtgtgtgtgtgtgtgtgkgtgtgtgtgtgtgtgtgtgagagatagtaaaccctggtactcttaacccattttttttttctgaagcaatattaatgtctcctctcaaattcatgctcctatttggactgaattaatgtatttgtgtttacaaggtgatagtaagattttaatatcaatctgatataaaatttttataagttcagtgtaattaaatagtatgtggatatattctcattgtgaaatttgaaaagcagaacaggtaagggaaaaatcttctttgaccacctattcccctctctacttggatcagcttttgttgtatgataaatctccccaaaacatagtgctgtgaaacaataggcatttgttagcctaattctgggctgggctcaattaagcaattctgctgcagcttatgtctggccttgcggatgtggctgcagtcagctgatgggtcagctgggagctggttggtctaggatagctatgtctggataatccgtactggttgtttgcttgggtgatgggggccatgtgtctcccgcaggctaggcgtggctctttcacctggaggcagtagtagggtttacagaagtaactagtgacagcaagcctcgtatattttctgttgtccataggccaaagcagatcaacatggccaattccagagttggtatgggaggggtttcctaactgagtggggctaattagggggccattactacaacaatctattatccaactgttgctggctaactcatttttcaggaarcatgcactaactagcgtggcattgctcctttcttgaagtagtgtttatgtaagcaatttattcaacagttcagataaatttagttaattcattgttcttgtttttattccatttttgtcatccttcagcattattcttagtttcattcaactcaacaaatatttattgagcacccattaagtgcacaataaggtatcaagaggtgagcagcagatagagcaagactactgtgttaatcatccaggtttgttttgttttgttttgttttttgttgttgtttgaaacagtctcgctctgttgcccaggctggagtgcaatggtgtgatcttggctcactgccaccttcacctcctgggttcaggctattctcccacctcagcctcctgagtagctgggattacaggcatgcaccaccccacccagctaattttttgtatwtttagtagagacagggtttcaccattttggccaggctggtttcaaactcctgacctcaaatgattcacccgcctcagccctcccaaagtgctgagattacaggcatgagccactacgcccgaccagtcatccaagtttttaaaagtggcctacctgtctgcttcattatgtaaacagaattctataaaagtagaaaacttttaacaattttttgagaatgaccaacagcccacaccaggctaaatattatcttacatgctacatttttaaacatcttacaaggatttcttcaaatgagaaaaactaatacagaggttgttttgatctgtactcccaccagcaataggagactttttccatgtcttcatcaagattatgttctcaaatgttttgatcattgccaatctaatagacataaaatggatctcagtgtagttttaatttgcattccttttattatgagtgagattgagtgttttttcatatgcttgagaggcccttatggtatttccttctcagcgtactgtttatcttttacccattttcctgttgagactcttggtcttttccttactgattccaaagagccttcatatattagtaaagttcatctccatctgtaaattgagttccaaatgttttcctccgttagttcttatggtagattactttttatttaagtagtatctttttttcatttcataaataatctttatatctgaattaggcttttaaatcacatttagatgaagttaggtttaagtattaggcatgggaatggaaggaaaagatcctggcattatcaaatcttttgtagagaactttttaaaactctggatagttaaaatgaaaaacttcaaaaggatcctgtctttgatttattttttcctcttctaggtttggttttattatgacatcagtcgttttgaccgggcagtccaaggagtaggatcataacctctggagggctgtttttagatgatgagattgtatagtatagatggaaaatactctgtgtaacttagaagaaattgttaataatgttgctttgagtctygttaatttcattgtgtgtgtgtttgtgtgtgtgatgtgtataaaacatgcatagatcatggtagtgcttctagcaatgctctactcttacgtacagtcttccctctgtatccatcccttagtatctgtgagggattcgttgcaggaatccctgaggatataaaaatccacagatgctcaaatcacttatataaaatggtgtagtatttgcataaaataacctaagcatattctcctatatagtacttcaaattatcacttacacctaatacattgtaaatgctatgtaatagttgtgatactgtattatttaaggtagtaataacaaggaaaaaagtttgtacgcattcagtacagatgcaactctttccctgaatatttttgatctgtggttggttgaatccacagatgtggaacccacagatatggagggccagctatataattttcaatctgttcagccaaccttaacctaatcaaccacatgggtatgttaggatggctagattaggctagccattagcagtggaccacacagaagaaaaacacacagaatgtagactcttttgagaatgcagtaatgctacctactgcccaaataatatcctagattttttctgagattgtgggaagccaggaagaaggtggcagagacatctgtgacctcctatgccacatctgacatgaagtactttgaccttttcccttgacttttgtataaaaaggtattagaaaactgcgaggctggacattttatrtgttttgagtaatttaatataattttaaacattttaaagttgtcgaaccctttcttcttatataattttacccagcagcatcaaaaacaaataggaatccttaagtgattagtggggcatggcagaaagccagttttttaccatgctttacatagtttttagtttttcaaagttattgatgtattctttagcgtctgctttattactaacatctttatacatgtttcactgaaaattgaaaggaagtttttcatttaataccaaattattgacttactgttattttcttggttaatcctttttaaacaatttaaaatttcttttttctaattttattttattttttgagacagagtctcactgtgtcgcccaggctagagtgctgtggtgcgatctcggctcactgcaacctccatctcctgggttcaagtgattctcgtgcttcagtctcccaagtagctgggattacaagcatgtgccaccacaccatacctgtctaatttttrtatgtttcatagagatggggtttcgccatgttggccaggctggtcttgaactcctgacttcaggkgatctgcccatctcagcccctcaaagtgctgagattacaggcatgagccacctcgcctggcccaattttaacatttccgagtttgtaatgtgtctcacagtatgtacatttaatacagtaattttccctcctgaaaagctggtattaaactgataggacatttataatcagtgacttcttagagaaaacgtgacattttaaaattcctctatgtgctttttttaaaaaaaatctaatgtgtcatggaatgggtttgcttcccaaataaacatttgtccttcatttttgccttgcatctgtaattgttttaaatttgtatattttgatgtgttgtttggcacatcccagcttcatgaccgataagtcttttatcacagtgcttttcaaattatttgtggtgaagaatcaggtttttttcccaatacttctttaaaatacattaaaaatgaattactagaaaaatgaaatgaaatgagaataacttgacaaaatagtaatataacctccatttttaaaaattattttatttaacaggtatagaatttccctctcagactgctgtaagagtttctaaatgctaagtttcgagctttgttcttgtcttgttgcatagctgtagcaaacagctagttcatagatggcatttgagtagcactgtagagayctttttagcaatataaaaagactaattcatttcttaaaatctttttgtcctgtgtcaaaattattattcctatttcctttcagtttgactatttctgcgatatattgtataaatcgtttttcatcactatttttaatctttttatgtcagttcagttttaaacccatctgaagattttaaacaaagtttttttttttttttttttttggtttttgtttttgagtcggaatctcgctttgttgcccaggctagagtgctcgggcgcgatctcagctcactgcaacctccgcctccctggttcaagcgattctcctgccttagcctcccgagtaactgagattacaggcgcgtaccaccatgcccagctaactttgaatttttagaagagatggggtttcaccatgttggtctggcttgtctcaaactcctgacctcaagtgatccgcctgcctcagcctcccaaagtgctgggattataggtgtgagccactgcgctcagccaacaaaatttgctataattgaggtttgattttgtttttcactcttgtaattttatatttttacaataacttggctgggtgctgtggctcatgcctgtaatcacagcactttgggaggctgaggcaggtggatcacctgaggtcagaagtttgagaccagcctagccaacatggcaaaaccccgtctctactaaaagtacaaaaattagctgggcgtgatggtgcatgcctgtaatcctggctactcagggggctgagccaggagaatcacttgaacccgggaggcagaggttgcagtgagctgagatcgcaccattgcactccagcacaacaagagagaaactccatctcaaaaaaaaaaaaaaaacaaataaaaataactttattttaccctttcctttagtgtgtgacttttgcagcatagaccgttttatgtgttttccttttttttgagatggagtcttgctctgtcacccaggctggagtgcagtggtgcgatcgtggctcactgcagcctccgtctcccaggttcaagcaattcttctgcctcagcctcccaagtagctgggactataggcgcacgctgccatgtccagctagttttttgtattttagtagagatggggtttcaccmtgttgcccaggctggtcttgaactcctgagctcaggaagtccacctgtctaggcctcccaaagtgcaaggattacaggcgtgagcaaccatgcccggccctgttttcctttttggaaaacatagataacagaactcatttttaaaagtgtatgtaccaaaatgtagttttttaaattgttgtttctattcatttcttttttcttatctcttaagagttccatttatatcttagactgcatataagtctgtctttttatttcttcctatatgtatgttgttgagaacacacagcatatactttttacattttttctgtttctaaatataaattatcacagattcttttctttggcatttttaagaagatgttttatctatgctgctgaatgtttgtttaggtcccattccatacatacctatctatgaacaagggctatttttccaagcctagtgtttgccagtaggtagggtatggcaagttcactttaatcatatttattttctgcttataaaaagatagatttgccttccctagcataaagaactaatgatcgtatacaacccacttagatgaaaacattcacttagtgtacctctactggattgaggtttaaggttttttccacttttctccttgcacagttcgctggtatatgggaactaacatatttatggataacctgaaacagtttttttttttaaatttttgttatttatttatttattttaccagaacattgcatgcaagcctccaggttgtaaaggcccttaggacttttagtgatttaatcagtgatgggagctaattcatttatttagattttggatgctttttaacatgccaggatgaagacagctatgctgcgtcaattatgttgatattggttgtttttagagtagatgaacagaggtattacatgtcttagaaaatttttagtaggggactggtttctgttggagcagaccgtgtccccaaggtagagaaaagagttacacagtaagtccttgcttaatgtccatgacaggttcttggaaattgtgactttaagtgaaatcacatataatgaaaccgtttttttctcattgttataataaaatgaarttgaacaaaatgtcatttggagatctgctacaaagtttttcttaaagtttaggtttccaagaacctatcaacaaagttaagtgaaaatttactgtatgtcttaaatattttagtgaaaaatttagagaaggattattctgtatttcatcaattctaagaagtatattttccctccttgtgcatctcagtaattaggatatgtcttacaatcagtagtgcaccatatttacttaacagcacttttcttagtacaaaaattaattatgtcataatcactagcatcttggattcagtgaaatatattaatagttgtttagcttagtgccattctaaattgaatctctttatttgttgtaacattaacctttcttctcttcggacagttttggccttggcttaacttcctagctttgttcacttggaagcttgataaggtagaatatcagttgtataaccgagcaccattgcttatggtaataatgactcatgattactgaattgcataaggaccagaggaggactgtgaatgaattgtaaatactgrtacttataccgttaacagctttggacttccctgagtgtgataactcttgcaactaagcaaatctgttgctgaagctcaggaagctatgcctatgagactggagatattggttgctatttggtacctgtaagctagagtagctactgcaaggaccttatgctctcattctcttacacttgatctgccacctgagagggccaaagatactagcccccgaattgcaatgaggactcctgcctgacatgttaagtataaccagcctgtttgggttatgtgagtctcggtgtctagttaggcctaacggggtgttgtacttacattctgtggctttattttgtttttaatatttgctgagtgaatctatatttactatttattcgtcataagaattttaaattataaatatgagcacatctctactaagtaatgccaaattgttttccaaagtgatcataccaatctatactcccaccagaagtgtgagtttctgatgttccacatcttcaccaatatttaggattgtcagacttaagttttaaattaggaattaatttaaaacatctcattgtgggtttgtacatttttcatcactagtgagagattgagtttttccatrtgtttatagcctactcgttctataaaatactgagagatgtgttgaagtctccaacttaatagatttgtctatttctctttccagttctatcagtttttttttcatgtattttgaaagtttgttagatccatacatatttaagatcggtgtgcctttctggcggacagcctctttatctctggtaatattccttgttctgaaatcttctttgccttgtattaatataaccacttcagcttccttttgattagtatttacatggtatatcatgtcaaaaactgaagtttgccatgaatttcatacatattagcaatagacatgagatttccatctctccattgtatsacttattaataaagagtaactggggagatggttgcagaccagatactgagaagtaggttcaaaggcagctacctcaacagagacccatggagaattgtctcccaacatattttttctgtttttgttttttgttttactttcactttcaacctatctgtatctttacacttaatatgggtttcttatagtcagcatatagatgggcttacttgtttatccagtctgataatctctgtctttcattttgacatgtctcttttatttagtgtgtttagattgtttatatttatcaacattggtaatatggttggattaaaatctaccactatggtatctggtttatgttagtctatctgttctttttttcttttggattacttggactttttaaaaattccatttctctccgcggtttgcttatttatttatacctctttctgaaatttgtttagtggttgccctagggtttgccgtatatttgtaattaatcacagttttcttgatataataatacatagctttatatgtagtattaggaccttatagttctatactcccatttctcctcttcatcttttatgtttttgttgtcatacactttacttttatatatatgcaatcaacatgcaatatattactactctaagactttacagtatattgctatagattttatagaactgttcatgtaggttataataaatttatttttaaaaagtcttcaataattagccttaccttactgtaacttttactttattaacttcttagttttttaaacttttttactctcttacaataacttagcttaaaacaaatacattgtacagctgtacaaaagtatgtcctcattctgtaagcttttttctatttaaaaatttttaatttttacttttaaaacttttgttaaaaactaagacgcaaatacattagccctaggcccacagagagtcaagctataaatatcactgtcttccacttccacatcttgtctggaaggtcttcagggacaattacacacatggaactgccatctcctatgataacagttccttcttctgtaatatctcctgaaggacttacctgaggctgttttacagttaactttcctttttatgtaagtaggagtacattctaaaataatgataaagtatataataaatacataagctagtaactgttaccatgatcaagtattatgtacttaacataattgtatatgctatacttttatacaactggcagtgtaggtttctttacaccagcttcaccacaaacacgtgagtaactcatcgtactacaatgttaatacaactaggatgtccctaggcgataggaatttttcagcttcatcgtaatcttatgggaccaccattatatatgtggtcccttgtcgattaaatatcattatgcagtacatgactgcatttttgctttagagacagttatcttttagaacaattgcaaataagaaaaatatgaagttttgtatttactttcatttataccgtttatactgttgttcatgtctttgtgtagatccaagttttctgtctggtatcattctgtctacctgaagaacttttaacatttcttataggccaagtctgctagtaataaattatctttgtttctctcaaaaagactttatttttctaaaatattcttgctgaatatagaattctggattgccttttttttctttcagtacttaaaagatgtcactctactgtttgttatatggcttttacgtatatatttttatttgaattaaatttttttctttttccgcttttattttagattccgggtgtacctgtgcaggtttattacaaaggtatattgcataatgctgaggtttgaagtacgactgaacccgtcacctaggaagtgagcatagtactcaataggtagtttttccatccttgcctccctctcccatcttgtattctccagtgtctgtttgttcccatcttaatgtccatatgtactcatggtttggctgccacttgtaagtgagaacatggggtatttggttttctgtttctccattagtttgcttaggataatggcccccaactgcatccgtgttgttgcaaaggacatgattttgttctttctgtggctgtgtagtgttccatggtgtatatgtaccacattttctttatctcatttactgttgatggacacctgtgttgattccatgtctttgctgttgtgaatagtgctgtgatgaacacatgggtgcatgtgtctttttggtagaatgatatatttttctttgggtatatacccagtaatgggattgctaggttaaatggtagttccattttgtgttcttttagaaatctccaagctgctctccacagtggctgaactaagttacattcccaccaacagcgtaaaggttttcccttttctccacagccccactgagatctgttatttattgactttttaacaaaagctattctgactggtatgagatggtatttcaattgtgattttgatttgcatttctctgatgattagtgatgagcattttttcaatttttttttggccatttgtatgtcttcttttgagaagtgtctgttcatgtcctttgcttacattttaatggggttatttgttttttacttgttgatttaagttccttataaattctggatattaggcctttgtcagatacatagtttctgaatttttyctcccattctgtagattatctgtttactctgttaatggtttctcttgctgtatagaagctcttaggtcctacttgtcagtttttggtttygttgcaattgtttttgaggacttagccataaattcttcgacagggctgttgtcgagaaaagaatttcctaggttttcttctaggatttttgtagttttaggtcttacagttatgtctttaatccatcttgagttaatttttgtatatggtgataggtaagagtccagtttcattcttctgcatatggctagccagttatcccagcaccatgtattgaatagggactttttcctcattgcttatttttgtcaactttgttgaacatcagatggttgtaggtgtgtggctttatttctgggttgtctattctgttttattggtccatgtatctctttttgtaccagtactgtgctgttttggttactgtagctttgtagtgtagtttgaagttgagtaatgtgatgcctccaggttttttctttttgcttaggattgctttggctgtttgggctgttttttggttccatatgaattttagagtagttttttctgattctgtgaaaaatgatattggtaatttgataggaataatgctgaatctgcaaattactttgggcagtatggtcattttaatgatactgattcttccaatccatgagcatgaaatatgttttcatttgtgtgtgtcatttctgattctttaagcagtgttttgtagttctccttgtagagatctttcactactttcattagatgtattcctaggtattttcttgtttttgtggctcttgtaaatggaattgtgttcttgatttggctcttagcctgaaggttattgttacgtagaaatgctactgatttttgtacattgatttttgtatcctaaaacttgactgaagttgtttatcagttcaaggagccttttggtggagtcttcggagttttctggtatagaatcataccattagcaaagaaagatagtttgacttcttcttttcctatctggataccttttatttctttttcttgcctgattactctagctaggacttccattactatgttgagtaagagtggtgaaagtgagcatcattgtcttcttccatttctcaaggagaatgtttctaggctttgcccatccagtatgatgttggctgtgggtgtgtcataaatggctcttagatatattcctttgatacctagtttattgaggggttttatcatgaagggatgttggattttatcaaaagctttttctgcatctattgagatggtcatatcgtgtttctttttaattctgtttatgtggtgaatcacagtgattgatttgcatatgttgaaccaaccttgcatcccaggaataaagtctacttgattatggtgaattaggttttagatgtgctgatggatttggtttgctggtattttgttgagattttttgcatctattacatatttttgtcatttgtctttgattctttgcatataatgtcctttgttcatttaatttatttttcttttggccgtctttaagagtttctctatctttagatatgatttatctttattttgaatgtgatgtgtctgttttcttttgttggtttgtttggtcttctctgagttttttggttctctggtttagcatcttttacttaatttggaaaattcttagccattgtctcttcatgtatttcatttgacctgttctgtcttctctttctgtgatttcaattgcaggtatatgggccatttaataattgtctaattgctcttgtatgctttgttctgctttcatttttgtttttttaatacttgttttttttctaacatgatgagatttttcagggagattaccttgatgataatggttattgttgctgttcctgaagcatcaattatttcaaaagatgaagctatattttagagacataggcttcttggcatatttgagatctttcagattattagtaaaatataagtttatgataatctttttcccaactaaaaacaatctgcttagatttagggaccatgagatatagcctggggttgtggctattgttgtgatgataaaatgtaatgtaataaccctaatgacttatgaactaagctatgtttttagttttctgtatcaaaatattttcttatttttctgttagatcacttgaatgtcatttgattgtcttcggaattatgctcgttattatactgttatatatttaatttggaataaagagtattacctattatcaagtagctagacctagatgtttttatttttctctcctataactatgtagaattaaatagacttgaggtacagtacaattaaggaattaacaataatttttttttctggagtgtgttaatttgcatttatgttaagaaagtggtttgaaagtataaatgggatgccttttaaagaaggatttttgtaatgcataaaatatttaagaccgctaaaaggtaataaactgaattagtgtaaataaaacaaatttaaacttagaaatatcaaagtgtggagatttttttgagtagattcagactttttgaactactaaaagtgatgaatgagagttattctggtttcttcttaaaattatgtggtagtcaagtgaaaaggaatattacctgcaaagggaagcaagatacgcttctattaaatttacatcaattcaggtgtgtcagatttaccagagattctttggatatgtctgattccagtgtctaaaagtttaatcatagaaaaccttatatttgaaatctgaagtttaatattgtggaatgagtattagtatctgagaaaagattgttttgggggaactagttatatgcatttttaaatgtgatctctgctttacctaataggattcatagtcttgatacattatactctacagagaggaaagtgttttgtttgacccatgtttcagtagctggcagattttgagatagggacatctccaagttgatattggagaacagccacaagaaaagacaaggagccaaatccgtgaagcatttgcttttttggcagaaagcctcagtatttatatacagatttcttcttaaaaattgaagtaaactggattatggacagtttcttgtttagtgtgttaaattcccactacatccccagcacatacttgagaacagagggtcaagcttctgttgacaactgttaactctttctggcactcctcttgcagttgtagaacagaaacaaggaattgtttttcctctggtaaaaaggaagaccgactctaaaattacttaaaggtatagttgtgtgttgcttaacgacagggatgtgttctgagaaatgcattggtaggcgattttgtcattgtgtgaacatcatagagtatactacacaaacctagaaaaaatatgtataaataaaaatatatttgtatgttacattagaaaacgaaatgtcccagcaccattactgaatatcagctatttcccctacttgatctgcagtgtcaatatcaagtgccatatacgaggtttcgatatgatgctctatcttaaggaaccaccattgcatgtgcattccatcttgactgaaacattgttatgtggcacaggattgtaattggagccctgattccacacacctacacatacataaaagaaaagtgaaaatgcattgtgttcttttatcctaatatgtttttgtcaataatttttaatacattatggggctttggtagatatttactgaagaagagaaattatttctttttatttaatcataaacaggtaacaatcacttacatgtagtttgtggactttcaagtccattctctgtccatttccatggttactactttaattgaggtgtcattatttttgcatggatcatcataatagcctcccagtttgtctctaactttacctgttttcaaattcagcccttatatattttagattatagccctggcctataatctaaaataaaactctagacaacataaagttttttcatgatcgagcacctgcctaccttttcagcatcatcttctgcttctccctcaagcactttgcttttcagtctgaactgcttgctcttgctcaaatgtatgtacctcatgactttgcatatgctgttagcttaatgaaagcaggtaccttggctgtcctaggtgttcagtgtctggtgtggtgtcatcccttatgaaatgactgaatgccattcctctggatggaatggccttttctactggtgaattcttcacacttcaagactgtcctgagacatcatctacactgtgaagcctctcccaactacccttagtcatatcagtcctttgtgccaccattgtactttrtatccctgttaaagcagttatcacattaacttgcaagattgtttgtttttaacatgtctgacttgcctcttagagtgtgcgtttcatgagggcagattcagtatgctgccagtctttgtgtccttagtgcttattgcctacacatgcattaaaaattagaaaaaacagccgggcgcggtggctcatgcctgtaatcccaacactttgggaggctgaggtgggtggatcacctgaggttgggagtttgagaccagtctgaccaacatggagaaatcccatctctactaaaaatacaaaattagccaggtgtggtggtacatgcctgtaatcccagctactcgggaggctgaggcaggagaatcgcttgaacctgggagatggaggttgtggtgagccgagatcgtgccgttgcactccagcctgggcaacaagagcgaaactccatctcaaaaaaagttagaaaaaactcaggaaggaaggacaaatacatgattccacttatatgagatacctacaatagtcaaatttatagagaacaaacaatagaatagtgtttactgagggtgggatggaggaggaatggggatttattattatttaatgggtacagagtttgtgatgatgggaaagttctggagatggatagtgatgatggttacacaataatgtgaatgtacttaatgccactgaattgtatacccaaaaagggttaagatggtaaattttacgtatattttaccacatttaaaaaaaaaaaattcatgaaggtaaggaccttggcctgtttactcagctttgttttctgtagttcctcacattgttttgttttattgttaaattgttttcttttgacatggtagtacttgatttttttaagtgtttgaaattgggtccagcacagtagctcaagcctgtaatcccctcacttcaggaagctaaggcaggaggattgctccaggctgggtgtttgagacccgcctggacaacatagtgagaccctgtctctattattaaaaaaaaaaaaaaagtttgaaattaaattgtgtgtaagcgcatgggatattgtctaagaaaccaactgaatctataaagtaagggaggaaacatagcacataacttttttattttcttattttttatttttttgagactgagtcttgccctgtagcccaggctggagtgcaatggcatgatcttagcacactgcaacctctgcttcccagcttcaagccattcttttgcctcagcctcccaggtagctgggaccacaggcatgcgccaccacgcccagctaatttttttgtatttttagtagagatggggtttcaccatgctggccaggctggtctcgaactcctgacctcaagtgatctacccgcctcagcctcccaaagtgctgggattatagacgtgagccaccgcacccagctgtagcacataactttaaaatatcacatatttaaaggaaatattcttgtgataatataaatattaactaaaattaataactaaagtggttgtcacctgctactaagcagtatatagtggtaaaagagaggcagtatggcattgtgagacttcaggcttggtaaggtcaaaaagtcttttttacctgcttagaatgatgttcctatccaagtccaggatgactggggaacagtacaaccttgagtgtatcttatgttatagataatctcatttgagccccctacgtctccatgaaatggagatacctctattttcctataaggaaagtatatgtgctattgaatactatcaacctggcataattgcaaacccagttgatatatatgtgtgagtacacacgtgtacattagaacttctaataaagtcattctgtgagactaaatttgcaaaataatttatctggaaacagtttaaaatggggtcttatttttacctaagagtgtgtgatggatggagtaggtctgggatggtgcccagaaatatgttgatgcctgtgatttaggtaacccttagaatctactctaagaaatactgttttgataaagcaggtgatattttggattgatgaaggtctcttttagaatcagattgttcttattattgaatggttaaaatatatatttatgtattacattattatatattaaaatatgtaaagaatgacattgcttttatcttgactgcataattcttatcaatttcttgctctttccagtgatttccacatttttactttcctacctattgctattttctgtcaggtgttgataaattctggtgagtgacaggtaatatgaggggcaaatatgtttattcccctgttctttttctttaatcacgtttattgaggtataatttacatataataaaatggaccaattagacgagttatgacaaacgtatgccgtcatataaccatcatcaccacagtcatggtatataaaatatttctatcaccctaaaaagttcccttgtgctccttttagtaaaacctctctcgctattcctggtccctcacaaccacttatctgctatatcactgtaatcacttatagttttgccatttctagactttcttataaatggaaccatgtgttacgtagttaagtgtcatccacattgtcgtatgagttaatgtttttttttaattgcattatatgcatttatccattatatggatataccattcactaggtgctgaacatttggattgtttccagtttgggctgttatgaataaagcatttatgtacaagtctctgtgattatatactttcatttctcttataaatacttaggagtgggattgttgggttgaatggtaagtttacttcataagaaacagccagatttttttcccagtgtggctgtaccattttrcattagctccagcaactcatgggaggtccagtttctcctaccctctccaacatttgtttatatttagtcttttaaaattctgtcttttctagtgaaagtgtaatgatatctcattgtggttttaattttcatttccctaaggtctaagaatctgaacatcttttagtgtgcatatttgccattcacatatcttctttggtgaagtatccaaatcttttttacaaaattgagttgtttttcttcttgttgagttgaaagggttctttattcattctggactcaagtcctttatcagatacatgttttgcagatattttctcccaatctatggcttgcattcttatttttctagtggtatcttttgaagagtcaaggttttaaactatgataaagtccaatttatctttttttttttttttcctttcgtgattcatactttttggtgacctaagaaatctttgcctaacctaaaatatcaaatgttttctgttttcttgtagtttatgtcctctgttcttaccagattgtggtttgatttctaagttgtcattaggtggtactttttagaagtattaatggagattattttgataggctttttaagctgtgaggtagctttataaaaattcccttcggtattgggcccaaaatttgctttaaatataggcagagtatcagtagaaggcaacacagagctattctgtgccctaggattttaatttctgacctcctggttatagttggtatctgcccagggataattgctcttagggtaagacttttaacatgtaagccagcctgtcaaaagtgcacctaaaagttctctttcagtcattttctgagttactgataggaacataggtactgtgtgaatcagatctgagaggattatgaatgttatagaatgccttttgttagggaatttaagcccagaagaagttgggaaagtgacagatttatataaatgcgagtgacaaaaccagttaaaatgttctgactcaacttgaaatatgttggactatataataaatataatattgtgagatattctgaactagactcaactctgctctggctttcctcccttgtaattccattacttggtccctttcccctttttcttctatgacctctggcaatttggcttcttacacttagaacttaactaacacccagctcagacccatggcatccacttacacttcatgaagaactgtgaacctgtaatgttttttatggaaactcattatgattctgtctcctttctgccttatcacctgtgtgggataagtttcataaacaaatagcttctctggttctttctgttgtgagctgactaggatagtttataggtaatatctcattccacttttctgcataacacagactggttggttgtctttcccagccaaaacagcataagcaacagattggacaaaagcggatatgataacccagctttctcttctgaaacccagacgttagagtgatttacaaaaatgtaaaacaatttctgtcttttcacagtttttttctttaattatccaaatgtacagcttttctcattactttcttcctctccataatatgtaatagtttgctcttgtagtaccattttaagcccatacttttctaccttttttgttttgttttgtttttttggtaattgtatatagcacttaccctccactgcaggaacttaagttatacatatataagcctgcttaaagatgtaacataggatactaatgttttttggttttttttttttttttttttttttttgagacagggtcttgctctgtcacccgggctggagtgcaatggcacaagcatggctcactgcagcctcgaattcctgggctcaagcagtcctcccatctcagcctcctgaatagctggaacaacaggtgcgcatcaccgtgcctggctaattttttaatttttagtagaggtagggtctcacaatgttgcccaggctgggctctaactcctggcctcaagcatttctcctgcctcagcctcccaaagagctgggattacaggcatgagccaccacacccgcacccagccttgttcatgtattttcaggctttttctgtgcttcattttggacggtttctatggctttgtcttcaagtttattaatctttaattccggcatttctgatatattcttagttctactcatatttttcctcttcatttatttttcatccgtcatgagatgaaaattttgatttatgtttgtttattgtccacatctctatttaatatattcaggcattcttctacttcttgaacatatagtttacagttgcaataactattttaatatctttgcttactaattccatcatctgtatcatttcctggcttgtttctattgctacatttttttcctcataatgggtcacattgttctgtttattacatgcctagtttttttcactggattccaggcatggtggattttaccttgtgttctggatatcattgtatttttagaaatattcttgagctttattctgggacacttaagttatttggagatagtgtaatcctttcaagtctttttatgcttagttgggtgggaacagaacaaacttaactagggctaatgttgcccatctactgagtcaataatcttatgattattctactcgatgtcttgtgaagtatgtttccttcttagatgaaacataagttattcctgctactgtgtgagcccttgggattgttccctctgcccattttagttacttatttttctgctttaggtacattcctcacaaagcacgtgctgatactttcagtaaaaccttgagggaaccctctgcagatctactcctgtctgtctctgcagttctcttctcccggtattctactaggcaaattctaacaagcatggccttcaactttgtttcctcaactcagggagattgccagcttccacctgggtttcttatccctctgctccgtggaagctgttaagtggggagctattgaagaaggacttacaatgtttgtttcccgtctctcagggattactgtcctatgctggccaatgtctaatgtgtaaagaccattgatttacatgcttttctgtttattaattatttcaggcagtgggtaaatgtattccctattatttcaccttgactcaaaaccctgcctactcgtttttaaagtttaagctcaagcattaaatcctctccaaagtgtttcatattccattttctattcaggaatgatttgtttgcaaagaccacaagctctttcaaaaaagctgtaattggccaggtgtggtggctcacgcctgtaatcccattcagcactttgggaggccggggcaggaagattgcttgaggcaagattgcttgaggagtctctaactcctcaagcaggagttagagaccaggctgggcaacataccaagacctcatctttgttaaaaattgaaaaaaaaaaaaaaaatagccaagtgtggtggtgtgctcctgtagtcccatacactggagaggctgaggtgagaggatcatttaatcctgggaggttgaggctacagtgagccgtgattgtgccatggcactccagcctgggtgacagttagaccctgtcttggaaagaaaagaaaatggccaggcacagtggctcacgcctgtaatcccagcactttgggaggccgaggcaggtggatcacttgagcccagaatttcaagaccagcctgggcaaccccatctttccaaaaactacaaaaattagctgggtgtggtggccggtgcctgtggtcccagctacccaggaggctgaggtggatcatctgagcctaggaggcagaggttgcagtgagccaagattactctattatacgccagcctgggcaacagagcgagaccttgtctcaaaaaaaaaagaaaagaaaaaaaagaaaacctccaataaaaaggggatttattattacagtatagagaaatctcacagatcttcgttgcatggtataaacaagtcttacttctcttccattgttttctctgcagaccagtttccacacagttcttcccatttgcctttggctctcacttgcctgttaaggtattaactgtggccttaactcaacatgaccattcagctctagtccttatacctgatcgttggattgcttatttatatgaacagccccaaggagccagaaaattcatatcttgggtgaacagagttcaatactgacatgatagtgttccatgattcataatacaattaaagtaaaatttttaattaaaaaaattttaaastaaggattttgtgtggggaaataacctataaattctaacttaggaagttgagtctcaatactcaatgaacacagtgtttgtatagtagtagagacatttggttaagttttttgcttattaaataatatgattcatcaataaacatatatagagcatctattatgtatcaaggactgcccagagcttatattctgaaagaggggttgaccaactatagtctgtgagccaaatccagtccagccacctatttttctaagtaaaactttattggatcactgcccctcacatcgattacttataatggctgttgtcatgcttcagcaggaggtagttgcaccaaaggttcactgtgacccacagtgcctaaaatatttgccatttgtcctgttataccttatgccaacccctgacgtaaagtgaatttttttaatgtgaaaaggttaacaactttttacagggtgaaaaccatctttaatcaggtcttagactttgacgaaaattaatagaggttaaattactttccttagagtcgtgacatttgaagtttttggttttatttgctcataaagaccacaggtttgttttgtctctttattaatttctagttagtgagattgcatttttctctgtaagtgttttctaatagcaagcatttgaaagttggagttgaaataatctcacacgagggcatcccggtttactggtgattcagaacacatctggtacggtatttggcaagaggctaaaggctaagttttgcagccacccgtattaagtcttttgcaaaccatcaggtgtattctgtaattttagcaataaacagatttttttccttcagtatgctaaaataaagactgatatattttgggatggtaggtatagttgaaaattaactgttttcaaatataaaaaacaccgaagctcaggaaataccatctgagtctaattatacttgtgaggttagtgatcagtatgtagttcttgtgtcttcatggttgtcattagttaaggtaaagaagtctcatatagatttacacgaagttattcatccttcaagtctctgctactatacaaagagtagatttattcatttttaatatatgcctatctctttaaaatgccatagccactaatctcagtatcaaatactagattctcctaaggctttacaaaaggagattcccactgaagggaatttgtggaagaaaagtagagtccctgtgatttgggagktgtttgtttgtttgtttgtttgtttgtttgttttgagacagagtctcactccgtcgctcatgctggagtgcagtggcgtggtcttggctcactgcaacctctgcctcctgggttcaagcaattctcctgtttcaacctcctgagtagctgggactacaggcgcctgccaactcgcctggctaattgtatttttagtagaaatggggtttcaccttgttggtcaggttggtctcgaactcctgacctcaggtgatccacccgcctcggcctcccaaagcgctgggattgtaagcgtgagccagccaccgtgcccagctgatttgggagtttttataactaaagtcacttcatcccagtttgttgggatgttcctaatttacactagcattattattaataggaaccacctttattctcaacaatccagtttgtacaagaaattatattgttactctattaatagaatcatattgattatggagcagcaggatctgttttaaaatttagcatttaaccaacctcagcatttattctgattaactgttaactctcatgggagttggtggattgatgaccacaagacagcacaattgttaaaatgagacttaactcatacacaggcccatctgacagtaaagggctacattatgtatgtctgtacagcacaaaatcatttgaatccccacagctgaaaatgaactttttgtgttgtgtaaagggacttcctcagtctgtctccattgttcttttctaggcttatttcccatttttctttctctttaccatgaatcttatatttcagccccactcatatgcttggcatttcctgaatatatcctatgctttgtctaacccccatacctttgcttaaactgttccctctgtttttttgtctgctttaccttttccagtctccttttcctatgtctgttaaattcctacccatcctttaaagactggtgtaaataacacttctatgaatcctttcttgccacatccattccaattagtttccctttttaggggggctccctaagcattttgtttccatctctgtcttgcagtataactttttgcaacaaccccatccccagctctttaaaggtagaggttgtacttaattcattttgaaatccacattacctttataaagccttgtacacacttaggtgttcagtaaaaacgtatggtgaattgttggtatatccccctaatttatttagaataaccagaaaatatttaaaaaatggttttctttataaggttttaagagtaactttactccaatttctaaatatatttaatacttttaattttctttattttagctgttttttaaaaaaattgcaacttatattttggattcaggggtacatattcaggtttgttacatgggtatattgcatgatgctgaggcttgggacatgatttacccccgttacccaggtagtgagcatggcacccaatggttacttaatccttgcccccctccctacctttcctttctagtagttcccactgtctattgttgccacctgcattcttgttaacacttttttcttcagatagaagtatattctcattgagtttttaagtggaccccaaaagtttttgtttcttcttcccttccaaggcagttggccacatgccgagagcttcttatatttctctcctgttgccgtcttattatctgtagttgattcttgaaaacgatgaggtgatcggttgcttgactgcctaggttagttctctgggttaatcattgccttccataaatctccttcgctttggccactatacttctgggaaagaagtaggatgaacagtattcagttctctttgccagttgaggaaaatataccttaaacattaacctgctttgtgaaatttttctaatgacaaaaaggacaaattagcagatgacattatagccctggcatttttttcctttcaaataagtctaattttattgtactggagtagagaaagcctacaccaagcaactaacccgttaggcattttatcttggctgtatcaaaaagttttgttttgagtgaaagaagtttgtaggaattttcagaacgtaaaacctaaaggttgattatcatttgatatattatcagtcgttctactttccttttcttccttttctgtggaaatggccccatcatattctttcaccatttttcttttgggttgctatctttcttactgatttgtaggagttctttatatattctggatactgatcatttgtggttaagtgtattggaaacatctctttcaggtctttgtcttttaatttgtggtatttgtggccattttaatttaaagtcatagctttttcttttgtagtttaagccttttatgcttgtttttaaaaatctccttctagacagagactttaaaaatattttgtatatacttggatttgaatctatctggattgatttcttgggcagtatgattttggaaatctaaccctaccttttttcccagcttgataaccacttggtctagcactatgcaatgggcaatcagttccttttctgctgatctatagttttatgaacctgtgtttttaaccaatacttcctaatctgccagtagatgtttgaaggcctgtctacatgttacatttccatgtcagttaccattgctatacacactttgttaattctctgttgtttgcccatattttatagagggaatggaacatggacaataatggtactctgttttctgtttggtttggaatatttaaaatcagttctctttgacctcagagctttgggaaatagaattaactcctttttataaaacaattaagaatttctggcctacaccattaaagtcatgtatcagactaaaggatagcatcttttctaaattccttcatgaaatgaataaatgaacagcctatggctgaatgttaagctgtgtatggacaggttaagaccctatgaggccaattttcagtgaaaggatagctactgaaaaccataaattaagcaactaccaaagtttgcacacatctgcaaaatatgaacattttgtctattcagagtattgagaccttcttgaatacaccaggcattcagtagaaattccagaaaggtcacatcttatgagtagggctaatgtagtcttagcgtaaaggctttcctggacctgcactaacaaaatttaaaaacgaggctcaaaacaatcagattgatctgcaagtaaattagttgcctgctgggacaaacctttcttgaaaggaagacaataaaatccacatataagcaggtatctacaatgcccaccatctatttaaaaattactagatatggccgggcgcggtggatcacaatgtcaggagtttgagaccagcctggccaatatggtgaaacctcgtctctactaaaaatacaaaaattagctgggcgaggtggcggcgcctgtagtcccagctactcggaaggctgaggcatgagaatggcttgaacccaggaagcggaggttgcagtgagccastgcactccagcctgggcaacagagaaagactctgtctgagaaaaaaaaaaattactagatatataaagaagtaggcaaatgtaatctataaaaaggagaaagtcttgtgaataaaaacagacccagaatgcaatatgtgatcaaattcaaggaaaaggactttaagataggtatttaagtgtatttagtaattttaatgaaaacacaatagaacaaaacttataaataacaacatagccgcctgagcgacaaagtgaaatcctgtcccagaaacaaaaaacaccaccaccgatcctaaacaggacacacacacacacatacacacagagagagagacaccatggcacatcataattgaattgttgcaaattaataaaaatctttaaagcagccaagaaaaatctctcaaaccatatacagggaaatcatcataagaacaactacttaaagagatgtagttaataagacaactgataaggcagaattgaatctaaaattttttcaggccaaaagagagcaggttaggggaaaaaaatgagcaatgaataagcaggaaaaatagaaaacaaaatggcaaaacataacctcaaaccttattacttaaataattggattagttttacgtggacttattattctaacttaaaatgcaaagcactaccatatgcagctcataagaatcatacttaatatatagacagtttgaaagtaaaacagtggagaaatgtactttgcaaggaaaagtcactaggaacactggcgtatctaaagatcaggcaaagtagacttcatggtaagacgtattatcagaattaaagagggatatttcaaaatgataaaaagttcaagttttcaaaaagacaaaaagttcaaaaaacttgatgcaatactgacatcaagggagaacataagggagaactaaagagagaaaaagataaagccagtgttacagttggagacttcaacactcctcttttcagcatttggtgaaacaagtgggtagaaaatcagtaagtatatgaaacacttgaacaacactgtcaaccaactcagtctaattgacatttttagaaccctacacctacctaataatttcagaatacacattgtttacaaggtcacatgtaacatttgccaagggaaaccaccagcgccgtaaccaactcagggaaagggaagtatctaactccagccccctttattcttcctgtttcacctaagtggggggaaaagctgaaaatcacttgtgacggtcacacccccgggacacaggcccacttaaagactgaaacgtaatcataggactatagaacactttatcttctccccataccccacatcaacaggttcttcccctcccctcatgtcagcaggctcctgtataataacagaagattacagctgaaagaactgcaaggcttagactcacactatgtaaagagtttctagggaaacccaaagacagtatgagacaaaaacaaggacagtagagaaaatattagcctctaacacctataactacagcaaatagtaaacatgacagtcttaactcccagctagatatggcagagattttggaattgtcagattgataatttaaaataatgatgagtaacatggtaaggtctgtaataaaaaatgtagacaatatacaagaacagatgagtggctggacgtggtggctcgcacctgtaatctcagcactttgggaagcgaggtgggagaatcacttgagcccaggagttcaagaccagcctgggcagcatagtgagaccttgtctctataaaaaataaaattagctgggtgtggtggcatatgtgcttgtagtcccagccatttgggaggctgaggtgggagaattgcctgagcccatgaggtcaaggctgcagtgagccaagatcacgccactgcactccagcctgagtgacagagcgagaccctgtctcaaaaacaacaatgacgacaacaacaacagtaacaaaaagaacagatggataatagaggcatagggattggaattgtaagaaaaggaaatgctagaaataaaatctataacagaaatgaagaatacctttgatgggcttttcagaagaacaaaataaatatttgaagtaataatgactgagaattttccaaaattaaacacctacacatatcatattcaaactgcaggaaaccaaagataaagagaaaattttgaaagaaaccagaggcgaaaaaacccaccttacttctatgtgaagaaagcaaaaattacatcggacttctgttcacaaacaatgcaagcaagaagcgagaggagtgaagtgttttaagtgttgaaagaaaaacaccaacctcgaattattctgtgtgcagtgaaattatccttcaaaatgaaagagaaataaaaaactttctcagacaaataaacattgagggaatctgttgccagtaagaaatgttacttgccttataagaaatgttagaagttctccagagaaaaggaacatgatataggtgagaaacttggatctacataaagaaaggaagagtattagaaaaggaataagtaaaggtaaaatcttttattttcttgttcttaactgataggtaactgttcaaaataataatagcagtaatgcattcagttatagcttagggataagtgaaattaatggcagcaattttataagggacaggagggctgtcccttataagtaattgcagttttggaccaggaattttaaatcattgtaactaggctcagacacatctttattaatcaaaataggaaccattataatcaacacattttcgccaaaagatacgtttgtttatttctgtagcataaaaatctttgctttgggactcggcgtggtggctcacgcctgtaatcccagcactttgggaggcccaggtgggtggatcacctgaggttgggagtttgagaccagcctgaccaacatggagaaaccccgtctctactaaaaatacaaaattagccgggcatggtggcgcatgcctgtaatcccagctactaggagggaggccgaggtaggaaaatcacttgaaccccggaggcggtggttgcagtgagccaagattgtgccattgtactccagcctgggcaacaagagcgaaactcctccgtctcaaaaaaaaaaaatctgtgcttcaggattcagtgaactcttggaaagcattttctgcatcctatgggttgtggaagcattttcctggcaaaaagttgtccagatgctggaagaaatcatagtccactggcaagaggtcaggtgaatatgatggctgaagcaaaattgtatagcccaatttcttcaacttttgaagcgctggttggcggtcaggcattgtcttgaagaggaattgggccctttctgttttcggtgcatctcattgatttgccgagcatacttttcagatgtattggtttttgcctggattcagaaagctgtagtgggtcaaacgggcagcagaccaccaaactgtgaccatgaccttttcttggtccagccactgagctggtcatcacataaaatccattttctgtcatgttaccatccagtcaagaaatgtttcgttgttattgggtagaataagagaagaccatacttcaaaacgatttcttttgttttcatgcagctcatgaggcaccyacttatgtagctttttcacttttccaatgtgcttcaaatgttgaatgactgtagaatgctctatgttgagttctttggcaacttttcgtgtagttttaagaggatcagctttgatgattgctctcaattggttgttgtctacttctgatggccagccaccaagttccttatcttcaagcctcttgtcccccttgcacaacttcttgaaccaccaccgcactgtacatttgttagcagttcctgggccaaatgcattgttgatgttgtgagttgtctctgctattttacaacccattttgaactcaaataagaaaatcgctcaaatttgctttttgtctgacgtcatttccatactctaaacataaaatgaacagcaagtaataagtcattagcaaaaaaacataaagtgagaaatgcctgttaaaaggatgtataacataatcacatttatttaagaatgtattacaatcaaacagcaaattccaacaatgcaaaaaccacagttacttttgcaccarcctaatataagttacctttgaggcagtatagtattatttgaaagtggatttagaatagttgcaaatgtatacttcaaactccagggtaaccactaaaaaattgactgttttttttgtcttttaatacattaaagatgttgctccactgacttctggtttgcactgtttttgacaagtttagttaatgtgtttttgcccaaagctttggactttggatttttatgatttatcattttgccttattcaggaccccgtgagatcaactgtatgcttagtagaactcacttgccatatcaacccaggactctaaataattaaacatagtcctaagaaaacctttctttaattcatgtatgaaagttataggatatcgggttgggatatgggattttgagggatgtgaggagcctgttcaaatattaaattgtttttttgtcatttagttttattgtctgagaaaactttcttaacattaacagttctttcttgttagtttattttttggtaatgatcactttacctctttttttttttttttaatcttaayatgattcagggtttaaagccaggtacactggtgcacacttatagtcccagcctgggcaacatagcaagattctgtctctaaaaaaataattaaaataaaaatactatatttagtgcatcattaaataaaaataaagatatgtaagtggttgtagtggcaaatgattatatttctgtatattcataatttattcctatgatataaattgaataatttaatgaatgcattttctctaatggtatattcaaaattaggtcatctcattagcaactgctaaagaaaacaatgagtatagataagtttaaaagattgtataataggccaggtgaggtggctgatgcctgtaatcccagcactttgaggcaaggcagctactcaggaggctgaggcaagaggatcacttgagcccaggagtttgagaccagtctaagcacttagcgagaccctgtctctataaaaaataaaaataaaaaaaaaaaaaattaggcaggtgtcacatacctgtagttccagctactcgagaggctgaagcaggaagatcactagagccaggtggtcagacctgcagtgaactgtgatcctgccactgtgctccagcctgagtgacagaggaagaccctgtctcaaaaaaaaaattatgtaagtttattgagatgtagttcacatactatacattttacctatttatacaattcagtgatctttgttcacagagttgtgcaaccataagcgcaatcaattttagaacactgtcaccctaaaaagaaacaccgtctcaaatagcagtcagtactcatttcccaccaattccctaagccccagcaaccattaatctcctttctttctctataaatttgcctattttggacatttcacataaatggagtcatataatatgtgattttttgtgtctggctcccttagcataatatttaaaatttttctctatataatataaaattaaaatattttaattaaaaattgtatactaaaaatgctaaaaattaaaaagttttagtatacaatttttaattgaaatattttaattttatatatagtatagcatttatcagcacttcattcctttttatggctgaataatattctattttctggatatgctgtattgtatttatccattcatcaattgatggacttctgagttgtgttcaccttttgaccattatgaataatgctgctatgaatattcatgtacaggtatttgtgtggacatgtattttcatttctcttagacatatacctaggagtagaattgctggtcatatgataactctatttttttaactttttgaagaactaccagactattctataaagcacctgcaccatttaacattcctagaagtagtgtatgaaatttccagtttctccacaacactagttattgtctgactttttaattatagctgtcctagtgagcgtgtggttccgatttgcattttgctgatggctgctgatgttgagaatcttttaatgtgcttatttgccatttgatatctcctcaggaaaatgtttattcacatcctttgcccatttataatatttagtattttttattgagacatagtagatgtacatatgtttggggtacatgtgataatttactacatttacataatttgtaaagatcaaatcagtgtaattgggatattcatctcatcttaaatatttgtctttatgctagaaatatttgatttattctcttctagctattttgaaatatacaacatattattgtaaactatagtcaccctgctgatctaccaaacactaggtcttgtttcttctatcaaactctatatttgtaccccttaatcaacctctcttcatccctgcacccccacccttctcagcttctggtaactaccagtctactctatatcttcatgagatccacttttttagctcccacatatgaatgagaacatgtaataatgtctttctgtacttgrcttttttcacttaacatataatgacttccagtttcacttacgttgctgcaaatgacaggatttcattttttttatatggctgaataacattccattgtgtatatataccatattttctttatccattcatccactgatgggcacttacattgattctaataatttttgttattgtgaatatagtgcttcaataaacatgggagtacagagatatcttcagtatattgattttcttttgggtttatattcaaaagtggaattgttggattgaggaacctccacacagttttccatagtaactgtactaatttacattcccagcagtggtgtacgaggattctcctttatccgcatcctcaccagcatccattattcattgtctttttgataaaagccattctaactggggtgagatgatatcgcattatgattttgatttgtatttctctgatggttagtgatgttgagcatcttttcatgtgtctggccatttttatgtcttcttttgagaaatatctattcagaccttttgcctatttaaaaatcagattatttgttttgttgttattgagttgtttgagctccttatatattttggttgttaatcccatgttagatgagtagcgtgtgaatattttttccattttatgaattgtctttatcacttcattgattgtttcctttgctcaacagaagcttgatgtaatccttttgtctatttttggcttggttgcctgtgcttttgaggtcttacccaaaaaaatctttgcacagaccaatgtcctggagcatttccccaatgttttcttctagtagtttcatagtttcaggtgttagatttaagtcttcaatccattttgacttttgtatatggtgagagataaggaggttctgtttttagtttcattgttctgcatgtggttattcagttttcccagcaccatttgttgaagagactgtttttttccccattgtakgtttttgatgcctttgttgaaaatgagttagctgttaatgtctggatttatatgtaggttctctgttctgtttcattggtctgtatgtctgtttttatgccaatagcatgctgatttggtttctatagctttgtagtatattctgaagtcaggtagtgtgatgcctccagctttctttttgctcaagattgatttggctattcagggtcttttatggttccatacatattttaggattgttttttctatttctgtgaagaacgtcatttatacgttgatagggattccattgactttgtaaattgctttgggtagaattgttttgttgttttgttttgagacaggatcttgctgtgtcttacaggctggagtacagtggtgcaattacatacagttcactgcagccttgacttctggtctcaggcaatcctcccacctttcagcctccccagtagctgggactataggcgtgtgctaccacgtccagctaatttttgtattttttgtagagacagggtttcaccatgttgcccaggcttaccttgaactcctgggctcaggcagtccttcagtctcggcctcccaaagtgctgggatacaggygtgagttaccacattagccagaattgttactttaacaatattggttcttctaatccatgagcatggagtatcttttcatttttctgtgtcctctttaatttctttcatcagtgttttatactttttctagtagagatattttacttctttggttggattgattcttagatattttctattctttgtagttattgtaagtggggttgctttcttgatttttttttcagattgtttgctgttggygtatataaatgctactgatttttgtatgttgattttgtatcctacaactttactggattcattgatttttttttttttttttgagacggagtctcgccctgtcgcccaggctagagtgcagtggcacaatcttggctcactgcaagctccgcttcccgggttcacgccattctcctgcctcagcctcctgagtagctgggactacaggcgcccgccagcatgcccagctaatttttttttttgtatttttattagagacgtggtttcaccatgttagccaggatggtctcgatctcctgacctggtgatgcgcccacttcggcctcccaaagtgctgggattacaggcatgagccaccacgcccggaccattaatcatttttaacagtttttttggttgagttcctcaggcttttctgagtataagaccatgtcatctgcaagcaaggctaatttgacttcttcctttccaatttggatactctttatttctctctcttgcctcattgctctggacaggacttccagtattacattgaataaaagtggtgaaagtgggcatcctggtcttgctccagatcttagaggaaaggcttttaatatttccacattgagtacagtgttaggtgtgggtttgtaatatatattctttattattttgagggatgttcctttgttgagggtttttatcatgaagtgatgttgaattttatttaatgcttttccagcatctgttgaaacaataataggcttttttgttcatgattatgttaatttgatgtatcatgttcactgatttgcttatgttgaacaatctgcatccctgggatgaattccacttgatcgtggtgaatgatctttctaatgtgatgttgaatttggtttgctagaattttgttgaggatttttgcatctgtgttcatcagggatgttggcctgtagtcttctttttttggttgtgtccttgtctggttttggtatcagggtaatgctggtctcatagaatgagtttgaaagtattccttctgcttcaattttgtttgaagagtttgagtagaattggtattagttctttatatgtttgatggaatttaggaatgaagccattaggtcctgggctcttctttgatgggagactgttatggcttcagtctccttactcattattggtgtattaaggtttctctttctccttgattcaaccttggtaggctgtgtccaggaaattatccatttcttctaggttttccaatttgttggtgtatagttcttcataacagtctctcatatattagcctcttcataatagtctctttgtatttctgtggtctcagttgttttatctcctcttttgtttctggttttatttgtttggatcttctctcttttttccagcctagctaaaggtttgttagttaattttgtttgtctttttaaaaaaaacaacctttcattttgttgatcttctgtattggtttttagtctcaatttcatttatttctgatttgatcgctactatttatttccttccactaattttgggtttgttttgttctttttctagttccttcaggtataccattaggttgtttatttgaagtctttctactttttgacataggtgtttattgttataaacttccttcttagtaccacttttgctgtatcccataggtttgggtatgttgtgttttcatttcctttggtttcaagaaatttttaaatttccttcttaatttctttattgacccattggtcattcaggagaatgttgtttaattttcatgtgtttgtgtatttttaagcttccttttgttattaatttctagttttattccattgtggccagagaagatacttggtatgatttctacttacttaaatttggtgagacttgttttttgtctcagatatgatttgtttcggagaatgttccatatgctgatgaaaagaatgtgttttctgcagccatgggtaaaatgttccataaatgttgattaggcctgtttgtgtactgtgtagcttaactccagtgttctttcttgattttctgtctggatgttctgtccattactgaaaatggggtgttgaagtcccctactattactgtattgcagtctgtctctccttttaaatgtattatttgctttatgcactcagatgctctggtgttgcatgcatagatatttataattgttatatcctcttgctgaattgacccttttatcaatacatagtgaccctctttgtttctttttacagtcttgatagtctgttttatctgatacaaatatagctactcctgcttttgtttccagttgcatggaatatcttttttcagcctttcactttcagtctgtgtgtggctttataggcgaagtaagtttcttataggcagcatatagtttaactcttgcttctttatctgtttagacagaattcattctgccttgtaattagagaattgagtccatttgcattcagtgttactgttgccaagtaaacttactactgtcatttcattgcttgttttctgttgttttagaactccttccttttttctttttcttactgtcttcctttgtgattaagagattttctctggtagtatgttttaattcattgctttttagttatagtgaatctgttataggtttttgcattgtggtaaccatgagactacaaaaacatcttaattacaaaacaaagaatagaaattttttttaaaaaccctctttttttttcctcaggtcccgctttattacctaatacaagtccaacctctggaacattcaaattcactgttgcaaagtttaattaaaaacacaatttacaaatatttaatatattctaaaaagcgtttctaagttaagaatgaaaaagtatgtacataatatataatcaaatacaggtggcctcaacttccaccaggtccacattcagcaacattcgtctttttaggttcttcagtatcttctgtcaaatccacagagttgttttccatgacgggggaaggaatggaaatccccattgcttttcaaactccgtatgtgcttatgatatcacctgtagttacttgctgtgcaagttctttaagattattggtcacttgttcagtgagatgcatttctctgtatgagggacccaagagacagatcatgttgggagggggtctggtgttgaaacattcattctgggcttcctggagctagctccctgagcaatctggtggtctcatcaagtttcttctggaatatttcagcttcctcagaatcaaaaactttaaccggaacgccaaagtttgttactgctttcagcgctatgagcctgtcttgaagtattggagtccagacatcctggtggctctacttctgtaatctccatttcttttgctgtgtcaggtgtcctagtatggccttccatcttcaggcagtgacatctaaatctcttgtagggtcctggaatgccctccttttgttaaaacatccagtaaactatctgccatcacagatggataatcttggcacgtggccaaaaactcatggctgctgagatcgcttggaagatctgtgtcttccccataggttgaatagattaaatcagaatcattcttgttgatatttgcatatgtggagtcataatgcggtgcataagaactgtagggcccataattcaaatataacactggagtgactttgttcttttgtcctctttgaacccctgcaaagtattcacaccagactgaagtcttccagttgtcattcccagtctcacagggcagtagcctggctctcctacaatgagatccacaggatggagaagtcccaacattgttgttccgtctggttttcttctttccaatttgcactgactgttcacaagccgcctggtcagctttcctccagattccttcacgatgcggtcaagctgctcctgcgctctctctaaattattgcttttaaacttatcttcaagcatgtctttgtctttctttttattttctttgctgggactcttgaaggcgtgtgctttrgcatctccagagtcctctctcttctcggccagcagcctctgtcctccccactctgcgaggtgtctgttctgtcttcctgcttttgagttttctgcaagtcagccatgaagtctatgctctgcttcaggctctgaattctttcatgtctaagaattttcatccccgagtgcaaccgcttctttgcagctttataataaatggtctctggtttattgtaaatcatggcattagtacacattagtttgaaaatatcctttagtttttctatggactggtagtcattgttcttgatcttttctttcatttaaaatccattgggtgtttaatgatcatggagtagccaggagcagtaaaatcagtcacaggaaatgaaagaaagcacttggatcttttctctgcaattgtctcgccagttgattcaaagcttcttgaaggggtggggtatctgttctacttcttcttgtttggctaaagtgcttgtgagaggcttctcaccgggcaagtctaatcccacaggggcgtgacactggaggtctttttctgcctcattctccaccccgtctcaatctcgcttctttttatcctccttaactcttatctgttttctccccttttcttcccctggaacctgcttgtctcctttctttctctttttccactttctgtccttttgtttgtcatgattgttttttgtcttcgaagaggctggagttgtgccccgagctgcccacggagagttcggtgacttcattccctcctgctttgaggaccagcttcaagggsttctctacatactcctggtagaggtgtttgtccgacttgagcttcttgtgcttgtgcttcttgtccatgtccgaccgggcccctgtgctcaccccccgcgccaggcccaggcagtgcggcgctgcttccggtctgggccaggcgagccgagggcgggagcggggcccgcgaggcccctctcgagaagctaaaaaaccctctttcctataactccaccccaccccgccccccacattttgacactatgttgtgttaatttttatgtttttatattgcctatctcttaatgggttgctataagtattactgtttttggtagatttgtcttttggacttcataccaaacagagttacaaatggattgtacactacaaattgcagtaatagagtattctggtttgtttgtgtacttaattttaccagtgggttttatacctttacaagctttctttttgtaagttagtgtttttttctgtctggtggaagaactcccatgtgcatttttttgtaaggtggttctggtggtggtgaattctcttagcttaagtttgtctgggaaagactatgtatttgactgggcacaatggctcacacctataatcctagcactttgggaggcagagatgggaggattgcttgagtccaggagttcaaaaccagcatggtcaacatagcatgattcccatcactacaaaagaagatttaaaaaataaaaagacaaaccaaaaaccctcttttttatatttgaaggatagcattgctcaatactttattcttagatggcatttttttaaagcacgttgaagatggcattccactctttcctggcctttatagtttctcttaagatgtctgttgccagacaagttggagcacttgtatacatcatttacttcttttctcttgctgctttctttgtccttgacctttgagtgtttcattattatataacttgggagtagtcttatttgcatcaaatctatttggtgttgtcttacctttattcctgtacctggatatttatctttttctcaagtttttgggatttttttctgttatttcttgaaataagctttttgcccctttcccttgcttaacaagagccctcactcttaaataccaataaatttcttagattttgtctttagaggtaattttctgtatcttaaaggcagccttcattcctttccattggtttttttcttttttctcctcatgtattttcaaatagcctgtctttgagctcactgacttttttttgtttcatatatcctgctattgagagactttaatgaatttttcagttcaccaaatgtatttctcagttttgatttctgtttgttttctttgtattatttcactcytcttgttaaatttctctaataaatttctgtattacttttctgtgttgtcttgtaggttatttagtttccattgtgctattgagagtatctaatgaatttttctgttcaccaaatgtatttctcaatttcgatttctgtttggttttttttgtattattttgatctccttgctaaatttctctaataaatttcttaattacttttctgctttgccttgtaaaagttactgaatttccttatacctggtattttgaattcttgatcagaaagctcatgtcactgtcttcttagggtcagtcactggttccttgctttgtctgtttgaggtcatggttccctgttttctgttgtttgttgtggatatacatctgtgtctttgcattcaaggattagttatttattctagtcttctctatctggcttgttttggtttttatcgaatatgcttgcttagagattctttgaagtttacctgttaattttctttctttttttttttttcttaaatctgctaggttgctgcctccttttcagcacctaacctctgggtagaggttcatgtccaatgaacctgtgaaatgaacctcttaacagtgtggtgctgctgaacagccactccaacttggcatctcttttggctgagttacatagcagagtttccaggactagggatggtagtcccacctccgacctcttctctttatttctggtggttttcagggattatttctcccttaggtatttccactgctcccagttattaggacagggataggtctcttgccaacaaacccaagatggtggagaagccagttgtccacctcagttatactttttccagtgtagcaactctgagttgggaaagttttctgcatgcttggtgctggacagattgaggggaggggcactgtgattatgaaagtctaatttgctttcttttgctcagagttttttcacttctttgtggccttgggaactgtctcctcatatttgagttcgggatattgctcatgatcgtgtcagcactgtatttgtggttttggtttcctgtggcagtgagtgaagccaggttacttctgtaccaccgttttacaaccagaagtctctgtccattttaaaattttattgtctttttattattgagttgaaagagttgtttgttctagatacaagtcccttatgaaatatatgattcacaacttttttttcattctgtgcattgtcttttcaactttcttttagacaggtaaaagcttaaggtcctttagtattcagctaccataaaatatggttgaataatttactagacttgcatataatgttaattaccaataatattttatttatttgcatttgaaggagcatttaggtatttatgtacaaatttgaccagacagtaagtttgttttgattaacttttgatattgctttaaattgagatgaattttcatgtcataatcagaatttttttttgagactttggtttatttacctttcaattaaaataccacaaaaattaatgtgtgtgaccattctggctaaattatctgaaactaaaaagtgtttgttttacaagccagaattttatttttcactaaggttaataacactaattatttttatgacgtttagtctgaaaggtgcacattttcttggagatttgtgcttgaaactactgttagaagctttgttttttaagactgagctttttagaaatagttgtaccatggtgtgtgcctttgagcagtacccatatagtttcatagttattgaaaatcaagggaattgttgatttactttctataacaataattgcagattaaattgcttatgaactttggatacaacatttcatcagatttctgacatattaatcataaaagaatcatattaatcatcaaactactgttgttcagtttggaagttggcccttaacccatttatgcctagtgttccattattgggctgctaagcttgtgggagttatttatatcctactgctcagggtcatcaccaaagtctgatttttcacacacaaaaaattgcaacctctggcataaatgggttaattgattcccttctagttccgttccataaaggggagatgtgaggacattatacatatcttcattgtttataaggagaaagaaaatagtttataaggagaaagtaagatttaaatccatcaaattttcagctagactcagttgaaagccttcttagaggccacccaatttgaaaaagacatcctgtgcatcagttttacagtaacaaattctcggttttctgacatcaactgtgggtgttctacaattgaattcaattctgacactaactactactaatgtataccctacagggtaagggttctgtccgatagtactgctcacttcagacaccagccacaaatggagtccctaggctccctgcacttctgccctacctgaggctatccaggagcccccagctaccagtcatctcattggtacacatgtaaacacttaacacttaaaakaatccaaacgttttaggagctgtgtaccaggaagagggacaaagaccaaatatatatttcttcttatatcatagtatcataccccctcttgtaaatttttcattttagttattgaacttttcaattgtggaatttctatttggttctttttttataatttctctctcttcattgatattctctatttggtaagatgttggtctcatactctcctttaactctcttgacatgtttcttttagttttttgaaatagctggcttaaaatctttgtccagtaagtccaacaccttggcttcttcatgaacagtttctgttgtctgcttttatatatatgtgtgcatatatatatatatatggtgccatatttgcctgtttgtgtgttttataattttatttttgttgaaaaccagacattttaaattatgtagcagttctcaagttagattcctctctacccacccagtttatttttgttgttgctgcagtttatttcttcagtgattttcatgggcttattttgtatagtctctattcttttttcttttttgagatggagtcccactctgtcgcccaggctggagtgcagtggcgcaatctccgctcactgcaagctccgcctgccgggttcgtgccattcttctgcctcagcctcccgaggagctgggactacaggtgcccgccaccacacccggctaatttttttttgtatttttagtagagacggggtttccatgttcgccaggatggtcttgatctcctgacctcgtaatctgcccgcctcggcctcccaaaacgctgggattacaggcatgagccaccgcgcccggcagtctctatttgaaatctctgctcagctagcatagtggtcagttaatggttgaccagagatttctttaaatgcctcttttctcagcttttgctgaggggctctgtgagtatgttggggcagagcctcaagatcaaccagaggcaaaatattagtcttcttagatctttcctgggcatgtacatagccctacacatgcttatggccttctaaattcccttaactgtatcaaagcttttccaagcccccggtggacatttcattcctgtttgtacttttgaattttttggtcagcctcttgttagacccaactggtaaaatttctccaggcagctacagcaattaaataattgctgttgattgttttccacaaagaccctgccgcatatagggctcttcacatagtgtgagcccttcttcaaatcaaataaaggcaagtgctgggaatggagtgttgttcagcaagctgccagacaagtccaatagtggcagttttctgagggtagggctttggaggagctccaaatgggttccggctcctccagtggctgcctggctgctggtttttacagctgctatggatgcaaggctttgattttcaagactgttttgaagctgcagagggagagatcagattagaacaagttaaaatgccacaaagcttgctgttttagcattcatctggtgttcttgaataaatacgccttgaattgttgcaaacctttaatttccagagttctgaaaaagttgcttttgacagtttttgccagtgttcttgttgcttttatggaggaacagatattgaaaggtccttactcagcaattttgtaaatgcctcttttcagtcctatatacttttatctacatcctgccaccaatctctgatccagcctctcgttacttgcctatctcttatatttccactggatccttggaacactggttccatggctaatatgtttatattatcaaattttcactattagcttccctttcttgcctggtagccctctcagggctctgtctgtcacatttcacataaatcaaaatatttagtgcctctcttaaatatcggctcaggattcttgcctaggtcccttctcttgtattgggtattggatattttccctgagaaatcttacccarttgttgctcatactggcaaatctgtcttcttctctagctcagatctctttcttaagctccatatctgtatgtgtttcatttaaatatccatttagaaattctatagacatgtaaaattgtataaatgcaaaacagaagtcaacccgcccctcttttacagttttctttgagtgacattatcatccgtccagttgcctaagccaaaaataagagtcatctttgattccttctgccttatcctactctcaaattccagttaccatagcctcttgattctactccctaaatccttgaccttttctccacctctactgacatctcgactgaattcctccagcagcctcctaaacagattttcctttctgtagttctgttgctagtgtccccacaatgtgtccacagggaactttataaaatgygaatctgtacaggtcattagtacatgcatgtgcgcacacacacaaaaacacagactttctctcwcacacacacacactgtttytctctctctcatactctttttctttctctccttctcatactctttttcttttctctccactgcactccttgtttcatcccacctacacttttcctgttcccagatgccatgtttctgttgctgtcaggtttctgtacatactgaaaacattcttcctcatttgcttggctaaatctgattcatagttcagatatcagctcaaatgtcacttcctctggtaagccttcctagattctcacaagtctgagttagatacttgtggatatagccataggaytttgtgcttctgagcacctgtcataccatactgtaattgcctatttattcatcattttctccaagtagactataaagttagtggctttatagtcatgaagttagtggctgtgttataagcagcctatggtttagcaccraacattgggtctccacaaattacttgagtagagaaattatgactacatttatgaataaaggaaccaactataccctgcactgtatatacaaagacacattagacaaatgtatgaataaaatagacttttgaaacatctggtatttcagcgatatagtttctcttagtaatttgggattaatcatttaaagccaatgattctagataaagttctgtatattttatttgaagaaataaaatggcataaataaatttgaaactccaaagtattatttacaaataaaaggagaaaatgaaaggaaactgttatatattatgctttgttttgccttttaagtttctgggttatttaaaagtaggtaaattctttcttcctcccttttgtttacacaagttgtatatttagtggggggaaatatatatatatatatatatacgtatatatatatatatgtatatatatatatgtatatatatatatatgtgtatatatatatatatgtgtatatatatatatatgtgtatatatatatatatgtgtatatatatataaaagaatcacccatatatatataaaagaatcactcatcacctggtctcatgtactatgttattttataactgattttcatctgactataaagacatcataaacattttcttatactaggaaatacacttaaacatcttctgttgctgaggttagcaaactttttctataaagaacaagaaagcacatattttaggttttgagggttgtagggtgtctattgcaactgctcaactctgtctatagcataagcagccatagaccattctaaatggctgtggtgtattcttataaaactttatttagaaaatcaggcaggaagcaggatttgctacagagccacagagctattatacagatataacataattttacttatttccctatttttggaaatttagattatcttcatttttttcactattgttagtcatacctcacatcttagtatctgaatcttcgtgtacatttttaagtttttctgtaagataaattctgaaaatctaatttccaaggctaagagtacatccttacaacttttctttttccatgagaatagataatttaacactttctgtgactgagttttgtttagttcgttttgtggttttgtggagatgggaaaagaaagatggagtaaaatttagaaagacagaagcaaagaaagactggaaggaaacagatggagttaatgatagtgatataaaacttgagatgttccaggaagaagaaaatatgaaaatttttgtaaacgtaaatgttcttgctcacataccaagtttttctgttttatagctctgtcgaggtttgtttaaaaccttgtttagattgaatttgagatttgggagatgggatatgcaaattacacaatgagtatttcttattctcctaagatactcttaggctatcactattttgattttgattacccatcagctttaaaaaaaaaaaaacttttctattccagatgatgatggagaaagaagtctaattaattagagcagagattggcaaactactatccatgggccaaatccctcatgttgcgtgtttttgtaaatgaagttttattgtaacacggtcatgcccgttcacttaagtattgcatacagctgcttccaggctacaacagcagagttatgtaattgtgtcagatacagcatgtcccataaagcctaaaatatttactgtcaccttccagaaaaagttttcagacccccaaattagaggaatggtacatttagtctttgtgtttatcgaaactgaatctacaaaaatacccsaagtaattttactacaaataggctaacaagattttagatgggcaatttagagaccaaatcaagacacctaaattgcagaataaaatgttgaaaaatgacaataagaaatgttgggatataaaggacttaatgttttgttttgtttttgttttttttgagatggagtctcgctctgtctcccaggctggagtgcattggcgcgatcttggctcactgcaacctccgcctcccgggttcrcgccattctcctgcctcagcctcccgagtgtctgggactacaggcacctggctaatttttttgtgtttttagtggagaggggtttcaccatgttggccaggatggtcttgatctcctgacctcgtgatctacctgcctcagcccccaaagtgctgggattacaggcgtgagccaccatgcccagccaaggacttaatgtttagtataattctgggttccgtgaaagatgaaattcagagcacccacatactccttgttgaagaggcatctgccttttgttatgtacttacacacaatgggaagtagccagctccacagagttttgccatggtgtcaagttttggtggcgctttttaaaataacttttgcagcttctgaattagggaacatcaatcaaattggaaaattcaaactctgaaatttttgaaacctgtgtacatgggcttgttcagccacagacgatcttatttctcttggacttgttgtctaacttcagtttgccatgatagtaagagggaaccttcagaggaggggaaggggagttgttgtttaaagagtatgaagtttcarctagacatgatgaataagttctggacatcagttgtactgcatggtgactgtagttgataatgtattatatacttgaaaatcgctaagagattagattttaaatgctcttaccacaaaataataagtatgtgaagtgatggatatgttagctcgacttaatcatttcatggtgtatacatatcaaagtttcatgttgtataccatatatatgtacaatttttatgtatcagtttacgttaatagagttgaaggggtagggatattttctttccttaaatctatatgttacctagaaatacctaataccctgaatcctttaagaatccaaaatggccgggcgcggtggctcacgcctgtaatcccagcactttggaaggccgaggcaggtggatcatgaggtcaggagatcgagaccatcctgattaacacggtgaaaccccgtctctactaaaaaatacaaaaaattagccgggcatggtggcaggcacctgtagtcccagctactccggaggctgaggcaggagaacggcgtgagcccgggaggtggagcttgcagcaagccgagatcgcaacactgcactccagcctgggtgacagagcgagactccatctcaaaaaaaaaaaagagaatccaaaatcatttagtagaaggtttcaaaataccataactttcactaattttataaaaacattcttgaaagcatcctgtatgtggaacttctagaagtatagtggaaaagcgcctggactgaagtcacaagttcttaattagaccactaactagatgttgaaaaaagctgggtttctagtaccagctacctacctctggacttcttttaggagagaagccactaattttaatgctaaatccactgatttgggggcattttctcacaatttaacctaatcctaactaacgggagttgtagtagactggtttatctctaaagactttacagctctgtatctccacacatttgtgtgaggtagagctagcggagggaaataaatagaagtggtctgtatcttgtcaagataaagcaaattacagaactacaaattttatggtaataaaagacatactatttccaaaaagcagttgactctcgtgttcatttttacacatttctctttccttatttaacttttgagttttttattttatcctgtttctttcattttctcttatatcattcttattctatattagagctgttagtgctatgccaagaattccttgtgttgtggttgttcttcaggaggttgttcttgaggaagggtgatgagtaaggcactgagccatctctagctgcaggagcactggagagagaggtacgtctgtgttgatagagtgactacagatttggatggcacttcaggtcattcagggtaggaaagtgcaatatgytggggatccttctcaaccccacacacccatgtcctcctctaaccctgatggtagttacattaattgtatcagagtccctcttttttcgtggatgtgtttcttcagatattcaaaggctttcacatcattcctttgtccttaagcagttattctgttttgttgtgggttctttaattcatttaataaatgtttgttaagcacataccatgtgttttttgttgagttctggggacatagtgttcatttgaacacaataacacctccctaagagtttttgccatgaaatgggaaagttagataaggaaacaggcaattataataaaaaataaaaactgaggaattaaggaagccaacattgactttttaaaaacattgaaccagcatggttaaatggaaagagtattggttttaggttttgttgagctggattctattgcttaatagttatgtgactttgggaacgttaacctccatcaatactgcaagattatcctaattagaaatacataggtaaagcacttaccctattacctgctgagtaaatcatttcttcctttttcctaaattgtacatcccaaaattgttgtagttctgaagcctataaatagaaaggtaattcttctggtccctacttcacaggagatgtgaaaagtggatataaaattatttttaagacactttgtgaacactctgaccataaagaaactattaatacagtccaattttgtaattgtttcttgtaaaatttacccaaaattccattattgagatatattgactataaaacaaataccttaggaatttacagtattgcttgtaaaatatggcattgcactagtaattctgtaatcactggtcttgcatttgtcaacttaagaggaaataattcactgtcttcccacctccctcaacctgtagtttagcataccagttactcttagtcaaattgtggtttttgtccagaagggtaatggttataacatttattcatgagatatttaaaaagcattcaagtaagtcatcagtaaattgattaaatctattaagactcattaatatagtttgaatgttctctatttgaagaattgaaaaactataaaatttaggaattaataccatgttgtatttagaaatgaaatagccaaactggaaactgaaatttgtataacagcaacacaatttgtaatttttcaaaagcacgacagttggtagttcaaatcagaatattacagttcggagaatcagatcttgtttcattatgtgactgatctttctaaatttgctctgctttatgtaataactgttccagatttatttttctgtcgtaagtgtaccttaaaaataagagaagctaatgttattctttataagaaatgtaaacattaagatatcaacacagtgtagaactactttctatatattttatataaatcattctaaatcataaatgggaaatagtgatcaaacaaatatttacattcctaccaaaagaaaaggcccagtgaagcagagtgaggagggataaggggtggggaagaagcctgaggcttgtgttggcaggaacagcacagtgagagcgggtgacagcatgagaaaaatggatgtgttcttccatcactgctgttctcctctctgtttggattagacaaatggcacatacccaaggggaactagggacaatgctctgaggacagtaaccacttccatacagccctgccagattcatgagagcaatggtgcatctgctttttgttgccattgttgttacttaatcttgtcatggacagattatcgtttctgtggcatttcttttgtgggttctcactcaaattactttctttatcatggctgtgctggattgtctgttggcaagtcagcaccatttaccccttctgcaccttgactgatatattggttttctgagaagtgtgcatgttggccttttgtctccccttgttccataccaccaaatataaaatttagataccctgaaatccattatagataattgatctgtagagattttgttttgatttggttttgtctttttttttttccttttaatggcaaaatttcatttttaccctccttcccactgcaatagcaaaattctgcacactggaactgcttttacattcccctttctcccagagctgcctctcttttagggaaggctcttgtttgaaaacattaatgccaagacaggcattcattgatttatttagtaaactttttgtgaatttttgtaaccttcataacactgtgcttataaccttcataacactggtatttatagatgattcagtgaagtacacaagactagttggattatgagggttaaatagtgaaaatactttcatcaaaactactgtttaagtcatactgttatacaatgcttgtgtttacacaatgtttccaaatgttctgttgtaaaatgtagttaatactggttactttgaactatgggttaatttttttcaactcttcccttagataagctgtgttgccattagaacatttaaatgagtttcattctgagttttgtattgttaaactgtgtctggaaactaaactttataatgtgttacattttaggtcagaagacatgtcttcatctacatggcatctttccttacctctatgtgccatacgatggttatggacagcagccagaaagctatctttctcagatggcattcagtatcgacagagcacttaatgtggctttaggcaatccatcttccactgctcagcatgtgttcaaagtgtcattagtatcaggaatgtaagtatatgataatatattttataatttctgtttatgttgctattctatttagaggaaaacatactcagttgataaactctatttcttttacttctagtctaatggaactgtagtgaattccttgctgtaactttttaacatgaatttttatggcaatgaaaggtagagagtcaacagtgatttttgttgtttcctttcccatttctctgcttcctgtaactatagaaattcattagtaattcatatagtaatttattcagcaaatatttcttaaatactttttatgtgctaagcactgttctaggcgtttgggatatactgctggacaaaacaaagagccctgcccatgtggaagttacattctactacgggaaacagataataaccaataaatacaacattaaattaatttatttgctatatgataattagtcgtgtggaaggaaagaatctatacaagcaggataagaaggaatagtagtgtggggtaaggaagtagactagtgacaattttagagtaatcagggaatgtgtcattgacaaagtaacaacatctgagcaaagacctgaaggaggtaagggagtaggaacagcatggaagccaggtgactagagtggaagagtaaaggagagttggactaaatgagataagagagagatgagagggtagagactgtgaggaccaatgattctcaaagtgtggtttccatactttggtttcctagtatcacctactatcattagctttacctagttttacagccatgagaatatacctctcagatctccaaatacacagagaatgagtgaatggccccagctactatacactcaattccaatctgtcactccacatgagctgctttccataggctactcttaccctatgactgagcatggcaaagatactaaagcagatctgtaaaacatccctctgtccacttgagatgagactggtatctaggtctggtggctatgccggcttcttctggctgccttctcattttctctcacatttggcatttacttcttggaggactgggactgacacacctgggaacttggtagaactacattcttggggcccagcaatttgtgttttaataaagcctttctgatgattcttatgcatgcttaagtttgttaatcactcagtaggctaatgtaaggactttgacttttactgtaagttattacatgattttgagcagccaagatctggcttaaactggaaaggattacttaagcaactgtattaataatagattgtagggggacgagaataagagcagggagagaattaggacattaatctgggtaagaaaatatggtggcttgatattaaggtagaaaagaccaaggaattaaaattaaaacaaaaaagaaaatagtgtggcttgaactagggtggtagcagggaagtaatcatcagcttctggatctattctgaaggttgagttaatgtattagctttgctttgtgtttgggtaaggattgtgagagaggaatcaaggttgactgcaaaagtttaagggtgttctgctaggaagacggaaggtagaggtagagtcaactgacaggaaagatctggagctcatacaggaacatttgagttgttttatgtccatatgaaatccaagtggagaccttaaatctctgcttccaccttaatctaggctttcctctggaccatgatagtatcattttaattgaatttccttctatttttatctcattccagagcagcagaagtactcttatactgtaaatttaaaatcatttaaaaattcttgagtggcttcatattgttaatagaatacaatttaaacttctagccataacctatgtgacctcaccccatctacctctgaaactctgctttctgtattccattcagaaacagtgactttctctcagttcctctgctatccaagttgtttctcacctaagttctttgtatgtacaattttctttccttgagtgttctacccttccccaatcctccagatcattgacctcttcagagaagttttctttgactatcccacgtaaaataaggtattttaagtagggcattattattattactgtttttattattctgtatctcagcccattatttgttttctttagcacttaatacagtttgcaggtattttaatttttatttatttacttaatttttatgtgtttcttccactagcatgtaaactgcatgctagtgcactagcatgtatgagatgactcaataactgtttggttggataaatgaatgaggtgaaagtttacactcatcctataacaggagcaattatgttagggataattatctactttatcttttagttttgtttattcttgatagtttctaataactttcctatatatatcctcatttcaaagttaagtctccaaacagcccagtgaaatacatagtcacttatcttcctgtatttttgtatttgttaaagacattgccacatttttgagagtagttgagttacagatctggatacatggggcaacagatgagctgctcactctaatttttcattgcagttttcttttttcttctaattttttggtcattttcttccctagatcccctttttccttcccattcattctaccttctctaattcctttactccttcaatttttcctacttaagttacataaagttgcatctagctaccaaattaacatttacatgaggtttaactctattctttttagactatcactatcctgaggctgagttaagagataggatcatgaccttgggctaatttctgggattccttctcactcatgattttagagaatcttctataaagagattctcaatccatcaaaattaattaggtgagatttttcgctatccacactcattttccttcctattgatatacttaaaaaactaattacgagatataattttttaaacatgaaaacatctgctttcatactcctccattctacttttttcccccaaagagtctccctgatgaggaattcttttggcaaaaccattcatctggctgaagataacccatgtttccagacaactacctttgtatatatgaaaaataccatagcaggaaagggctacagttaaggttgaatttgccaatgagagagaatgatatcatttatgtaatatgtctttctttaaccaattcttcatggcaacaaaatagggtatacagcagcaaactagacgggaagtggtattataaaaagttaagaaaagggtgaagagtaagagggagggatggtcaggtgagacttttctgagaaggtaaattaagcagagttctgaatgaagattaaacaagccatgcaaaagtccagagcggagctttccacttgagggatcgagttagagggtctgaaatgtttagagtggttggaggagaaggaagaatggtatgacttgagattggagtgagaggcaaggatgagatgaggaaccctttagaccttggtaaatagttgtttttttttttttttaacagaaattactttataacaataatacagatggcttaaaacaactaaaaaattatacccaaaataatgtctctgctaccaaattagtcctttatttgatgtccactacactattagacatcacagagaggtgatgtcctatgagagtaaattctattatctgctgcctgtcataagggaacaatgtttttaaataaagagtgattgggtttatccacctaaagatttaaccgtgtattaacagaccacttttcagccaatacaaagccttttatttcattcacaaatttacgcctgtttatgtattgtttctaattacatcatccttgaaaatagtgttctgtatatcagaggttgtagtgtagtttcagatcctcctgaaatgatgtgagagttcagcttatttcatcttgcaccgaggatttctcttcctgttatatagccttttgcttccccctttcctcattccagctgataccccgagaaaaaactcagccataacatgattatgttgcttaagtaagtccatggtctttttcagtctcttaagttcctgtctacacagttttttcacaggatgcacttgatatggttgtgtgttacaggtttattcatatcagctactgaaatacatgctgtgtgtacatataataggtacattgtctctgcttattgaacttataaaataataataaacagctgaataaggaaagtaatgtaagtgttgttaagtaaaggactttgttgaagaagaacttcagtttttaacaaaaaaatgggagccagaagaaggcggctgaaaggtctgtttctctcatatgtggagtaaagcaaacaaaaatatgttttcttatatgtggagtaaagaaaacaaaaagccacttaaagagtcttgatgtttgagattaaggggtggatggtttgttcttcctttttgtccatagttttttcagagtgataatttttaattcccatcgtcagtaattaaagaaagtgatattttttacactttttaaaaaagcttcagtatttcatgttaacctgtgctaggtttaactgaaaggtttgggattttttarttgttttttggggggtggataatattaaacgtaagactgaatttggccagctgaatctaattagggcaataagttgcattatttcatctctgaattatgaaaataatttgaaattttttttcttatatttcaggcctttttatggttatcatgagaaggaaagacactttatgaagatctatctttacaatcctacaatggtgaaaaggtacaaagataaatgaaaccaaaatatgaataactatcattgaagtattttaataataaaaaaaatctagaaagaaggcctctatagtttgtagtcttattaaagacagagaccgtaaaatacacatgtacgtgtatagagagagaccagtggcttggactctatgaaggatattttagaggtggaggctcccaactgcttctttcctgttacagattagagagttcgtagaagtaggttaggagagattacggctgccttgtgtgatgttaggcctcttctggccagaccttagttcagcattaagagaaagttgctctttagcttcaaagcaaggggaaatatgtaggagtgagtccagagtgagagggcttttgagatctcagaaacctgttgactgtttactagatgttggtgaaattttatattccaggttttttgttggttttggttttggttgttttttcttccctcagttagtctccctgcctctagcttatcctctcaatcatcctggagggcagggaagggcacatatatggaagattttaatcatcctttcagattcaaaacaaggattttcactatgtatagtgggaagctagggtaaaagtggcctcggaggtgtactgagtattattttttcaggaggtcctctctgctagtaggtactgggttccaaaaagtaacttttttgtaaaacacagattggatgttttcccatagtgaattaaagcactacagggggcacgactgcccagaacatgaggtttaccctggattaaaccatttgagtacttcactgaagcacagctctattcccaatggttattcccttgtaactgaaaactagttttcttacatcctgcccttgatcttacccaaaataacttctgttctgtaccagttcccctctactcatacttcctcatattcgtggagtacaaaagagcaatttctgtggactcttattctctcacacacatacagagtggtaagagagtaaacctcagtcatttttccctttctcgtccacaagttgtgctggagtgggagccatgattaaaagaggcttaagtgttttataaataacctataaacaaattataaatacaatcaatttttttccttgcaaccatagcaaacactaaactgttctcagtaagtttgctttaaattatatagtcagcttatcacaatgccattctaaaattcctgatttattaatggattcattcatttattcatcattatttattcatttattattttttcaagacagtcttgctttgttgcccaggctggagtacgcaatggtgcagtcatagctcactgcaaccccaaactcctgggctccagtgatcttcccacgttagcctcccaaagtgctgggattacaggcctgagccaccataccagacctgtttatgcatgtttaataaatatttgcaaagtacctacattacttgatgytctgtggaagttgatgggcagacatggtgagcaaagtgtgcatggttcatgccctcagggaacttacaacaagctggggagatagagaatacacaggtaacccaaatatataagcaaaaattgtggtactctttggtctgccaaatgaaaacgtcagttctgaattcatccatttattttctctccactaagcctcagtttctgattactgcagaataaaaaaatttaaaaaaaaattacacactggtgccactgtaaattcatggttttcaacttcacccagacccttccctgcgtgctgtatgtctacttttttctagttaattgtctctttactattctctatcctctactcaggccttaccttcttagagaaaacagaacccatcattctagagaggtggttttcaaagtgtgaagtggggatttctgaaaccctttcaggggatttgtatggtcagaattctctttattatactaaaatactaagatctttattatactaagattatactgattttccttttgcactgttttcattgatagtgggttaatctggcaccttgtctcaaatcagggtaatgacatcaactactaatcattgtgttttctaccactaagtactcacctttaaaaaaaaaaaaaagccggtttcacattagaatatccattaggacatggtaaaaattattttattgaattttgacccttggttatatatctttgtaacatttatgtgacaaaatgaaagtaacatgaaaggctattaaattattttctttttcaactccatatctgtgtgaggctagattttctttatatacatcaacaaaagcaatatactgcaacagattgaacagaagctgatgtaataatccagctatcttctgtaaaaacaaggatttgtaaacatgtaaaacaatgtttcttttctcactaagttgttcttgttttgaaaaatatggtttaaaacaatgttatttatgttaacataggagtttattgttactttaaaattagtaggtggggcacggtggctcacacttgtaattccagcactttgggaggccgaggtgggtagatcacgtgaggtcaggagtttgagacaagcctggccagcatgatgaaaccccatctctaccaaaaaatacaaaaattagttgggcttgtggcaagcacctatcgtcttagctattctggaggctaaggtgggagaatcgtttgaaccccagaggtggaggttgcagtgagctgagatcgcaccactgcatttctgttttaatttctaatatggtaaatatcagtagatataaaccacataaacaaaagctctttagtgttctcaataatgttgtttttgttttgttttgttttgttttgttttgttttgttttgttttgtttttaagatggagtctcactgttgcccaggctggggtgcagtggcaccatgtcggctcactgcaacttccgcctcccaggttcaagcaattctcctgcctcagcctcctgagtagctgggattacaggtgcccaccaccatgcctggctaattttttaatatttttagtagagatggggtttcaccatcttggccaggtggtctcaaactcctgacctcaggtgatccgcccacctcaggctcccaaagtgctgggattacaggcgtgagccaccgtgcccagcccctcaataacattttaagaatgaaaggggttctggggccaaaaagtttgagaaccactggaataaagctctcttaaggctttcttaaccttaaattgcatttacatccattctctcctcgctgcctattccgtgaaagaaatttttcctcctcacctctgaggctcaagattcatcttctttgatgttttcaaggatcgcttccatctgtcggctattcccgtctttctttccaattccattttaatattaataaaactttgctaattatacgcacacattcatactcatagaaacacctttctcatttagccattctccttgaaagatttatctatactttgtgtatccaacttcttacctcccattcattgtttgtttgttttgaattggaatcttgccctgttgctcaggctggaggtcaatggcacgatctcagctcactgtaacctcatcctccggggttcatgcaattctcctgcctcagcctyctgagtagttaggattacaggcaccaccaccacgtctgactaatttttttgtatttttagtaaggacagggtttctccatgttggccaggctggtctagaacccctgacctcaagtgatccacctgcctcagcctcccaaagtgctgggattacaagcacaagccactgtgctcggctttcccattcactctttaacttactacaatatggcttctaccccaaccattttactgaaaattgctttcactaatgacctctgtgttgctaaatccaattttaggtccttactttttgacctcatggtgatgcttatggtgccttaaaacaatcctaaatgttagcttctgtgatatataccacctctagtttttctcattccagtgtgatcaatcatatttctgccattttgttggtttacattttaacatctatggttgtttcttagaattctgccttagactttcatctttactctgtatattttctgttccctctacagrcttatttactcccatgggtttgtttggttttaacttttgtttttgtttatctttatgcttttgacttccaaatgtatatgaatagcctcatttctctctagagcttctaaacaatatatcaaaccatctactggatagatggaatagccgagtggttaagagtgagggctcacaaggcagagaaattttgatttgaattttagcccctttgtttttttaagacacaggatcttgctctgttgcccaggatggcatgcagtggcgccatcatacctcactgtaacctggaactcctgggctcaggtggtcctcccacctcagagctcttctatcttttgtgtgatttttaaatctaagataatttctttatttataaaatggagatgatcgtaccacagacttgtaataaacattacttgtaataaagtacgttagcacagtatccaatatatagtgctcagaaatgttagttacctctgctgtgttaataaaatgattattattttctttatgattcatttccaatattattattggatccccactatacctaaatgcccttgtgtctaaattgagtttatccttattccccttccaaaaaatcccaaaccaatttttcttacagttcttcccctttcaaataattgcaccaccactaaccagctgcttaagcaagaaatctaggcatcaccctcagccccttttctgtctcacccttcacatctagttagtcatcaaggcctgatcatttcaccccttatatgtctcctgaatcagtacatttctatgatccttgttatagccaccatccttagtttttccacaacagcctatttactccttacctgtagtcttctgtgttctatagctagtctggtgatgtcacttttctgctattcacctctcagacaaatttcactacctcttcaaatgtcttaacaggctcttcatgctcttacttctcattacttctctatccctgcctctgacactaggtcacagtcttactcagtggtttcagttcctgaataagccgtgttttctcgtgaccctttacatgtgcagttttatttacgtgaatactcttccctctcttcagagaaaaaagtgcctctagttcatcatttagtctcttgcttagagagtttctctaaggttttgcagaaaccacctctgtacctctatctgtttagtatcttttctagatgtttaatgtatttccccacatagtacttaactatgctgtatataattgtctgttgtttgtattcgtcatcatgaagggaaaaaaaatactcaggaaagaaaaatatcaaaatggcaatacctctgagtggtgggattataagtaatgatttcttttccttttttgaatattaatcttttcaaaattatttgttatttttaaaagaaaaattttattttaaaaaccttttaatttttaaatatagttagtatcaaattggtttaagacaaaatattcttcatccatgcagttttttgttattcagaacatgttgcttacttgaaaacttgattgaaacttttaatttctaacaaaatacaaatttccggtaaaattgagatggaaattttgtgtgctaataagtgctttgttctgtatatttctataatcattgtttcatttaacattttagggaacataattttatgataaaactttttttttctaatttaggatatgtgaacttttgcaaagcggagccataatgaataaattttaccagcctcatgaagcgcatattccctacctcctacagctcttcattgactacaatctttatggcatgaatttaataaatctggctgctgtcaagttccgaaaagcaagaaggaaaagtaaggttaattttcagtcaaattaaatttttgtcaaattaaagttttgaaacaagtgttatatagtcagtgatttataaaataatatatatttagaaaataaatgttgagtgactaaagaatgaaaagaaatacatgcaaagtgggattagagattgtcaggaaaagcatctcagaaaaaattttttttggtaacagctttattgagttataatttatatccgtttaaagaggacagtttgatggtttttagtatacaggctacctaaaaggtattgtgggtttagttctagaccactgcaaaagtgaaccctttacactgcttagcaattgatatgtattgtgattcttttttttttttaacctcagaccttaatgttactttttatattttaggaatagtatatgatacacaattctagaaatccctggagttgttagagccttgttactttagtccagcacttccctgatggtgtgaatagctgtaggttagtggacgtgttggtctctcagcattccagacagattcctaagtcccttgagccatcacctccaccactgaacatccttgtccattttatctcagtgggctgtgcaagcattgttatttttctttgtgtgacatgacctgaaaaatattgcaggcagagctttctctgggtgaatttgctatttctttaaagttctttatttatagagccgttgatattatgaacaaaacagaataacatggctatttgaataagtgatttcctctcaaaacaaatttawttttccttttacatttgtagctttctgaggtgaaaagtaggagatcccagattttttactgttggaatggaaagttacagaccagagcagcctagagcatcttgaatggtgaatcctttctggaaggttttcaatatattttgcccagatccatcagtggaatcactgtcagtgacagctatagccttatgaaatgcacttcttaaataataagacttgaaagttgaaattactctttgacccatgggctgcagaacggatgttgtgttagcaggcagggaaccaacattagtcgtcttgtacatctccatcagacctgttgggtgaccaggtgcattgttagtgagcagaaatagtttgaaaggaatcttttttctgagcagtagttctcaaaaatgggcttaaaatattcagtcaaccatgctgcaactgttatactgtcatccatgctwttttgatccacttatagaacacaggcagagtagatttagcataattcttaagggccctaggattttcagaatggcaaatgagcattggcttcaacttcaagttaccagcagcattaaataaccctaccaagagagtcctttgaagctttgaaatcaggcattgactgctctcaggttgttttcatctacattgcaaatctgttatttagtgtatccaccttcatcagttatcttagctaggtcttccagagaacttgctgcagcttctacatcagcccctgctgtttcacctatctgcagtaaggctatttcactttctcatcgtttgtgtgttccattggagtagcactgttaatttccttcaagaacttttcctttgcattcactacttggctaactggcacaagagacctagcttttggcttattttggcttctgacatgccttccttggtaagcttaatcatttttagtttttgatttaaagtgagagacatgtgactcttcctttcatttgaacatttagaggccattgtagggttactaatttgcctaatttcaatatcgtagtgtctcagggaataggaaggtgctaggaaagaaagaaacgggaatggccagtcagtggagcagttggaacacactcaagtttgctgtcttttatgggcacggtttattgtggtacctgaaaacaattaacaatagtaacatcagagatcactgttcacaggtttgaaatattgcaagaggaaccaaaatgtgacagagagacacaaaatgaacacatgctcttgtaaaaatggcaccaatagatttgctcaatgcagagttgccacaaatgttcaatatgtaaaaattttaatatctgcaaaatgcaataaagcaaagcacaatttaatggggtattcctgtatttggagttatgcaaccatcaccacaaattcakaacattttcatcacctccgaaagaaatcctatgacctgtagcagtcacccccaagcttcccatgtttcccactcctgagcaaccttactaatctacttttggtctctgtatatttgcccatactgcacatttaatgtaagtggaatcatataatatgtggggttttttcctacttagcataatgttttcacggttcatcagtgttgtagcttatatcagtacttcgtttctttttatggccaaataatactctgttatgtgaatacactacattttatttattcctatcccagttaatggatattttggctattatgaacaatgctgctgtgaacatccatttatgaatttttgtgtagctatatattttcatttctcttggacacctacctgggagtagaatttctgtgtcaagtgttttagcatcttttgccttttcttctcattgaattccttcccttctacttctcttaaaatgaaactgacacttccagtcctaatatcctttctaactgccataattttttttcttttccatcactgtcaaccttcttgaagcagaggttagcattttttgtctcttagttcacttttggtttaactcctcgcatttcttctaccatacccaaactatgctctgaaaagtcaccagggagggtttctttttgttgccgtgaatagtgggctaggttagtgggatcagcccttctgctaaaaacaatttaagggccaggcaacattgaaataaaaaaatttaaatacattgaagagtttatgaacaataaagaagtgcaggccaaaagggaatagaacgcttaaagcaacttttgacctgagggcatttactaatcttggaaaattaagaaccttctttgggaaggccatgctgggtgagagagatgaaaagcagaagtgggtcctgcccagcaggtgggagccctccgcaggttaaggtagggcctcaaatgcatattctcttaaggtgagcacagactgggaaatggaacatacttcagacatttttttttcagtatagtttgaatctcctgggactaaaagagattcccaaatccagagcttgatctaaggtggtgctggtctagtaatagactcagatctgacagaagcagcaagtgcaaatcctccctagaggatattatttttattttttattatttttttctttgtaagacagggttttgctgtcaccagactggagtgcaatagtgtgaacatggctcactgcaacctccacctcctgggctcaagccatcctcccacctcagtctcccaagtaactgggactacaggtgcatgccaccgcacctagctaatttgggtattttttttgtagagatagggtttcgccatgttgctcaggctggtctcagaactcctaggcttaagcgatccacccacctcagcctcccaaagtgctgggattacaggcatgagccaccatgcctggcctccagaatctttatcaaataatgatgctatatgcaatgctctaatgtcatgttatattcactaatagttttatttgttttgtctctccagcatgctagtaattttcttatgtggaacaacttatgcatttaaactttttttcagaagagaatgttttgtggtgacaacttgttaaaattacatttttattttaaatacacaaatattgaagcattgaaactagcatgtgcctcccttttagagcagagtaattcatttgttcataactaattcttctggataataacctcaggtttagatgacaacttatagtttactaaatgccagtttttcttatcttctctgtatcttagagtagtataaaattcccacagtaaaccaaagtatgtgagcaaataacttgcccttggtccttagaattcccaagagggaatcatataatgaaggatgaagtaggcttggctttttctccataatgactgaaaggaaaggaaggaagagggaagatagaagaaaagcaggacagagacaactgtccaccaatttctcccatctttgtgaaggttgtattatttcatgtccaggagataatccttttttaaagtatggagacttccaaaagttgaggtttagggagttcattacccactttygagacttactataaagcaacagttatcaagacagcatggtattggcaaaaagataaacacatataccaatggaacagaatagagtccagaaatagacctatatttgaaataatccataattggcccatatagtcaacttaactttgacaaagatataatggtaattcaatggagaaagcatagccttttcaacaaatagtgctgggataattggatgtccatatgccagaaaataaaaataaaagaacatatttttgtatgttcttcacaccttatacgtcacatacttcacaccttaaataataattaaaatacttcacaaacttaaatgtaaaatatgaacctatcaaacttctagcagaaaataagggaaaatgtacccagtcttgggtttggcaatgaagttttagatatgacaccaaaagcatgatccatgaaaagagaaattaatgttagattttgtcaaaattaaaaacttttactttgtgaaaaactgttaaaaaatgaaaagacaagtcatggactgggagaaaatgtttgcaaattacaatctgatagaggacttgtgtataaaatatataagaattcttaaaaatcaacaataagaaagcaaacagtccaattaaaaatggtcaaaagacctaaagaagatataaggatggcaaacacatgaaaagatgatattcaacattatatgtcgttagggaaatacagattaaaactacaaagggctaccactatatacctattagaatgactacaattcgcaagactaacaataacaaatgttgaccaagaggtggaacagcagcgctgacattctttgctggtgggaatgcaaaataatatagtcactttggaagacagatagtttctcagaacactaaacatagacttagagtgcgacccrgtgatggcactcctaggtatgtttacctaagtgatttaggtccacccaaacctgtatgcaaatgtttatagcaactttattcataactgccaaaaatgtaaagcaaccgagatgtccactcaacaggggaatggataaactttgataacatttagtgataaaaaggaacaaacaattgattcatataacatggatgaatctttaaagcattttactaagtgaaagaagccagaccgaaaaggatacaaactgtgtgacttcattcacatgacattctggaaaaggcaaaactatagaagtagaaaatggactattagttgttagggtttaggagagagggaagtattgactgcaaaggggatgtacaggggaactttttaagagtgaaggaattattctgtacagtcctgggttggtggttacatgactattcattcatcaaactctataaccacgtgatgtaccttaaccaagtgatgaggtttaatgtcaccagttattatgtcatgtgggtgtcatgtggcccctcatgtgatgtgataacaaaggtacttcgcctgtgtgatattcttgccaaaaactcgtaaccccagtctactcatgagaaaaacatcagacaaacccaaattgggagttgtcctacaggttatctcatcagttctcatgactgcaaaggtcatgaaaagcaaggaaagacagataaatagaccagaggagactggaaagacatggcaactgaatgcagtgtggtgtcctagattggatcctggaacagaaagaggacattagtggaaaaactggtgacattcaaataaaaggttttgtttagttaatagtaatcttccagtgtcagtttctttgttttgacagatataccatgataatatgataacaatgagggaaaccaggtgtctggtatatggaaactctctgtggtacccttggaacttggaacttttctgtaaatctaaagttattaaaaaataaaaaggttactggggaaaataataagttagttatcattgtcaagtataaccaagaatttaagacagattgaggaatggaagagtttctagagtatatacattagatattatagaaagaggagataattttcataattagttttttccagtaggtgaaaaagcacaagaatagtttgaattagcaaatatacagaaaccatttattttatttataaaagttagattattggaatggtactcagaagggtttttttcagaatatcggaagtgtttacagatttgaaggcatcatgtgaaatttattaggttgttgcaaaagtaattgcagcttttgctgttactttcaatggcaraaatcacaattagttttggtagaaaggaagttaaaaacagggaaattgcagtatgataaaaaaatttacatcttcttttatcatatagttagccctcaggtttttgtttttgtttagtatgagataaaagattatactgaaatcatgtacaaaatcagtgaataattttttttattttattttatcatgttatctcaggcacattacagtttaacttgacagtaaacttcttgtaagtaaatatatgtattacatgtatgcataacttcattttacctgataaattaatataatacatgttaatggagttttacttttgaaagtaaaatacattcaaaaatgaaaatgatttagaaatttgaatattatatgtgcatatacagttttgcctcagcactcagttgtataatcagtggtcaaatgaaatggaaatgatgctaattactgtagttgttaaaatgaagtgtataaagtatgtaaatgggacaattttttttttcttttttctttttttccccccacatgggtaaaagaggaataaatggagcaaatgttttgagcaccacagaagcattttatatttttttaacatcctcatttttcaactgagtatgtatttcttgctgtatatgaatttttaggatacaattttagtaactagtcacataagttatatattattttacttaaagggaacattcctatagtttgctactagagaagtttctctgaacatgtagagtgctgaaaagatgtaacrgttctcaatatgtatgcacccaacaccagagcacccacatatataaagcaaatattattagattgaaagcaaatgttattagatttgattcttagcatctgtccaatgctgagagtggggtgttgaagtccccaactagccaatacaatacagtgatagctggggacttcaacaccccactctcagcattaggcagataatctagacagaaaatcaaaaaagaaacattggatttaaactttactttagagccgggcaccgtaagcctgacactttgagaagctgaggcaggaggattgcttgagcccaggaatttgagactagctcaggtaacatagtgagatctcatctttacaaaaaagataaaaatcagccaggtgtggtggcatacacctgtggtctcagctactcaggaggctgaggtaggaggattgcttatgcctgggaaattgaggctgcagtgaactgtggtcacaccactgcactgcagcctggtgacagaacaagacactgtctcaataaataaataaactgcactttagaccaaatggacctaacagacatttacagaacattttatccagtagttgcagaatacacattctcctcatctgcatgtggaacattctccaggaaagatcatacgttaggccacaaaacaagtcttaacaaattttagaaaattgaaatcatattaagtgtcttttctgaccactatggaataaaactagaaatcaataaaaagagaaactttggaaactgtaccaatacatggaaattaaacaaaatgctcctgaacctttattggatcaatgaagaaattaagaaggaaatttaaaaatttcttgaaaccaatgaaaatggaaacacaacataccaaaacctatgagatacagcaaaaacagtactaagaggtaagtttatagcaataggtgcctatatcaaaaaaaagatttcaaataaacaatgtaatgatgtactttaagaaactagaaaagcaagaacaaagccaaaattagaagaagaaaagaaataataaagatcagagtagaactaaacaaaatagagactaaaaaaaaaaatacaaaagatcagagaaatgaaaaactggtgctttgaaaagatcaataaatcgctagctagactaaccaagaaaaaagaagacatacataaaattagacatgaaaaaggagacattacaatttatataacaaatagagaggatcatcagagactatcatgagcaactatatgtgaacaagttgggaaacctagagggaatgtgtacatttttggacgcattacagcataccaagattgaaccaggaagaaataggaaacctggccaggcacagtggctcacacctgcaatcctagcattttggaaggtcaagatgggaggaaggcttgagctcaggaggtcaagaccagcctgggcaacagtgagaccttgtctctattttaaatttttagaaaagaaaacctgagcagacgaatcacaagtaacaagattgaatctgtaatttaaaggtctcccaataaagaaaagcccaggtctggatggctttactgctgaatcctgccatacttagaaagaaaaactaacaccaattcttctcaaactagtctagaaatttgaagagggggaaattcttcctaactcattctatgaagccagcattatcctgataccaaaatcagacaggacacaacaaaaaaagaaaactacaggtcagcatcactgatgaacatagacacaaaaatcctcaacaaaatactaacaaatcgaatccaacaaaacataaaaaaaaaaaaatacaccatgatcaagtgaaatttatcctagggccaggcacagtggctcatgcctgtaatcccagaactttggaaggctgaagtgggtagatcacttgagcccaggagtttgagaccatcctgggcaacatggtgaaaccctgtctctacaaaaaataaaaaaattagctgggtatggtggcatgcacctgtagtcccacctacttgggagacttaggtaggaggatggcttgagcccaggaggcggaggttacagtaagccaagatcatgccactgtactcaagcctgggtgacagagtgagaccctgtctcaaaaaaaaacttatttcaggggtgcaaggattgttcattatatacaaatcaataaatgtgatacatcacatcaacagaatgaaggacaaaaaccatatgatcatctcagctaacacagaaaagttatttgataaaattcaatgtcccttcatggtaaaaactcttgataagttaatcatagaaggatcatacctcaaataatgaacatcatgtctgaaaaacccacatttaacatcttactgaatggggaaaagctgaaaacctgccctctaagaactagaagaagacaggatgcccatttttaccactcctgttcaacatagtactgaaaattctagccatagcaatcaggtaataaaagacaccaaattgggaaaaaagaggtcaaattgtccctttttcacaggtgacatgatatatatggcaaaacctgaagactccaacaaaaaactcttagaactgataaatttagtaaagttgcagatttttttttaaaacccacaaaaaactaatagcatttctgtgcaccaataacaactagctgaaaaagaaaacaagaacacaatcccatttattaaggctaccaaaaagaatagtaataaatttaaccaaggaagtaaaggttgtataggaggaaaactagaaattactgataaaattaactgaagtagacagtggaaatagacaaatgggagacatcccatgttcatggatcagaaacattaatattgttaaaatggccatattttccaataaaatctaaagattcattgcagttcatatcaaaataccaatgacattcttcatggaaatagaaaaaaaaattctaaacttcatgtggaactacaaaagagcctaaatagccaaagcaatcctgagcaaaaagaacagttggagacatcatattacctgaggtcaaaacgatactacaaagctttagtaaccaaatcagcatgatgttggtataaaaatggacacacaggctgagcaaaataatactacaaagctttagtaaccaaatcagcatggtgttggtataaaaacagacacataggctgagcatggtggcttactcttctaatctcaacagtttgggaggctgaggtgggaggatcacttgagccaagaaatttgagtccagcctgtgcaagatagtcaaagcccatctctacaaattagccagtcacgatggtgcatgcctgttgccccagcagcttgggaggctgagatgggaggatcatttgagcctggaagctcaaggctgcagtgagccataatcatacactgcactccagcctggatgacagtgagaccctgtctcaaaaaaaaaaaaaaaaattgtaggacagatactctgggacattggtctgggaaaaaattttatggctaagacttcaaaagcacaggcaaccaaagcatatagacaaaagggactgtgtaaaagcttctgcacagcaaaggaaacaaycaacagagtaaagagacagcctacagaatgagagaaaatatttgcaaactattcatgaaatgagactaatctccagaatatgtaaggaactcaacaggaaaaaaaatagtttcgtatctgaatagacacctctcaaaaaagaagacatacaaatggccggcaggtatattttttaaatgttcaacatcactaatcatcagggagatgcaaatcaaaaccacagtaagcaatcatcttaccccagttagaatggctgttacggaaaagacaccaacaaatgctggtgaggatgcaaggaaaaggaaactcttatacactgttggtgggaatgtaaattagtacagccattatgcaaaacagtatggaggtttctcaaaaaccaaaaactagaactaccatatgatacagcaatcccactgctgggtatttatccaaaggaaaggaaatcaattcaatatatcaaagatagataacctacacccccatgtttattgcagcactgtttataatagccaagatgcggaatcaaccttaagtgcacwtcagtggatgaatggataaagaaaatgtggtatatatacacaatggaattatattctaccatattttttatgaaaatgaaattctgtcatttgcagccacatggatagaattgagatcattatgttaaatgaaataagccaggcctagaaagacaaatatcacatgttcttactgatgtgggaactaaaaaaagttcgtctttagccaggagtcgtgatgcacccctgtagtctcagctacatgggaggctgaggcaggaggattgcttgagtccaggagattgattccagtctgggcaacatagcaagatgtcatgtcaaaaaaataaataaaaagaagaaaggtagttactagaggctgggaagggtgtatgggaagggttccaggaagatacgaagacaggctggttaatggatatagacatacaattagacgaaataagttctagtgtttgatagcatacaggagtgactgtagttaacaacaatacattatatatttcaaaataactagaagagaagatttgaaatgttctcgacacaaatggtgaataatgtttgggctgatggcatcctaagtaccttgattttgtcattacagattgtatgcatgtatgaaaataccacatgtggctctatgagtatgtacaaatattatgtatcaataaaaagggatctgtaatttatgagtaataaaattttttaaagaacatttaccagccgggcatggtggctcacacctgtaatcccagcactttgggaggccgaggcaggcggatcacaaggtcagatcgagaccatcctggctaacacggtgaaacccagtctctactaaaaatacaaaaaaaatttgctgcgcttggaggctactcgggagactgtggcaggagaatggcgtgaacctgggaggtggagcttgcagtgagccgagattgcgccactgtactccagcctgggcaacaaagcgagactccatctcaaaaaaaaaaaaatttaccttctaaaaagtaattatatgaaaattgaaagtagaatttattccttttacctttctattcctaggtaatacattgcatgcaactggatcctgcaagaatcatttatcaggaaattctcttgctgatactttatttcggtgggaacaagatgaaataccaaggttagttaatgttgtaaaggaaatgaaaattttacatatatcctagttgtgatcagaaatcagtggttaccataattaaattttaaccttttattgtattggatctttttaatctatacacttaacagaaacaaaccttgacattagtgtattacaaggaataaacgattttaaaaacaaaccatgaaaatgtactagttattacctaattaacaaaaggaatacaaggtagatattgttatacttttctgcaacattcatcttcatcatctattctaatttgatatcctataacttgtcaagtaaaacaattacatttatgataaaatagtaatttaaaacaaaaatctaaatatttttaataacccctaaaatttataaatattaaataagtaataaagtattttgacatgctctggttttgaataatataatttgtaatttatttgtttcattattgattagattttttttggaggcagtatattccaaatgcttggatttctctatttcaaagcagctatgtatttgcttatgcaaattttttactcatacattttctgtctactggtgctaatttttaattctgaaaactacttcccctccataggaacacctcctgttctgaatgtctgaagtagttttgtataagggcaagttgtaaatttctactgtgagattatattttttgaggttattgtttccctcctttctctcaaatgtgctacttcgggaatattcatccttgacatttacaacataattatttcaaattayaaaacttttttatatgagaaaactgtggatcataaacatttttaaatttgatacttcaatgtgtgttaaattgtatgaatgaagaggacaattcacattttgttgttgttgagacaaggtctcacgctgttgcccagaccggaggtcagtggcacaatctcagcttactacgaccgccgccttctgggctcaagtgatcctcccaccttagcctcccaagaatctaggactataggtgtgcaacaccatgcctggctagtttttaaaaatttttgtagaggtgaggtcttactataatgctcagcctcccaagtatctgggactacaggtgtgcagcaccatgcctggctaatttaaaaaaattttttgtagagatgaggtctcactatattgctcaggctggcctcccaagccgaagctgggatcacattcatgagccaccaagcgcagctgacaatctatattgagaaatattttttctgaaagagaaaggaatatattatgataggttggctaattatattccttctctatcaatggtgaaaagatacgtgtgtttgaacatctaaatatatacttgtgagtacatatatacgtatattatttgagttgtgaaaattctgtggtttaacaactaacatgtaatattccatcaaaatttcctttaaaatagacaatggaaaatgagtttttgctaacatgtttttcttaaaacattaaaaagtgtttcaaggccagggcgcaatggctcacacctgtaattccagcactttgggaggccgaggtaggcagatcacttgaggtcaggagttcaagaccagcctggccaacatggtgaaaccccttctgtactaaaaatacaaaaattaactctgcatgatgtcacatgcttgtaatcccagttacttgggaagctgaggcaggagaatcgcttgaacctgggaggtggaggttgaggtgagctgagttcgcaccagtgcactccagcctgggcgatggagcgagactccatctgaaaaaaaaaaaaaaaaataccaaagtgtttcaaatcaaaagttaatgaaatatgtcatcaaccactttgtagtaaaattaaggatctccccttttccacttggtgtccatttttgtacaaggcctaaattttggaatgagtaaactaggatccacactagatgttatctcttcattctgttaagtagggtcaattatgtggtgtcttctttatcttctcttttggggcactgatgaaaagcaaatgcttttgagtcaaagatccwgactgggaaacaatcctttgtagttctcataaaaattaatgacctggtgatatcattacttttcctagctatgatcccactgktgatcattcatacattttatcagttctgtagttatgaagaattttaaagtattccctatctcagcagtagttgagggcaggaagaatggtgaatatcgtttgcccatttctcagtgtgctcaccttcccttttattgcatgttctcccttgttttttgaatactgaaaaagatgtctctaggcaactgatttcatatgtgtatggttttttatgcattcctctgaggtttttatattatcctatcccattctgccccgggtataaccatatgctaaaacgttttatattccttttatataaaatataatgaaccaaaatacgtagaatttacttcaaaaggatctagggtagtcagtataatatgttttgtatttttctcatcctatttttcattatatatacatataaagtatcaattttgtcagaataattgtgaattaatatatcaggttttctgggtacaagctaaatgtaagataattgtataagtaagaaaaatgttagaaagtttgctctcacataattattatgttttttatatcctttaattgcagctctttaatattggaaggtgttgaaccacagagtacatgtgaattasaagtggatgctgtagctgctgatatcttaaatcgtctggacattgaaggttcatacacaattattcttaatatatgtttttattttttaaaattaatgaccggccgggtgtggtggctcacgcctgtaatcccagcactttgggaggccaaggtgggtggatcatgaggtcagatcgagaccatcctggccaacatggtgaaaccccgtctctactaaaatacaaaataaattagctgagtgtggtggcacacgtctgtagtcccagctacttgggaggctgaggcaggggaatcacttgagcctgggtggcggaggttgcagtgggccaagatcgcaccactgcactccagcctggtgatagagcaagactctatctcaaaaaaaaaaaaaaaaaaaaaaaaaaaattaatgaccaaartggaatagaaaaagtaggaaagaaaactttacgaggaaactaagatattatagaaggaggatacaaaatgttatgaagattgcttctatacttctgatgaggtattaattttttgtttatatttttgtccaaatgactatatttgaatagatgatactaaaataagtgtgacactaaataaaattagctaatataaagcaatttaatgtactgtgccttttaatttcttaattttcatattatatatcagcaaagggactcttaggtctattgactatcatcagatgtttgaattgtattcacttgctggattttggggaaccactaggaagaaaactaaaaaaggagtaacatagtaagtgtaggttgggataatttgtccactttattacacaaaatatgtgattggtttttttaaaggcagtatttgttaaagaaaagtttagattttttaggcatttcttactttgaccctgtagtattgaagtattattgtgattacagctcaaattggtggaaaccctggtctacaggccatatgggaagatgaaaagcaacggcgaagaaacagaaatgaaacttctcaaatgagccaacctgagtcacaaggtataaacctaatagtgctctgattattcttttaaatcaagtattttaatggaaaagtttgtcattgagttgttcctttgacattagattttacttttcaaatgacctttatattttgtatgtatttttcttgttgtcattgctgtacagccactatttatctttacagctgtctccaattgtcgcttattatctctttgtaagaagttgacgtttttactgttctttgtttttaatgtaccttgtcctcttgcctcacttttttgttttcattctctagtatgttctagccctctgtatttccaaatgagctatagaaaactcacagaagatcatgaatctcaacttagaaacactgtttaatacattaagctttgaaaatgtagccattgaaatgctgcccacagtttattttctgagtatgtcatataagctctcactttgttcaatatgtacagctctaaagaaacatttattgctaaatggtgccacattcaaaaagaattcgagggggtttagataataccatggatacaacagttttaaaaataaaggtaaaagagtgaaygacatcattcaaaaggcagatatattatttcaaaatacagcagtaagcctatattgaagttcaattaaaattattatatcttaggcactaaaaatgttttgataaactttgagtgccttttatacttttaaaaatagaaatatattttatgrggggaaatttttagctttaggatacaatatatttataggtagagaacaatttttctgttttagatttagattataattatagaacttaatcttgaactgacttaagtgcctaattttataactttagtaacaaccgtttctcttttgtgtgattctatggtaaaactacagttaggttgtattatgtatatctagagaaagataggaaattgccaccatttttaaagctactttaggagaagggaaaatatttcattcatttgctatttacattttttaatgcacttttaaaattcaaagatcacaggtttgtgccagcaacagaaagtgaaaaaaaatttcagaagagacttcaggaaattctcaaacagaatgatttctctgtgtaagtggttatttattatagatctcagaactaattttattcctttgttatgtagtctgttataaaggatatgttttaattaagcagaacattatcaggatctgtggactacagcgatggatcccaggagttctctgctgagttaacattgcactctgaggttctgtctcctgaaatgcttcagtgtacaccagccaatatggtagaagttcacaaagacaaagagtcaagcaaaggtaagattttcttttcatgtatacagaaactactagaacagatatctagcactgagatgttaatatttgattgagtttgctagggatttttttccctatgaaataaatattgtggatatagcaaaaatttctcccattctgtcaccctttctacatctctaaaggtaagcagtatcctgaagttagtgcaaactgttaccatatataattttatattttcttataatgtttgcccaccatatataccattgttttaagttttaaattttacgtaaatgatgttctgcttggcgtagatgaagcaacttgcttttttcactcagcattatatttttaagcagcttgaagtttaatttatataacataaaattcagtcattttaagygtataattcaatgatttacaaagttgtgcaaacgtctccacaatccagttttagaatgtttccatcagtccacaggatcccttgtgtccatttacagttatgcctatttccacctcaaaccccaagtaaccactaataatacatgggccttgtctagatactgtatattatgtaagtgaaaccatacaatatatagtcttttgtgtctggcttcttttacttagcataatactttcaagttttatacatgttgtagtatctatcagtatgtatggagataccacattttgttaatccatttatcagttgatcagcatttgagttgttttcacttttgcctggtaagaatagtgctgctggccaggagcagtggctcctgcctgtaatctcagcaatttgagaggctgaagcaggcggatcacctgaggtcaggagttggcaaccagcctggccaacatggtgaaactctgtctctactaaaaatacaaaaattagccgggcgtggtggcgcacacctgtaatcccagctactcaggaggctgaggcaggagaatggcttgaacccaggaggtggaggttgcagtaagccaagatgatgccactgcattccagcctgggcaacagagcaaaactccatctcaaaaaaaaaaaaaaaaaaaatagtgctgttataagcagtaaagcataaattttaggataaatatcataaagttgtaaaatgatatcaatagtaacaaatgaaacagtttaagaataaacttcactaaaaagattacctctgccaagcaaaagaattactagggcatgtggtatatttgtgtttaatttttaaataaactcccaagctgtttttaaagtgacagcaatgttttactttcccaccagcaatatatgagagtttctctggctctatatcctcactaacacttgttattatctgtctttttttaatgtagccatcctagtgtgtgaaatagaatcctactgtggttttaattttcgttaccctcattactactgatgtcgagcatctttatgtcaacattataactttgaaatttatccttgttcattcattttagctgctgatgactgttccattttaagactaaacaacaatgttagctatttctctacaagtattagatggtctttacttttgcacttagtgctacatctgtctccttatggctatgtgcaggagcttctctaccaaacacatgtagaagagtgagttgctgaatgttagggtgtatgcattgtactctacctagatagcatctgttctaacagtttttctataatgcaattagcttatacatggttagtaaacaagacaataataaaagttttactcagaagtcacattgtatcatacgcaattttactaggcaagcaaagcctcaacatttgatagcatcaaataataaggataaaataatagatgtaaaaaatttgctgctctgattctttgaaatagtgtctctgcattttaatctgcatttcctaattactaatgaatttgagcatctttaaaggccatttgggtttctctgtttgtgaattacattttgtgcttattttctattgagtcatttgtctttttcttatttgtaggagttcttcatattttctagatattaagtctttatcagttatacttattgtagagatgttttctctccatctaggcttatcttataaaaatcttcaaaaaaaaatgttaacttcttttccccccatttaaaaaaaaaagttatccttggggttttacatgtcttcagttttaatgtcaagtttaccaatattcctttatrgtttagttttggtatgtgatttatgagaccttccctaccctgatgtaatgaaaattttctcttaagtattcattttaaggcttacgtgtgcttacagtttggtttttcacatttaggtctttaatgcatttgaaattttacattttacttttaaattttttttaatttttgtgggtacatagtagacatatatatttatggggtacatgagagatttttatacaggcatacaatgtaataaccacatcaggataaatggggtatccataacctcaagcatatatttctttgtgttacaaacattccaattatacttttagttattttttaatatacaatagattattgttgactgtagtcaccgtgttgtgctatcaaatactagatcttattccttctatttttttgtactcattaaccatccccacttccccaccccaccctactacccttcctagcttctggcagccatcattctactctcttatctccatgagttccattgtttaaattattaattagcccccacaagtgagtgagaacatgcaaagtttgtctttctgtgcctggcgtatttcacataacatgatgtcctccacttctatccatgttgttggaaatggcatgatctcattctctttatggctgagtagtactccattatgtaaatgtaccacattttctttatccattcatctgttgatggacacttagattgcttccaaatcttggctgttgtgaataggactgtgataaacatgggagtgcagatatctcttcaactcgacataccaatttcatttcctttggataaataccragtagagagattgctggattatatggtagttctatctttagtttattaaggaaccttcatactgttctccatagtggctgtactaatttacatttctaccaacagtgtacgagagttccctttcctccacatcattgccagcattcattattgcctgtcttttggataaaagccatttttactagggtgagatgatttctcattgtaattttgattttcatttatctgatgatcagtgatgttgagcatcttttcacctgtctgccatttgtatatcttcttttgagaaatgtctgttcagatcttttgccgattttttaattggattattagattttttactattgagttatatatattttggttattaatcccttgtcagatggatagtttgcagatatttcctcccattctgtgggttgtctcttcactttgttgattgtttcctttgctgtgcagaagctttgtataataacttgatatgatcccatttgtctgcttttgctttgattgcctgtgctttggggatatttcccaaaaaatctttgctcagaccaatattctagagagtttccccaatgttttcttttagtattttcatartttgagtcttagatttaagtctttaattcattttgatttaatttctgaatatggtggagagatcagggtctagtttcattcttctgcatgtagatatccaatgtctcagcaccatttatcgaagaaattgttctttcccccaaggtatgttcttggcaccttcatcaaaaacgagttcactgyagtcatgaatttatttcagggttctctattccattggtctgtgtgcctgtttttatgccagtatcatgccgttttgattactatagctctgtagtataatttgaagtcaggtaatgtgacctccagttttgttctttttgctcagagtagctttggttattcgggatcttttgtggttccttataaattttaggattttttttttctgtttctgtgaagaatatcattggtattttgatagggattgcatygaatctgtagattgctctgggtaggcatggacattttatcagtattgattcttccaatccatgaacgtggaatatcttttccattttttggtgtactcttcaatttcttgcatcagtgttttatagttttcattgtagggatgtttcacttacttggttaagtttattcctaagtatcttatttgtagctattgtaaatgggattactttcttggtttcttattcagattgttcactgttggcatatagaaatgctactgattttcatatgttgattttgtatcctgcaacttcgctgaatttgttttttggtggagtctataggtttttcctaatataagatcataccatcggcagataaggataattygacttcttcctttccaatttggatgcactttatttattcctttcttttgtctgattactctaactaggacttctagtactgtgttgaataacagtggtgaaactaggcatccttgtcttgttccagatcttagagaacgggctttcaatttttcccagtgctgtgaatgcactgggtcacacctgaagtcagcatgtccctgggtctcacccgaggcctgcagcaagtactgcctgagtgtcacttgtgtttactcaaggccaaagggctctttagtgagcaagtgatgaaccctgccaggtctgagtccttctcttcaaggcagcaggttcccttctggcccagggtgtgtttagagatgtcatccaggagttagggcctggaatatgtgtgtcacgactctacctcctctactgtggctgagctggtatccaagttgcaagataaagttctcttcactccttcctctcctgtcctcttgtggaatgaaagagtcttctggagctgcgagttgtgctgcctgggactgtgaaggttgggggagggggggtgacacaaataattctttagctgccccagctactctctcaccaggcgcgtgtaccccaagtctactggctctgagcccagcacagcactgggacttgcccaagaattgcagtccttgtggataagactggctttcaagtttatttaggatcccaaagcactttagcccatagtagtaaggctggctgcaactcaggttctggactgctgggatgggcagtttccctctggctggggctggtcaaatcctctcctcatgggtgctggctaaattctatwccgtgtcgctctccactgtgacagggacgttgctttccactgtgacagggtagcactgagttccaatgcaaagcaaagtcccatattcactctgttctgtctctcctaagcacagatttctctctccgtgcctcaagaccactgcctgagagatgggaggtgctgtcagcaattcacgactgtcttttctaccctcttcgctgcctctttccttgatacgttgttaaaaccaagtactgtgattgctctcctgattttttattctaatgaaggcgctttcttgtgtgggtagttcagtttggtgttccttcaggggacggcarttgttggaggattccatatggccacatggactaatattttttgatatcatgaaaatgtaatgaatgtgatatataatgaaagctttctgaaaaatattaatgtaaaatgaattttttaattgcttaaccatttctttgtatttttatagcacttaaaaactatttctgcccagttatggcaatgaaatgggaaaccacaactacagttcacaaacaggcatgaaaaaccaacacacgccccattagggattacactaagctctttattttttatgcattcaaaagagagtccaatacacatgtgtcaaataatgagcactgtcaattttttttttctaggagagttcaaaaacatttattctaaatttgttgtttttgaaccatagagaataaagaattttagtattcaaataagatagtttatctttccttttcactttatatatttgaatatgcagtgatttttatcagagtaatataactacacacattaagtaggattaaagaggttataaatatttggtgatttatagattcagtgtttgttttgataaatccatgtgactggttaaatatttctgtggctttttattatgtttttatttggcatgcatcattaacattttgaaatttaaaataggtttatatggtaatgcttccaaatttacacaaattctaaatgataaattttggatttaggccattgcttcaattttttttattctttgtcaaattaaggtcacactagacacaaagtggaagaagctcttattaatgaagaagcaattttgaaccttatggaaaatagtcagacttttcagcctttgacccaaagactgagtgagtcacctgttttcagtaagtaacagtgctaccataaatattcagtattgtaattcagagaaaatgtgtgttgtgaagaggcatttttttttttattgacttgaagaggtaaatgttgcatgttcagtaaacactctactgaatatgaaaatgaaaccttgcattaaatcaagtagctttgctttttttctatacagcttaaaaaaatttgtgaaagaaaatagtttttttaactgtactttgattcacggaaaaccgtattacttaagaaggaaaatgcatttattttgaattaatattttgcaaagttcagtacattactaaaacaccataagtggttctttcttggtgagtatcacaaatttcaccggaggaaacacgggtggctagggccatggtcccagcctcctcatctcactggccagggctgcactcaaccagtccttcagtggcctccccttgagtggcatctcaggcttcctgcagccactgccagccttccctggcaaggcctcccaactaggggctgacagtgctgagctgtacccacggccaagaccctgtgcagtcccaggcagccctggctggagcacacaacaatgttattttaataatgtccctaaattactctaatgcaggtggtycaaggatcaactttgataggagagctacctcaacacctgagcctttgtaccaactgtattctttcagcctgtgccagtatctatgatgttgttattttattctgagtgatctgaattgttggattattaagaaaacaggccgggcgtggtggctcacgcctgtaatcccagcactttgggaggccgaggcaggcagatcacgaggtcaggagatcgagaccatcctggctaacacggtgaaaccccatctctgctaaaaatacaaaaaattaaccaggtgtggtgacgggcacctgtagtcccagctactcgggaggctgaggcaggagaatggcatgaacccaggaggcagagcttgcagtgagcctagatcacgccactgcactccaactccagcctgggtgagagagcaagactccgtgtcaaaaaaaaaaaagaaaacttatttgttggtgattattgtacttgttttatagtggacagtagtcctgatgaggctctggtacatcttcttgctggtttggaaagtgatggatatcggggggaaagaaataggatgccatcaccatgtcgctcctttggaaataataaatatccacaaaatagtgatgatgaagaaaatgaaccacagattgaaaaagaggaaatggagcttagtttggtgatgtcccagagatgggacagcaatattgaagaacattgtgccaaaaagaggtaattttttagttattgcagttgttttattaacttttatcattattgtccttcaatcagaaattatttattactattgttcatgatataaaataccttatgaactaaattgatgttttaaaattcccctttagtgatctgtttttcatatggcgtatactccatattccaagcaaaataaagttttgctacattttaaaagattaacctaacttttagaagttatccatttatatacacagtattaacatatgtgagtgataaatggagcaaaattgaagtgccttcttatcttagaacttaagaaaaagaatgccctgtgatagttgaactgttgggtatcagaacaacaatgtatagagtcagcctgaagacagggtatggttttgggctctgattagactaagggaactaaggttaaaaacaaataaataaaagactaagaagcaaacactggtgttgtggtttgtttctcaaaataaatgaataagttggtgttgtggttttctaaatcagtctctgtgaacttgattggtttgagtctgccctttagttatatgctctgtgtatagaaaaatctaggcctatgagcctgaaagactgagtatgcctctcctttaaacttctataggctagattagaacttttttagtctgtatttgaaatttccaacccaaagccatcactgaaaggtgaaacaggttaatccataaattcagtgtttacatgtatatgatgaaagtttttatttttctacttaataaatcagatatagaaatctccagatgtgatgttaaattctttcctctaacattgtcactgctgtaataataggcatagtcaatcctatgattaaatttatgtttgtatgttcagtggctgaaccaatttggtgaaaaccatgcccaatttaaccttgggaaaacaaacctaaacattttgtacacatatattagagagagattgaatagtagaagcatggtgtctagaaaagggtttagttaattctgctctttatattggatattatattctgtgctgagtaccatattttaagaatactgaaaaaggaaagggaaagaagaggaagaaaactagaaggatctgtgagcattgtcacttttgaagaacttttgaatggagaatgtttgatctaattagaattacaagatgaatgagaaatgcctttatgtattttaaagattatcatgtggaaaatgacatcaacctgctctgtatagctacagagaacaaaataggaatcatgtatggaagttgaaagagtttgtgtattacaagaagacaactatgaataattaaagccattaacagtggaaagattgccctgtgagacagcaagccccttatacagattatgtaaaaacagagattgtgtcaggttcgttaaaaatgaggttttcgcattgggtagaaagttggactggacctctgatacctctttcagctcttaagggagtgatttttatgataaattgtgatttggaaaggcttaatggaaaaacagttccagtataataagtataataaaataataataatttcaaattgttgagattagtgaaagaaaaaattgggtatggataggaaaaaagtttgcccattcaattaaaagggaaaacatcaagttaataccaatatgagatgaaacttaaagactggacttcactgtccatctgaatttctcagtaaccctttgtagttattgtcaggttgactgaacacctttactacttcctattaccctctctcttcttcagcattttctcttcagccctgacctcaatgccccttcactyatctttttattcttgtttcttccaattcagaatgcaggaattgtggtgtattttagctcacatgaaagggattatgaagtctaattataataactctttgtaagttactatagtaagacatgttaataaagcaaagtaaatatgcttttctagaagttacaattttcagattttttgtattgttttactatagagtaacttagatacattattatagttaacttagatacattattatagagttaacttagatgcattatttgcatctgagatggtctttactaatgatcatgctcaccagtgaattttaatgttctccagatcactgtgcagaaatacccacagaagttcaactgaagatgatgactcatcttcaggagaagaaatggaatggagtgataacagtttgcttctagccagtctttctatacctcagttagatggaactgcagatgaaaatagtggtaagtaaacaagtctactgtgagaaattggttattcacgatctaaaaatgtatttgattttgaggctaggcgctctggctcacacctgtaatcccagcattctgggagtccaaggtgagaggatcacttgaattcaggagttcgagaccagcctaggcaacgtagtgggacccccgtctctaaaaaactaaaaaaattagcccagcatagtgatacatgcctgtagtcccagctactcaggaggctgaggtgggaggcttacttgagcccaagggtttgaggctgcagtgagctgtgattgctccatggcattccagcctaggcaacagaacaagattctgcctccaaaaaaaatwataaataaataaatatgattttgaaactktaatcatactttctattgattttgaaactgtaatcatactttctatatagttggctaagggaggctatagtgatgtttcgtccttcaggatttktttcttttgaaagaattagatacatgatttgcttctcatttctaaaaggatataacatttgttgaccactgaattcaagctttgaaaactttaatgtttgttgtgcaagtagaataataaactgaaaaatatgctcagtttatttgaagtgataatgtaaagcatattattttatgaacatttttaaagtgacagtatttttcccttatgccccaaaggaactaaatagtaatataatctatttctgatcaatggaatatttgtttaaaatgatgactaataattgtaactaactatatttagattgagtcattaatgataagcattacctttttgttaagataaccaaacttaatttgatgtaattttttcatagtgatagcattaatatcttggtgtgggaaaatgtcttaaaaattaaaagagtaaaatgaaataaactgtttttccctcctcatttcagacaatccattgaacaatgaaaattctagaacccactcttctgtaattgcaacaagcaagctttcagttaaaccctccatctttcacaaagatgctgctacattagaaccctcatcttctgctaagattacctttcagtgtaaacacacaagtgccctttcttcccatgttttgaacaaggaagatttaattgaagacctttcacagacaaacaaaaatacagaaaaaggtctagataactcagtcacttcttttacaaacgaaagcacttattctatgaaataccctggatctttaagcagtactgttcattcagaaaattctcataaagagaatagtaagaaagagatcctcccagtatcttcctgtgaaagtagtatttttgattatgaagaagatattccatctgttacaagacaagtaccaagtagaaaatatacaaacattagaaaaatcgaaaaggattccccttttatacatatgcaccgtcaccctaacgagaatacattgggcaaaaattctttcaacttttctgacttaaatcattcaaaaaataaagtatcctctgaaggaaatgaaaaaggaaacagcacagctctgagtagtttattcccttcatcatttactgaaaattgtgaattactgtcatgctcaggggagaatagaactatggtgcattctcttaatagcactgctgatgaaagtggactaaataaacttaaaattaggtatgaagaatttcaagaacataaaacagaaaagccaagcctcagccagcaagcagcacactatatgttttttcccagtgttgttctttctaactgtcttactagaccacagaaactatctcctgtcacatataaattacaacctggcaataaaccatcccggttaaaattgaataaaaggaaacttgcaggtcatcaggagacttctaccaaaagtagtgagactggatccacaaaagataattttatacaaaataatccttgtaatagtaatcctgagaaggataatgcattggctagtgatttaactaaaaccactcgtggagcttttgaaaataaaacacccacagatggttttatagactgtcactttggagatggracgttagaaactgagcagtcctttggactatatggaaataaatacacacttagagccaaacgcaaggtaaattatgagactgaagacagtgagtcaagttttgtaactcacaactcaaaaattagtctacctcatcccatggaaattggtgaaagtttagatggaactctcaaatcccgaaaacgaagaaaaatgtctaaaaagctgccccctgtcatcataaagtatattattattaatagatttagagggagaaaaaatatgcttgtgaagctaggaaaaatagactctaaagaaaaacaagtaatattaacagaagaaaaaatggaactatataaaaagcttgcacctttgaaggacttttggccaaaagttccygactcccctgcaaccaaatatcccatttatccactaacaccaaagaaaagtcacagaagaaagtcaaaacataaatctgctaagaaaaaaactggtaaacaacaaaggacaaataatgaaaatattaaaagaactttgtctttcaggaaaaaacggtcacatgctattctttctcctccctcaccatcttacaatgctgaaaccgaagattgtgacytgaattatagtgatgttatgtctaaactaggttttctttctgagagaagcacaagtcccataaattcttctccacctcgctgctggtctcccacagatccaagagctgaagaaatcatggctgctgcagaaaaagaggcaatgctttttaagggtcctaatgtatrtaagaagactgttaattctcgtataggaaaaactagtcgcgcaagagcacagattaagaaatcaaaagcaaagcttgctaatccctctatagttactaagaaaaggaacaaacgaaatcagacaaataaactagtagatgatggaaaaaagaaaccaagagcaaaacaaaaaacaaatgagaaaggtacatcgagaaagcatayaacacttaaggatgaaaaaataaaatctcagtctggtgctgaggttaagtttgtactgaaacaccagaatgtgtctgaatttgcaagtagttctggaggctctcaactactttttaaacagaaagatatgccactaatgggctctgctgtagatcatcccctttctgcttccctacccactggaattaatgcacaacagaagttatctggctgcttttcttctttcttagaaascaagaagtctgtagatttgcakacattccccagttcacgagatgatttgcatccatcagttgtttgtaattctataggacctggagtctcaaaaattaatgttcaaaggcctcataatcaaagtgctatgtttactctaaaggaatcaacgttaattcaaaaaaatatatttgacctttccaatcatttatctcaggtagcacagaatacacagatatcttctggtatgtcctcaaagatagaagataatgcaaataatatacaaagaaactatttgtcatcaatcggaaagttaagtgaatatcgcaattccctagaatcaaagctggaccaagcatatacccctaattttttgcattgcaaagacagtcagcagcagattgtrtgcatagcggaacagtcaaagcacagtgaaacttgttctccgggaaatacagcttcagaggaaagccaaatgcctaataattgctttgtaacttccttgagaagtccaatcaaacaaatagcatgggagcaaaagcaaaggggctttattttagatatgtcaaattttaaacctgaaagagtaaaaccgaggtcrttatcagaagcaatttcacaaaccaaagcactttctcagtgtaaaaatcgaaatgtgtcaacaccttcagcatttggtgaaggacagtctggactggcagttctaaaagaattgttacaaaaaagacagcagraagcacaaaatgcaaatactacacaagacccrttatccaataaacatcaaccaaataaaaatatttctggttcccttgagcataacaaagcaaataaacggacacgatcggtaacgtccccaagaaaacctcgaactcccagaagtacaaaacaaaaagaaaaaatccccaaacttctcaaagtagactctttaaatttacaaaactctagccagttggataactctgtatcagatgatagtcccatctttttttcagatccaggctttgaaagttgttactcacttgaagatagtttatctcctgaacataattataattttgatattaacacaataggtcagactggattttgtagcttttattctggaagtcagtttgtcccagctgatcagaatttgcctcagaagttcctaagtgatgctgttcaggatctttttccaggacaagctatagaaaaaaatgagtttttaagtcatgacaaccagaaatgtgatgaagacaagcatcataccacagactcagcctcatggattagatctggtactttaagtcctgaaatttttgagaagtcaaccatagatagcaatgagaatcgtcgccacaaccagtggaaaaatagctttcatcctctaacaactcggtctaactcaataatggattctttctgtgttcagcaggcagaagactgtctaagtgaaaaatctagattgaataggagttcagtaagcaaagaagtgtttcttagcctcycacagccaaacaattcagactggattcaaggtcacaccagaaaagaaatgggacagtctcttgactcagccaatacctcttttactgcaatactctcctcccctgatggtgaacttgtagacgtggcctgtgaagatttagaactgtatgtttcaagaaacaatgatatgttgacaccaactcctgatagttcaccaagatctactagctctccttcacaatctaaaaatggcagcttcacccctcgaactgctaacattctgaaaccacttatgtcccccccaagtagggaagaaattatggcaactttgttggatcatgacctgtctgagactatttaccaggaaccattttgcagtaatccttctgatgtaccagaaaagcccaggtaatcagttattttttcccttgggtcactctgaattattatgatatataaaattatgctatggggattgaaaaaaaaagaatgtatgcaacatttggttacctgactgctagttttctgtgataccgtatttgtaagtatatcattgtggaaagtatttctaattacagacttactaagaaaattcaaaaactaactggatggttacacctagagaaatttatttaagttgacttggatctaccattatttaacactatgtcttcattaaagattagaggtgctcactgtaaagatgtcatgatactttaaaaggattacaatgatcattgtttaaatggtatttaatttttaaatgttaaacttttataccattttaaaagaacttcattttcaagtgttttgaaaatgagcatgtatgtgttttaagtattcctctgatatatctctaagtgaagattattgtaagttgtttctattataaaccacttttcatgtggtttcaatatcttgtattatattgttattgttattatagtttatgcagttattagcaaatggactttggtttccattctcctttcttttaagaattttttcaggtggctgggtatggtggtgtgcacctgtaatcccagcactttgggaggccgaggtgggaggatcgcttgagcccaggagtttgcgaccagcccaggcaaaatagtgagactctgtctctacaaaaaattaggccgggcacagtggctcacgcctgtaatcccagcactttgggaggccraggggggcagatcacctgaggtcaggagttcaagaccagcctggccaacatggtgaaaccctgtctctactaaaaatacaaaaattagctggacatggtggcaggtgcctgtaatcccagctgcctaggaggctgagacaggagaatcacttgaacccaggaggtggaggttgtagtgagctgagatcacgccactgcactttgttgcctgggcaataaagagtgaaactccatctcagaaaaaaaaaaaaaaaaagatagctgggcrtggtggcatgcacctgtggtcccagctactcaggaggctaaggaaggagaatcacttgagcccaggatgtcaaggctgcagtgagctgtgttcacgccgctgcattccagcttgggcaatagaatgagactttatctcaaaaaaaaaatctcttcagggaattgatagacaaacatgtgagcgcacgcacacacacagcaaatagcaaaatagaaatcagagtactggtttatttatcagtagttaagtagttatggtgtataccactttcatcaccaagttaggacataactgatgaaagctaaattgggtaatgtggcttaatccagaaagtttaaatgatggctcttgttcctgcccttgtgtccatgatctcatatacttaaccagttgcagagcaggcagttcatttcagccatccattcagaagcagaagaggatggctggaactgctaaggcaggccctgccttagtctaaatcttggaaagagataggaaaagcagcagaggacacactgcatgtatgcactgacctgtggcagtaccatgttcctgactccagtgggaaaaaaaaaaaagaaagatacaatatgaatattacacatttgttcaaagccatagaaagtaccacaccaagaacaaacccaaatgtaatctgtggactttggacaattatgatgtgtcaacataggttcatcgattgtaacacatgtaccactctggtaggggatggtgataatgagggaggccatgtatgtgtgggggcacaagggatatatgggaaacttctgtaccttcctttcaattttgctgtcaacctaaagctgttaaaatatctttttaaaaaagtttaaattaaaaaaacacgacagtgaatgccaggcttttacccagcagattcacaataattcctataggaatccatttaagaaagggttgagaatgtgaaatgatggatatgttaatttgtttcactgtaagaaccattttactatatactaatatcatattttataccttaaatatacrcaataaaatttatttttttaataaaggggtgagaaaaggttatcagaaatgcagaataaaagttctctcctgtaatgacttgaagtgaaaggtagaaatgtccacctcccagccccttttcaacacacagttttgtttagtacccacatggaactctttatttcactgctggagcatatgaaatctgttctttagacrttagtttccatcattttggggactttggtgttatyagtagtgattatggtatatttacttttagttaccaaactttatgtgctagtcattacctttgtgttgttgttattgtccaactttgacacttgtcctgcagctaaaataaaaaataatcatttttgaaaaatatttttgaaatatgaaactgtaggccgggcacggtggctcacgcctgtaatcccagcactttgggaggccaaggtgggcagatcacaaggtcaggagatcgagaccatcctggccaacatggtgaaaccccatctctactaaaaatacaaaaattagctgggcatggtggcatgagtctgtaatcctactcgggaggctgaggcaggagaatcacttgaaccagggagtcagaggttgcagtgagctgagatcgcaccactgcactccagcctggtgacacagcaagactgtctcaaaaaaaaaaaatgaaactgtatattcaatatagaaaatttaggaagtatgaaagaagaaaaaataaaaattacatcatttttccatgtagtaacagccaccataatattttgatgtgtattctgttttcttttttaaaaagtatagtttttagttygttttgttttgtgaagtgtgatcttactatagtcacagtattatatccaaatttttcacttaacattatattgtaaacattttccaaatgagtttcttgaatattttaatcgctgcatatgttgcatcatgtatatattattggacagaaaggttgtttgcaattttgccactatagatattatgtatattattatgtatgttaagaagatattagcattttcttcttaaagcatttcttgtattttggagtttttccttatagccctagaagtaggattactgaaaaatttaaggctcttgatacatattaggagattttttttcccagtgggttatagcaattaccatgctgctgacaatatgtaagaaaactgaattcaccacacctcaccatttttttttttttttttttttttgagacagagtctggctctgtcacccaggttggagtgcagtggcgtgatttcggctcactgcaaggtccgcctccctggttcacaccattctcctgcctcagcctcccgacacctcaccattttttattcttgacctcattatgacttctctatccttagtattagagttgggtatggtcacttggtatgtgtattcatttccttcaacagcattaattctgtttctgttttttcacattgccaagagtggatgcagggacagtgctggatgctggttatggagttaactagtaggggcttaagtcttttcatataaaggagacagagtagccctaatgctcttctttcagcttcaaatctgaaaacatgatccagttagtggattttacatagagagtgatggggacatttggggaatcatgccctaagagaagtgattgaaaaaactatgaattaactttatatccataataaagttaacatgaagaagtagaattattttatgttgctgtagtaagcagaaatagtatcaagggattggagaaagacagaggtttcacttaatatttataactattggaaatgaaaccagactgttttcattagtgatttcccacatattcatgcattggtaacatttaagccatgcatcctgtgggctctgccagctcctaagttatgtcagtgttaatccctgccatggaatgggaagaaagaattagagtaatttacctcagttggtattttttttaatgtttaagggaatttgagagtacgaagattcatttgaattgactggctttgttaaactacagatactggagaatataggaagaagctatgaataatatcyagggacatagtatttgaatgataaattcattgtttttattcatatgtggtaataatggaaaatttattttaagattaggagaggaaaggaatctgaaaagtttgtgtcatctccttgaaggacagaaggcttcatggggcattaaaataaaacaaaaaataccttctctccctaagattaatggtaccttccaaaggaaattaagtagtagtcatatacctgtgaggaaaagcatattgagactaaagatagaatgtacctgcacaatatagagggggcagggaagatagacatggacatttttgagactccaaaagggactttatctaggatatggagttaaatattttggtaattgctctttgaaacaaaacagttgttctaaaatatgttattatagggagattsgtggacggctcctcatggtagaaactcgacttgcaaatgatctggctgagtttgagggagacttttccttggaaggacttcgtctttggaaaacagcattctcagcaatgactcagaatccaaggccagggtcaccccttcrcagtggccaaggagttgtcaataaagggtcaagtaatagccctaagatggttgaagataaaaaaattgtgattatgccttgcaaatgtgccccaagtcgacaactggttcaagtgtggcttcaagccaaagaagaatacgaacgttccaagaaaytgcctaaaaccaagccaactggagttgtaaaatctgctgagaactttagctcttcagttaacccagatgacaaacctgtagtgcctccaaaaatggatgtaagtccatgtatactccccactacagcacataccaaggaggatgttgataattctcagattgctttacaagcaccaaccacgggatgtagtcaaactgcaagtgaaagtcagatgctgccaccagttgcctctgcaagtgatccygaaaaagatgaagatgatgatgataactattacattagttatagctcccctgattctccagtaattcccccttggcaacaaccaatatccccagattccaaagcattaaatggagatgatagaccctcatcaccagtagaggagctgccttcattggcttttgagaacttcttaaagccaataaaagatggtatacaaaaaagcccctgcagtgagcctcaagagcctctagtgatatctccaattaatactagggcaagaactgggaaatgtgaatcactttgctttcatagtacaccaatcatacagagaaaacttctggaaaggcttcctgaagcacctggccttagcccattatcaacaggtaagtgtacaaataacaggaagtctccataattgttcttcagaaatagaaatgaagataacattagactgtaatgaaaatcagagctttttaaatgaaggtatagctcagcaaatatttttcgtcatgtcttagaaagtcgtcacatggcaactgtctttctgctgtgaaatctacttatatttgcttccatcctgtcttgtgggtgaaatgcaggagccctctcaaaaggcttatcttctcaacttgactttcctgttggcttttatacatacccaggtctcccacattttaaaacagaaacaaaaaacctgccttgacctcacgtctccagccagcttctactctttctcctccccttcaaagccaaatttcttaaaagatttatctaatttgacaactccagttatttacctcctactcatttctcagcccactctaaactgaattctgcccctgtcattctacattattagctcttgtaaagattcccagtaaacttatagctaaaaccaatagatgttcctgagtcttatcatatgtcctctaagcagccattttcttgttgaccttaccttccttcttggagcttctccacttggctttcctcctacttctctgtttttttcccacttgattttctcattattctcagttgttatctaaatrttggagtttattaaggcttggtcttaagccttctttatatctttctctaaatgatctaattcctgtctacaggattactacagataactcgcaaatttatattcccagttcagatctctcttttaagctccagaacactatatccaactacctatctgacatttccacttgaatgctaaatggcacctcaagattagtattttaaaaaccaattcatgatctcaccgcatacattcaccaccacttccccaacacacttatatatacatgcctccacataaaaacccatctggccttctttcagttttccttatttcaatgaatagtgccatcatttcttagttacacaagtcagaaacatagaatttatttttaacactcacctcattccctcattacccaccttgtagtttctagtccctaaccaagccttatcacttgtttatctcccaagtaacccagatctatctactttattgtacttcttccaccacaaccttaggccaaactgtcatcatctcttgcctgggctcctgcaccagccattttatctactcttagtaacttccaattcttttgcacagtaatcagggaaaaatccccactctgttcttagttagttactactctcttcagattttacctccaggaaaccttccctaatctccttgactacataaaaattcccaattatattcccctttgttgtattagtgcagttataattttatttttctagtatgtttgatgaatgtctgattctctctctagaccccacaagggcagagattatgtcttttcttcctcatcatagatacttgataaataagtgaataaatgaattaaacagttctctaggttaatgactgaggtataaaattcagtaattaaaacataaacatttaaaatacaaaatgtcaaaatgttattttggttgggatcagaggtttgaatttcatttttaaattatgaaattctggggggaattcataggacagcacccacaagtggtacttargtgtttggaacaacaaaaggttttttaaaaaccagaagcaggtaattttgatayacatgttaaatattaaatttctttctacagaaccaaaaacacagaagttgagtaataagaaaggaagtaatactgacactcttagaagagtactgttaacacaagcaaaggtaactatactaaacatttttaaagatcagtggaagagccagtctttttcctagatttcagttagataattgttaactttgtctcaattaaaaaattttggttacttaaatttttgcatcattatttgcatatctttgagacaacaaaaatttgcctttttttagttttttttttgdtgttgggatctaaaagattcttatatgtaaatacaaatattacagagaaagtgaatatgatagccaaaatgtggattatgaggatacaaatacattaactgattactggcaaaatcagaacaatccaatgacagcagagctcaagtaagtgatttttgatcccaccaaaaatatatcctttttcttggtttattacttttttctaaaatataaccttattgattttttaaaatttattttactaagtagtaaaagaaagcaacattatttactactgaaactctggaaagtcacaaatgtctttattcaaatactaaaaatatgacaaaacttagaattatatggttatgtgaaagaagtatacattagacatacatccttggaaatatatgctagaaatcacttatatattggccacttcttataaatgtcattaactacataaaatatattttaatatttctgagattatcaaactttttaaactttcatttataaaatactgttgaattacaagctatatatattaaaaaatactatatcagtgtgttgtgaacataacactttggggaaaacagttaatagatttagaaatcagaaaaaaataattttgtaagaaatggaaagattccatttttttctgaatctttgaagattacattgttttatttaattcatctttcagacacatgttatattagagtaaaatacaaatcagtatttcaaatcttttacaaactttagccaaagtagttggaaatatattgattgcttgcttgtctttcttacttccaagaaaggtcaagataaatgtccatgtggtataaatgtcaactccctacaaaactgttattttcagtattgagggcttctgaactgagagataacatatggtttgcttatatttctacatgtatccagttctgatatctttgttagcatgaaaataacattaataaaatacagtttgttcttgaacttagagatgatattagtttaccatttattactaaacacataaagcatattatctgagaataagtaatcaaaagaaaaatgattgctcatgtatctttttctggctgtgtgtgtgtgtgtttttttttatagaatcaatttgcagcagtaaataccccacagaaagaaacttctcagattgatggaccatctttaaacaatacttacggtttcaaagtcagcatacaaaacttacaggaggcaaaagctttacatgaggtaaaactgcaacagtaaggacacatacattgtgttcagtttaactcctgttttattctataaaacaagtatggaatttttttaacaagggaggagtatattgaattctatcctattaatcttcatcttgttctcattttactattttgtatatttacatgtttatgtacaatacataaacttaaagcatttaagttgctgagactgctttgtgatttcatatctttcacaaatctcataactgaaattcagcttatggacattaaaataagaaaagatttttgggaggtggaggtgggatgatcccttgagtcgaggagtttaagactatcctgggctacataggaagaccctgtctctaccaaaaaataaaaataaaattagatgagcatggtggcgcgcacctatagtctcagctacttgggaggctgaggtgggaggatcacttgatcctgggagttcgagggtgcagtgagctgtgattgcgccactacactccagcctgggctacagacagagcaagactctgtctctttggggaaaaacaaaaaaaagaagtaagtctgtattttggggattattatattaagatgttatgtcacatctgaaatgtgatatttacttgtattttctgtttgattggctgagtggattagagcttgctacaaaagaggataaattcattcactcatatactctctacttaatccagctatcttcacagcacaggctgcctgccaaagactaggactttgcaaaaatatacatcagctacagtatgcattggaaagaatatgtgaatgggtcactgtaaatttatttgtatgcagaaaacaaactcaaagcacatatctgactggcagtaagatagaaattggagtatgttttcattgtttacacctgtgctgtcgtatggtagccgctagcagcatggatattgagaacttaaaatttggcttatacaactgaagaactgaattttaaactttatttaattttaatttagattttaaaacatagttgactcaaagtatgtttggaacgacttaggtatgtaatactattttttactcttaagttgtatgaaattacagatcaagtatttctgtagaaaatttagcgtgcacagtgagatatactagaaggataaagtacatactcatttcaaagacttcatggaaagaataatttaaaatattttgttagtaattttaatattgattacatgttgaaaggataatattttaaatatattggatcagatcaaagtgtttttaaattaacctatttttatttttttaaatgtgactactagraaactttragttacatgtgactttcattatatttctattggacaatgctagttttatacagtcactttatgtctttgcttttaaagcagaggattagtaaccacctttaagttataattcaatttttaagtgtggttttttttctcaagtcaattctgttgtaaactgttctagagattagattaacataaactgagggaaaaattttaatattgtcctcctttgttcttcacatttgaactgagaattatgtttttttagaattagattggaacatagtctctccctcatttattcatttgcacatttttctcattcagcagcattcattcagtttctgttttatacctaggtctatactagcccctgaagcctagataaattaagtgataaattcagtaatacataccatcaaatrcaaacttgaaattagcaaatttttaaaaacttttttaaaaatatgtattaaagcaaatttgatagaccatagcaaaaagacatgttacatttgattattctcttatttgaaaagtacgcttttctacattttcctaggtaaccctgtttcagaaccatgggccctctggaagttaaaatcactctggaggtctcactggttgctctgacagcttcttcctcccgataaccggctttcctcatctcaaggcacattccaaactgccgcccggtggttgaaacagggaataaaccaaagaaaaaatactgttctcttcctttctctaggaaattatgcttgtggcattttctccctctgtttccattaccctaggataatctctctttcttctgcacatcagtactcagtgcagaagacaagggttgtaatctttgtcccccttctcacctgcctcttgcctagtcacactcactaaatctctcaagccatgtctttatatagtttgctttaaaaaaataccccctaagcacagtaatgcattttgttattaaggaatagaaatgcaaattttgagtgtgaaaatttgatctagtaaacaaaaatcaacctytaagacccttttaacctaaaattgttttcagagtcttcatgtcttttcatatgttcatccctttcttttttttttttgtttttttttktgtgtgtgtgtgtktkttgtttttttttgttttgtttgagacatagtctcactctgtcacccaggctggaatgcaatggcacaatctcagctcactgcaacctccacctcccaggttcaagcagttctcctgcctcagcctccctagtagctgggattacaggcatgcgtcaccacacccggctaatttttgtatttttagtagagacggggtttcgctacatttgccagactggtctcaaactcctgacctcaggtgatccacctgcctcagcctcccaaagtgctgggattacaggcataagccaccgtgcccggcctcatatgttcatccctttctaatgaaactggttgttttgttttatttgggtttgtgggaggagttttccatttaaaaattttttatttactaaattaatgcatgcttattgttaaaattaagttctgaagagtatgcatttaaaagtaaaagttttttcccttagctctccatttcatgtggtttgattttttttttaatactaatattttaaagtagaaacagcagtatatgtttctgaggaaagtggtagatttgtatttgttttattattatgccttatacatgcataattgatgttctttatattttaaaaagtacttagtggccaggcaaggtggctcacacctgtaatcctagcacttcgggaggttgaggcaggaggattgcttgaggccaggagttcgagaccagcctgagcaacatagtgaggccccatctctacagaagtttttataaattagctggccatggtgatatgtacctatagtcccagctagtaggaaagctgaagtgagtggatcacttgagcccaggagttcagggctgcagtgaactatgatcacaccatggcattccagcctgggcaacagagagagaccctgtgtctaaaaaaaaaaaaaaaaaaaaaarattatttaacaaatttacaatgagcacatgcaatagtatatataccaaaaatactcaatcaggacaaaaaaatttgcaatgaaaagtaagcttccctcctactttaggctagcaatttctttcccccaaagcaataagtatgtctgcatttttatgtcacttttcaraaattttctatgcatgtgcttccattttttcatgtatagaagtttactgtgtttactggttccatgtatcagtgtattatagtgatctttttatattaggacatacagatctgcctcattcccttgaaaatcttaaaggttacagaatattccattgtgtgtatcctttatggataccacataatttatgtaacctgtccccaacaggtaaacatttagtttttttccagtctttgctattctcgagtaaacatccttgttgtgtatattttatctacatgtatgagtgtatctgtctctaggataaattttcaggagtaggattgccacatcaatggattttaattttgatagagatttaccaaattctactcctgtcactagtgagaaacttgaatttacatttcttcaacagtttgcatgcaagataatacaaaacacaaatcctttgttaaatttatatgatctgaataattaccaatattgaaacaggaatctgttttccattgccaggtacatgtacatgataaaaagatgaggtataattctagctataatcatgaattcaacctatattttgtttttcttatttactctgtcttgattttagaaagaaaactaagaattacagttaaaagtttatattggcatagaaaaataagcatgaaaagcaaatattaacttttttgcattatatgttaaagagaaaatgtgcatgtgtaaaaatctggctgttgtgtagttgataccataacagttcttttttttttttttttttttttcaggaaaaactataattaaaaatctgcctagtgtatgcaaaagtctaagtttaagtagccctcaagtagtagtgaattaattggtaggaaatttgaattttaaaaaagctctctttttactttaaactacaggtaaaactatatagtttagctaactacatgaagagtaaaacgtgacagactttggtttcattgtataactacttggactagtcattctctttctcaaacaggcattgagagatcctgcatatatttgagaaaaatagtctaaatattgtcattgagagcagattttctgaaataacatcatgaattgatttaatctaatcttgggattaaaaatctttcgttttaatatatggagtgctgctgagctgtgactttgtcctttatgtccattttttctgtaatcttacatacatatttccctagagccttacatacttctttgagcatgtctttaaaaaatgttttaaaaacatagtatttatttgcttttatagatacaaaatcttaccctaatcagtgtggagttgcatgctcgaactagacgagacttagaaccggatcctgaatttgacccaatctgtgctctgttctactgcatctcatctgacactccactgccagatacagaaaaaacagaactcacaggtgtaatagtgattgataaagacaagacagttttcagtcaaggtattgtccatttttattaatgatatacctgcccactctagggtgaatgttttaatggggaattcctgtgctgaagatctaatctaagcaagcatgatgactcttttctaaaatgtttgctgaggtaggggtaggagattgtgtataactttgtcmtagatttattattcttacttggattagtcagaagcagccaggcacagtggtgcctgcttatatatagtcccagctacctgggaggctgggcaacaggattgctcgagcccaggagtttggggctgtagtgcactatgattgtgcctgtaaatagccactgcattccagcctgggtaacatagcaagaccccatttatttattcattttttaagtcagaagcaatgcaatataaagatcttaatatttataattatcttatataatttgttctaagtattattttataaaaatacttactactaatacagagtccaccttattatgtatccctagattaggtgcacagtcttccttatgtatgcatatgcaggtattttcctgctgatagagggtttatcttaccactataagttaatggtttataagatacttttaagatatattcttactttgcttatatctctttatctttctttctaaataatatacttttggttcagaggttcttcatatagaatgccatataaggcattttataaaatacctactgtccctctgcagctttcagtggtcaccattacaagtgaattcagtccactgaggaggaagtcttagcacagaatacaaccatattaagaatttgcaatttattcagtgatgtgcttgagctgacacataccagctcacaagccagttcttggattttcatgaatttttcaaactagttgctgtcactttggcagttggaaatcagtcatagggtgggggaggggtccttacatcatgaaataggccagcactacaaattaaggctttcttttttttcctgcagaagtggtggttaagcattttcatcataccagagattaaaatgtcctgtgctaagcaaagctctcctgctaggaagagtaaagacagaaacaaagtaatacagtttcttcacaagagatatgttattttctttttttttttgagacagagtctcgctytgttgcccaggttggagtgcagtggtgcgatctccgctcactgcaagctctgcctcccggattcacgccattctcctgcctcagcctcccgagtagctgggactacaggtgcccgccaccatgcccagctaattctttgtattttttagtagagacggggtttcaccatgttaaccaggatggtcttgatctcctgacctcgtgatccgcctgcctcggcctcccaaagtgctgggattacaggcgtgagccactgcacccagccagtgatatgttattttctagggaattttatgaatgcagccttttcaggagaatagctgaaaatacaaaatttgaattttcagttgtatattaaactaaaaaatcttttgagagttttttaaagacattgagttagttatgttttcacttggggagatgttttcttaatttgaaatatttcagtagtacaattttacttaaaagtagaggataatattacttttatattatgaaggtatattattatataatgttatatataatagacattttgtttgttttttagatatcagatatcagactccattacttattagatctggaattacaggactcgaagtcacctatgctgctgatgagaaggcactttttcatgaaattgcaaatataataaagaggtattgttttgtatatctgatttttccagttttattcagagagtcrtttcatgctattgcagataatagtgaagataaaagtaaaggtaggaagaaagcgaatcccttcctatgacccttgaaagcagagttactcttgggaagattttatactcacttcccaccaccatcactattttcatcagacaagggataggaaaagcagtgttctgttctcaagattgaggggccagtgaaagacaaatatttgtttagcctctaactaacttcccagttgtacttgaggttggtttttctgtggtgctgaaataatggagaactgtataaagttccattgtattattcattaactaggtttctaccttgggagccagccaccatttcagtacctttttttggtttgttttttcttttttaaagttttctgagttctaaacaagccaatattttcaaaaagctttgggatgcattctctgtataaatttatctgttcataaatgtaggattatctattacatactcttgtgcacagagctccttaaaaaatctcttttgaccatttggtagtcggtcctcagtccgatagtagaatcttgtccaagtttatgaaaaaaaatttttaacaaaaatattttaatttaaaaataaaatcattaagtggataatttgcattttctcaacagtgtagctcttggtagccatggactctcttattaaatgcttcactttgtagaaacttaaggattctgcccattgctaggtttagggttttagatgcctaaagcaagatagaagacattctttggatcctgatatacagataaaagctgtccatgagcatgttgttatactcacccttttttgttttgcttatatagttgaacttcatcctataaaaactaaatcagtattctacatgaaaaattaagatgatattctacagacttgtcatcagattgaatcccagatgggttaacataaaccattctgagaattagaaaaccaaaacatgtgttttctacaaaacaaaattaaatgacagagcatcaaaaatagtatgctactacccacgactctgaaggaaaaaaagtatttttactatttatagcactggtgactagatagattcccatctatttgagtcttgtcattgtcagtcctaccttttatcttctcacagaggttgtcatcaacatgtcagatgctttcagtatccacacttcttttatttctgcaagcaactcagagaaagaaatatgtaagagtttcagtcaatactattttgtgtaccagcacatgtccagtaatgtccctgggcttgtatgcttgccttttccttgttgggtatattcccaatgataggattacctgccaacattgagaattttgttagtcatttgcaagtataataactttcttaaatgtccataaaatgaaatgtactagtaattaaggaaaatggggtaaacaaaactgtcataaaaagaaaaatgcttaaatgtcaacttttcaattctatagtgttctttatatattagtccaaacaactctgcaaaaagattgattatttcattctttcaccctatttgttgtgtacctactcagcacagcctttggagtcagccagcactgtgtttctgtcttgaataagttgcttaactctctcagctttgttttcctaatctgtaaaatgggtagataatrcacataaaactcttaaactcaggtctggcacatagtgagtacataaatgttaactgtgtgtaaggggcartgctaggtactaatataaaaataaatatatctttatttttccatttttaatattgacttcctcaagtgacaaacacgaaaagtaatataaagtgatattaaacaagtaaaacctcatctataatcttgtcacaatcattttcctctttctgtatttccttggactattaacttcactttgcgcagtctccctaacttaaatataactatgattcttcccttttcctcttccctaaatgctattacatttatattacatcatatccatttaacctcagaattctttttcaagatgattccttcccctccgtgccccttgcctctactagagtacccttatctgtcatgtgtgtagatggtagtgagttacttaaaatactaactgtgaagcagcttttttctgcctaagcaaatgraaccatttacctatttcttctgcttctattttatccacagttttgggttgttttcaccactaatcccatctacccaactttattctttctgtaactttcagaaacctgatagaatgaataaaacccactagaaattgaagaacaagtcatcaagaccttgttattgtctccaaatgtttttagagaggaaaaatggaatcctttggcttttgaacttgaaaacaggtgttttatcagctttaaaagagtctcttacatcctccagactaarcatcctccgggtcaaaaaataaatatatatgtaatatatctgaaaaaatgcctgaaacaactttacaattcttctaaagggacaaaatctgtgaaataaatctgagaagcgcagggtaacttttttcagcagtcatttctgagctgtagcagtttataaaaatagacagctttttatctgagacgaagttattttcaatacattattttttttaaaaaaagtgtacgtagccaactccctyagttgccacaacagaacaaatagctgactggaataagtcttgcaataacaagatgttgcataaatgagaaagattcagatgaagaaattagaagaactgtctttataacatttaaaacagaaggcctgtgtaatcatctggcatcctcttcatgttgtagctgtgtaactatgtgatatgtgataggtaactatgtgataggaactccaggaatcttcccgattcttaagatcaaggtcaactgtggccacactgtaatgcctattctgagccactctgagtacttagcagacaactgtgtgggttctgttgtgtttgtatgagaatgcttcaagtctgcgacccctgatgatccttagagccacttaatacttgtgccccaattctcaaatgtagccattcattacacagttagttttaaagggagatatactggacaagtagatagtctgtctttggactaagaagagtttaatgaaagagatgaagtcagtatcaaggatttggttaagggtttgggtgttatgttggaagactaaacagaaagagtattgggatatttctctttccttgagtgccctgggatctttctggacttcctttctggatattcatgccattgttgcttattgctttgcttcaatagctgtttattaaattaagccattttctcagaaatgtcaaccctatttgtatagagaaaagcacataaatmatatgtttattatctttttctcctaacaagtttgaaggctgctcagcaagtctgtggtataacaatggatcatgaacagatcaccagatattaaaatttatactacagaatgtactttcatagggcctttagggaataggaaaatttaaaagtgtgctgttgcagaagtttgaacccagttcttttgacatcagccactgaaatactccagaattaaaaatcagaaaacatttattgtgacattccaatttttattgactaggtaaaaacgaaagccattcaatacccatttttagaagacagctatggaattatgataaaatattaacatattggttctaaaagcagatctggtgatctggtcatgatccattgttatgccagacttgcagagtagccatagatagcttatatcagtaaattagtctagtactgtagacattggctgaggcttagggtattaaatgctgtaaattggacaggctgcacatctcacaatttagtgtttcatgagtagttatgtaaaactcaacgatttaaatttttgtgatatttcacttggccttttggcatttataaagaacaagataatgctactaattgatagagctacttactgtagtttttgctctcaaaacttataactataattagttccgctctctcccacacaattttccactcgaaataaattttcatatttatagctaaacatttctctatggtggtcacaacatggaggttctaagaggagccacaaagaggctccttctggattggacgcaggtggtcggttcagttttgccagtgaagctctgaccacgaggagcacatttttcttctagattctgatgtttaccttccccaccttaatcccacctctattaatatttcattcttccattaagttgaatcaccatccttttaaatttaaaggacaaacttgtcattacttaggccttattttgtgtgagaaccaaataattactaaaattaagtgagaaaaggaaagcattctcatttttctttctcagcattaaaactgtttaagggcagtatagattagaagggtagataagtggcaacrcaatgacctagggatctttttcaaaataccatacccacacacaccctcacacttcaccttcccctgcccacattatattctcacttgtaccttcactcatatacttcagtggtaatggcctgccttccaccccaatttccatcagcctcttttcccacttgtatcaaacaaatacacagtctaagtaaaaattatgtttactttacaaaaatagcgtcaaatcgcctataatcccagcactttgggaggctgaggcaggcagatcactggaagtcagtagtctgagaccaacctgaccaacatggtgaaacctcatctctactaaaaatacaaaaaattagccgggcgtggtgtggggcacctgtaatcccagctactcaggaggctgaggcaggagaatcgtttgaacctgggaagcagaggttgcagtgagctaacatcatgccactgcaatccagcctggacaacagagtgagaccccatctcaaaaaaaaaaaagaaasaaasaaacaaagtagcttcaaatcaagtactcttaaccatccatctcttcctgtataaaaactctgtaggtaccactgtatcatcccttctccatctgggcaccgttagagaacataggtttttgttttcataccttatatcatgaagaaacaattattctggttaaaggttcaaatgtatggtacttatataacttttttaaattccttttttaggtatgatcctgatattctgctaggatatgagattcagatgcattcctggggttacctcttacaaagggctgccgctttaagtattgacttatgtcggatgatctctcgggtgccaggtatgtgtcattgtgaatgttttgtcattcaactacagagcaaattataaaggaaataaagacagaatgttaaagagtacttatgctgtagcccaattttttagtactaagttgtgtaagttttagatatagcataactccattgtagaaaaaattaaaaataaaataaaaaatattctagtctcactgctatatgtactgttagtatagttgttgggttttttcctttcagtcacttttcatatacatatgtagtggtttttaaataatcataccgtatattccatttttattatgcttccttcatctagtgtcttaccacacatatttttctgcattatgaaatagtcttcataattattatgaagctacatagcatttctttgacttgttgtaccataattttattgtttgtctgcctctgttttttttaatccattttgttggttaagaaggacaggatgggttgaggaacactagtagttaactaatcattgatttttatttggatatcaggctacaaatattgcagaaattttgaagtccattccccaaagtttcattctaactagaagggaataataatattcataccaaaattatttgtagtttataatgcactttttaaaactatgttttctttataaacataggatttttaataaatttgttcccaagggttcccacaagtctaactaaaacaaagtagtgtatactttaggaaaagttgaagctggaagattccaggacagtaaagttttttagctttgcaaaaaattggaataaaaagatcaggtgcagtggctcacacctgtaatcccatctttgggaggccaaggtgggaggcttgcttgagccctggagttcaaaactatcccaggcaacaaagtgagaccccatttctaccaaaaaaaaaaaaaaaagaaagaaaattagccaggtgtgatagcttgtgcctgtagtcccagctactcaggagactgaggtgagatgattgcttgaacccaggagttcaaggctgcagtgagctatgatcacaccactgcacccaagcttgggcaatagaacaagactctgtcttataaaaagggaatggggggcagagatgctttaagtttagcttttcattccatgaatttttgtgtagcttgtgtgtcctttgcatgatagcaatagtggtatatcttttttttttttcaatatcttttttgggataggttttaaatatccttgtctcagtttattcatctgtaaaatagggataatagaacttatttcatagggttattttgaagaacttaaaacaatcaccagagtatatgttacattgtttgctaaatgaaaaacaaacttttaaacattatctctttaaaataaaaagaattgggtgagtggttgtacatggtctttggattcaggtaatcctagtttagaatactagttttcttactgtaagatcttgggcaagatataacatttctgagtagaattttccgtaatacaaaatgaaaattatactaacttcttaaatggtcctgttaaaataaaggaagtaatgtttgtattaaaataaatgatgttggtaaaattcttagaacataataaaccttcaatatggtaaatatttttattattctggaacctctaatcatcaacattcacatatacctagtgttacataggagagacgcattttaatttatattctaggtaaacttcatctcctaagaaactagactcacaacgctatttgctatgaggaactcttcatctagttctccatatgcattcaagagaatttcatyctgaatgtgaacatgatgtcaacaaattttcagagaatcgtttaggttaaaaattgaactagttttttttccaagaaattaccagattaactgtggatctttctcatgctaagaccaaagaaatgttagcattaggtgtttataaaggtagcatcaggcacctgtagtcccagctattcgagcagctgaggcaggcggattgcttgtgaccaggagtttgaggctgtagtgtgctatgattgcacctgtggctagccactgcactcaacctgggcaacataaaaaacaaacaaaaaaaggtagtgccaaaaattaccaaatctaaagaaaaaagtgtttcttatttaaatatagaaagaaggagggagggagagacttcaggttatatttatttcacaaaattttttcatacattgtgaattatatttcatctttaatattcatccttaatgtatattctcattttccctggcataattttattgaaagtttgttttctgtgagccctgatacagtctgttttcatttctatagatgacaaaattgagaacagatttgcagctgaaagagatgagtatggatcatatacaatgagtgagataaatattgttggccgaattacactaaatctttggagaatcatgagaaatgaggtgggtgatttatccaaaatgttgtttagaaataagatattcggtcaatataatgatttaatcattatagagtattagtaagatttactatatagcttatgcgtttgtcaattactgttatacttaagtagagttaaaatagtactttctaaaatgcaaaactacagaggtaatagactttaatgttttaagtgagttttttttttttttcttgtgtctaaggtagcaataactagaaaggtctatagctataataaaatattggggccaggtgcagtgctcacacttgtaatctcagcactttgggaggcccaggcaggggcatcccttgagcccaggagttccagaccagcctgagcaacatggcaaaaccctgtctctacaaataatagctaaaaaaaattagctggatgtggaggcgcatgcctgtggtcccagctacttgggaggctgaggtgggagaatcacttgagctcaggcagccgaggttgcggtgagctgtgattgtgccactgcactcaagcctgggtgacagagtgagaccctgtctcaaaatacaataaaatattgtgttgtacatgttgaatattgtctaatttcaccgtatttttttcacsgaagtcatttttgcacttaaggccagatgaattcagctggccttgttgatttattatagtaagaaaaatttagtctagaaataggaaggagcttctcaaatgaagtatatttaaatactgggtcagattaataagataaagagacagtactttgaaatagttaataattaaggctttgggagctcagataaggattttttagtagagtaatttcaatgaactatcccattaatttgcattcacttagaaaaagaattatttcacacacaaaaagtaagatcataggattttcctgggtaatatttgcatccttgaagttacccaatttctcttatttgaaatgtaaaaaagccatacatggtggctcacacctctaatcccaactctttgggaggccgaggtaggaggggatagcttgaggccaggagttcaatcaagaccatcctgggtaacatagcgagaccttgtctgtattaaaaataaaaaataaaaaacaattaggttgggcatggtggctcatacctgtaatcccagcacttggggaggccaaggagggtggatcacttgagcccaggagtttgagagtagcctgggcaacacagcaaaaccccgtctctaccaaaaaatacgagttagccatgtatggtagcatgtgcctagcgtgtagccaggcaacagctacttggaaggctgaggtgggaggatcacttgatcctgagagccagtggcacacacatacagtcccagcttctcaggaggctcaggcgggaagaccttttgaggccaggaattcaaggytgcagtgcactgttttattatgcctcaaaggcaagggttgcagtgaactgagattgcaccaccacactccagcctgggtgacagagctagagcctatctcaaaaaagacaaaacagaaacaaagatacctactataaattggtctattcttagactttggactttggataatgtcaactaaaatgtttatatttaaaagaaagctaattcttcaattgcttctgctctttgaaactactttctcattagacactttctattatatacttattattattatcttcttggctctttggatttatataaaacatttgactttctaagctgctgtatgcagtatacaacatgactctgcttgagaatgattttatcttgttgtgttgttcttaaaataatagaagagtgttagagtccccagtgatttaaagtaatttctagtgatacagcacaggatataagagatacagagattgtggtgtatttggtgtgtatatttcattatatatatatatwtttttttattttatttatttatgagacggagtcttgctctgtcacccagaatggagtgcagtggtgcagtctcggctcaccgcaacctccgcctcctgggttcaagcaattctcctgtctcagcctcctgagtaggtaggatgacaggtgcctgaaccacacctggctaatttttgtatgtttagtagagacacggtttttccttgttggccagcctggtcacaaactcctgacctcaagtggtctgcccacctcggcctcccaaaatgctgggactacaggtgtgagccacagcccaggcctcattatatattttaatstatagtctgatattgcctgagatgagcacatactttaagtgtataaacacaaagtaaattactgaatcctagtttcaggggtcttttcaaccctgtatatccaaaaggcaacagtagcaaattaactagtagcttaaaattgcaaattagagaacaaatatttttgcaaagtttagggccttctctagtcctcactgaaaattcagggtcaaatgtttcctctcatttaggatgaatatatagtatctctgatctttatgcaaatgtgggaaacaactgtaagaaagttatgagctgggtaacctgttttttaaaaatttggaactgggtacagtggcacacacatatagtcccagctactcaggagactcaggygggaggacattttgaggccaggaattcaaggctgcagtgcactgttttattatgcctgtgaatagcctgagagataaagcaggaccccatctgttaaaataatagtaatcataaattttgtttgtttttttaatatacaagtactagatttctttctcttactttactttgaacatagaactcctgcagtttccttatggactttgaattcgtagtgacaagcaaaatacctcttaaatagtaatgyttattagatatttgttgactgcttaaatgacaataaatagctcttccccagacagttatacttagaggccttctggatgtcaagtcaatctaggcttttcaagaatttgccaagtgggttggaaacagacttgattcaattcaacaaatatttactgaatgccatctttggtgcactggttgaggggcctgggtttagataaagtaagagtatagtaacagacaggaaggcggaatatatgggtatggatgttggtaggtagagatatggcagtgagaatctgtggaagttctcttgtgattcattttctcagtaaaataggaattactgttcttagctaaaacagaattgtggagaggcttttggggtttgaggagagatgagtttgaaatggttattaggagaatttgagagaaaatataaacactgggccacattaagagcccatttgagatttgggttaggaaattaaagtgatacccaccagctatgttcaaattcacaggtgcaagttagatttaaccatcactcacaaagggttatggatttgctttaaaaattaaaaaaaaaaaggcggcagcagcaggaaagggacaagggaatgaagggtacatgcaggggaatgattaccatgattgactatgaaatttaaactaaataaggagcagagaggtcagagcatcaaggggagtaagctggaagcaccggagatgatggtcagagaatgggatgcatgagattttggagggagtacagctgttgatagatcctggggtatgattatgggagtgggtagcttaggtaggatggaggacaaaatcattagagaagaggagttcaaggaatcaaggagtatctttattttcttcccacataattgttacacttactgcatataaaataacagtagtccttttcctttaaaattcaagtagatatagtgccattcacctctggaatttagtactgcagaggagaaatctaaggtccagctaattaatatatttgattattgctcctgtctccatattaggctttcctttaggaacctaattatatattaacattctgttctctgttccccatatcttccctcttctcattttcwtgttttcatcctctttatctgcatgctgagacatttccatattcctaacttgacttttagtagaactatttagtagaactgttctgctatttactgctttcaatatgagctttcattctgttagtgattttataatccttcctcatttaatcttgtggccttttcctcattctattgctctctacctttttacaacctatgaggggcatctgtgtatatgtatacctacacaagtacatacacacactgtgaagtgtgctgcattgtagtgccattgttctgaagattgacagaaattgtagataaagtaagaccaatttgggtcactgcactgagataagattaacattcaatccctattttgtacctcctggatcacaggagtggaaaagaaagtaatttaaaattataatgtaatatacaaatgtgaagtgctgtttgaactatttctgaatccgaaactgacctaagaatggggactactggttccttaatttccattttgcattgaaatacctgccattgtctagattgcttttgtcttgtagatatttcagagaaatcatctagctggaagtacatatttattaatttgggcccttttacagtatcctttacccattaacactgctttcacttacgtatttggaacatggggagacatttctgacattttagtattttgcttttggaatgaaattgagtggctctataatgtctgtgtagtggggtctagtaactaatgtaattattgggaggagaatgcctgcctttaactagataactcacctcaaatctgtggaatcccattaatcagcatgtcatcaagaaccaaaaagtaagtatggaaagaacaaaaaattaatttgcttgacaatgcttctgtcaatatgtatattatcatggagtataaaaatggtaagaactagaatctcttaaaataagtattatatgaccaagttgaatctcatcaggtctgctttctctaattaaataattttccaatttgttatgaacatttctgtccagtaggctctacatagttttgaattatgattcagttgtactgcacatcagttttacaagtagctttaatatctactatgaaaagtttaaagtgatattggtatcttttagaaccaaatttgctacataaatgtaagcattattataatggtgtcttgcctttttttttaggtggctctaactaactacacctttgaaaatgtgagctttcatgttcttcatcagcgttttcccctctttacctttcgagtcttgtcagactggtttgataacaagacagatctatacaggtactgttctataactctgargaaggtaatataaaatcatcattgagatgtaatttrtatgtaataaaatgcacacatttaaagtgtattgttcaggccagttgyggtggcttacgcctgtaatcctagcacattgggaggccgaggcgggcacatcacctgacatcaggagttcgagaccagcctggccaacatggtgaaaccccatctctactaaaaatacaaaaattggccaggtgtggtgatgcatgcctgtaatcccagctactcaggaggctaaggcaggagaatcacttgaacccaggaggcagaggttgcagtgagccgagatcgtgccactgcactccagcctgggcgacagagtgagactctatctcaaaaaatatataaataaataaagtgtattattgttcaatgactttgaaaaatgcatttatcttgtactcattactccaatcaagataaggagcatatctcacacccagaagattcccttctacagctttgcagtcaacctacccatccctaatcatctagataattactaattggatttctattactgtagattagttttgccaattatagaacttcatattaatggaaatattcataatctatcttggctttgaagaaactcagaaaacatagtatgtatttctgttgcataaatagtttgttcattcttattattaaatagtattcaattatatgaatataacttacccacccacctgttgatggacatttgggttgtttccagtttgaggctattatgaataaaactgcaataaagatttgcatatgagtcagcatgtgaacatacattttcatatctcttaggagtagaattactgggtcatatggctgttgtgtgttaacattttaagaaacttaatctgttttctttggcaagtctgttggcaaaaaattatcttagcccttgtttatatgaagatgtctttatttcacccttatttttgaaggataatttctcagtctcagttgcgtttttttctttcaccactctaaagattttgttcccttccagcctctcattttgctgatgagaagtcaacagttattctcatttttccagtatttgtgattcattttctttccaaagtcagatttaatgagtggttgaccgatgtcactttttactctctgcaaggtttatagtggaggcagggggagtttctcagttctcctgtctaacctcagtctttggatcttcctgttcttttttttttttttgagacagagtctcgctctgtcacccaggctggagtgcagtggcacagtctctgctcactgcaagctccgcctcccgagttcacgccattctcctgcctcagcctcccgagtacctgggactacaggcgcccgccacgacaactggctaattttttgtatttttagtagagacggggtttcaccatgttagccaggatgggctcgatctcctgacctcatgatccgcccgcctcggcctcccaaagtgctgggattacaggcatgagccaccgtgcccggcctggatcttcctattcttctggggtttgctcagcactcctgctcttcccacagaggcaacagacctctgctttgtaccactggcaggtcctgggcccaagtaagcttcctgaccctccccctggggcrgatagcattttcttctactcctttctcagtgatactgttcctttgcctggaatctatgacaggaagttttcttgccccttttccagttgcttgttatttagttcaaagcctatggttggaacaggcaagtataccaggcccaaggtgtttcctaagctcctccaacttgatgtaggattcaatctccaaactctgtcgtctgtacatattgtcagtatttggttttaagttttatctagagtaggcctttctctagggcaaaggcctctgttttttctgggctcacaactgaatgccaaggttgttaacaagggggtgatgaggtctctccactctggcattggtgagcctccaaccccagcactatctgaccatttctgcccacactcaacccccagcgagctgctctttattcagcctcatgtggtttcatcctgttcgttttcgggacagccttgagctatcactcataaggaatccagctrtacttctgaccccccccaactcctgccacttgcacagctccctttctctcctgtgctccgtcccacagactcgagctgtgagctgcctaaatgaactctgagctgttcatctttggcttagtaggacagccttgctctgtgtagactgtggcacactgcactgtgtctaggaaaagtccttaaattaatgtgtctaattttttaaatgagtgaatctgtacttactgaattgtaaggctgtatggtggtgaggatggaaaaagtatagctttgaaaacaacttgataatatttggggaaactgcttcctgagcatgtcatcgcatattccaatcacttttgaggaatctcagggaagtgaagtgaagtaacagaaagcacttagcttctatcaaagccttatagaaatagaagctgaggcgaagttggctgagtgcagtggctcacgcctrtaatttcagtgctttggaatgccgaggcgggcggatcacctgaggtcaggagttcgagaccagcctggccaatgtggtgaaaccccatctctattaaaaatacaaaaaattagccgggcatggtggtgcacacctgtaatcccagctactcgggaggcygaggcatgaaaatcacttgaacccgggagcaggagtcagaggttgcagtgactaagatcacgccactgcgctccactccagtctgggcgacacagcaagactccatctcaaaaaaaaaaaaaaaaaagctgaggagaaattatacaccaataaataaaacttgatatttaacttaacattgaaaactatattcagtggtttgtttataagccccggaatctctaaatacatgttttaccacctttaattaggtattatctaggatgayaactgtttttgacaagtaaaatagaggactggaactaaaattgtacagaagggacttagactagacattagaccatttatgtcaaatggattatgttatatgagaagaccatgcactctttgagtagtcttggaaatatcagacaacttcattcttaaatttaagtgaatacttaaatttaaatgagtacattcttaactttaagtgaatacaaaaaaataartctgacttacttttttggtaggtatggtaaccccttttgatttccatttgctttctacagtgttttaaggacatacatatatattgtaaatcgacttagaatgagaagaacttgctagtcaaggatttcttgtgttaaacctgtaaaacacaaaggtaccctaattttttttaataaacccagatttttgtctcctggaagccccagatttatatgaatgaattatgttcccaacattttattgtttcaagcttagaacacaytttttcataaaataatgtcttgtgattagattcctaagccagcctataaaacttttcctaatctctaatattactaatctatataattcctaataccagcatgattttatctgtcattcaaggaatagttattaaatactattccagattccagtttctgagctaggaggtatatcctgggagcagagttctgtagctgaagaagataatataagaaattttcttttctatttgctgagtatagagccagtccacagaaaaacttcagaataagtgaattttgtactcgggattctcctgtctccttttttgtcaccttctccccagatgaactatcttgaaaaatatccatgccttcaggatgctctaagttcccatttcagcactacccaagcctatcctgagtagcatgtgctttataagtatgtttcccttcctcctttccggatcaaaacttgtatttattaccgttaagtttgacamagcattaggaggatggcataattctttaacaacaatttaaaaaactaacaaaagtcaatcttctcctttaaccataagtaaaggccacaattactctttctcttttatgttatatggttagtcagataggacccgaaagtagaaaggatgatgattttatttcggaaagatcacttttttaaattaaaaagtctaaaatacatttttttaaattagccattcaaagtattttttatattcatgcctataggtcagcagatttagatcagaaaacagcagttgttacctgctggataaactgtataagataaaatgtcccttgttaaattaacctttagttatgaaagataagatgcatctaatttgtttatattacttggttaccagtcagtggagaggaatacatttagtgtgaaatgaataagcattcatttcacaaaatggtctaccatttttgttagtgaggaaatgagtactttgctgtgatgayagaaatttaacaagacagttactcatttataatgtattatcttgttttcttttcatcatgttttcgtttatttggccaaaatctcaggttctagtgtactaggtttgtaaactaggatggattagtcttacagtaatcctcagttttcttatctataatagagagatgttaatatattctacctcatgaagtgaagtaagaattaaatgagatagtatgagtcttcaacacacagaaggctctcaataaatgttaattaattggtacgtctttcttttcaggatagagaattagattctgaatgaaatggggaaatagtaattaccataattatcataataatagcagcaaaggttattaagtttttgcttttgcctaacaccttacaacagtttcaccttacaacagtgaaaccactgtttcacayatacagaaactgaaaactagagagttaaatgatttgcctagggtcacgtagcagcttgcagtagagccacaatttgaacctacgactatctcactccaaagtctgtgctgtcaaccaatatgtgaaaatctcttagactatattcttcaaaatgtgaaataaaccatttccactttttaaaaagagttagttatatgtagcatagtaaaaatatttcttttgaaatatactattatatccatttatttaagttctaatagactatactgcctaaaaaaatagagttgatcttagtcaaatcacttaaatcaggaacctttaagattcagtttaatcagttttgtatataaagtattagacttactttcaccatttttgcccaaaaacaaacttytgtacttcattaaataacatcaacaaaagtaaaaagctaacatcaacctaggaaaaccattttcacygtaacagttatgtatattaactatattatatacttttaaattagtaaaaaaaagggtaaaagacatgaacaattatcaaaggaaaaaaatcctgaaatattcaaatgtttaccttactaaaggaattcttaatctgctgattatgtttcttaattgtaccatgaattacaaaaacctattggcaagatcagtcttatttaaaaaaaaaaaaaaaaaaaaaaaaaaaaaaaaaarggactttagactggagtaaacaaagaaaataamccagtatgttttaaaacacattttccgaaacaaattatcgtcaacatacttcaattggtaactcttctcctgaatcaccacctacagatttcaaggaaatattcgtgcccagtcagcatgattatctgttgaaacagattcttatatatgtgtaatacatacctttttaaagttttctgttaaacctgtgttggttgagacttaacacttatttttctcatgttttacaaatctcagcaaaatgcttgtgtgctgcctggcattttcagaaattatgttggtgtctcactattttggtatctcatttggcatgtttctccaggtcagctctctgtccatatgttgagagggcaaagtgtaaatgttatctcctttttctgcactctccatagataaatccacacatcctgaaggagtggtgagccattaaatccattttgttctattttaaagggactgatctgatttgtacataatgcattatttcagatttacactttgcagttttgtattgttgaggggttacattaatgatctaaaacaaaacaatgcagattaaaatgtatcattttttgtctatcaaactcataataattttaaaaactataatcttcattgttaacaaatatacaaggaaacaagcactttatcatcactagtatgaatataaattattaaaacctttctggaaagcagtgtattgttaggtattgaaaactgaccaaatctaggaatttattttaaggaattatttaatcatctgtataaagacttagctttaaaaatgttcatcataccattgcttacagtaataaaagatattcagtaagtgtttcgattaaatatgttatcattatacaatagcacgctcgatagctacaaaacataaatatggggagtcagtatattaagttaaaaatgtaaattatgaaacaaaatttctgtttcttaaacatttatagagtttaggattctttcatgtttgcctaatgttttaacagctttattcagatataatttgtatatcatacaatttacccatttaaagtatataattcactggctttcagtatattcagagttgtacaacatcatcacagtaagttttatamtattttaattactctaaatggaaatcctgcatcacctagccaccactcttcaacctttcatcactcctatcaccccctccaccagagtccccccaccctctacctcttgccttagacaaccgctgatctattttctgtccccatagatttmtatcttaagtcccctgacagctttttaattctctaattttcccaaataaatttgactgtcctcaacatttcacatgaacagaatcgtgcaatatgtaatcttttgtggctggcttcttttagcataatgctgtccagaattgtccatgttatagcatctttcagtatttcttttattgctgaataatactgtatcgtatggatatatactgcattttatttcttcatcagttgatagacattttggttgtttccactttgggctactatgattaatactgtaatgaacattgatatatagttttttgtgtagataccctctttcattccttttggatatgtacctaggagtagaatttttggtggattatatggtaactctatgtttaactgtttgaggaactgccaaattatcttcccaagcaactactctattttacgttcccaccagcagtatatgaggattccaatgtctctactttcttggtaatatactgttattatcttttttataatagggtatttttttcttccttcacatgcattttctagtttttctattaagcattagtcatgtgtctgaggaaaaggtctttaaacacatttattagacaattatgtgactatattgttctaaaagcaatataattaaagattacaatatatgtgaaccttaatcttcaaatgaataaattttattccttatagtatacttctgggtcatttttacatcttataatattaaaattctttttatggatttgctgagggttttattgtttgttttcttaagaaggtaaggtaaagaggttaaatttaaggtttaaactgaaaaacagaacttttatattttaacaaaaaatacttattgaaatatgtttaacccatgtattatctcactaaaatttatgttcctgatttttctaaatcttcaccaaattactcttttttttttgccatgaacatagtgcatgtttttattttagacttacaatgataacccagacccttcatgttctttaaaaatctatagatatgataaataattattgcataatcagcagctgtatcttaaaggagaatgttaattttctataataagaatagaaaaaaaaagaatagagcaacatcaagcaaaatattgaaaaagagtgatccttaatcttaccacctaatcacaagtactattttaaattttgtgtatctttactggttttcatgcccttgaaatacctaaaattttctaatgtttaattccttagcatactttgcttaaaggctcatatcattactctttccttaagtarcctcacttttagcatgtagatttttggcaggaaaaaaagtactgttttcaagtgtccaaatttttccctgatgttcataatgtggattcttttttaacagatggaaaatggttgatcattatgttagccgtgtccgtggaaatctccaaatgttagaacagctggacctgattgggaaaaccagtgagatggctagactttttggcattcagtttttacatgtactgacaaggggttcacaggtgggaaatcagttttcttgcagacttgaaagttctgtatgagtgatacacttttgtgatgtttgaagtgatttgactttttaaactttctgtttggtaccaactaatcaatagctgggtaattaaatcttgtcattttattctctttctatgccaactttccggccactgccaagttttttatggtattaagaaaataaatgtccatgcccttaaggatataatattcctgaatattgttactgtgattaaagatgtcccttaaaactagagaagcaacaaagaaagtacctttcttttgttttacatttttaattttggcttgttaaaacttcccatagataattttaatataaaaataaaaagcttgaaaatcaatataagtggactatgtaacttttttaaatgttataaaaaaagaaacctaagaagccatttaattcatatctaagtaatttcccaaggatataatgagagatttttactaaacgccttgctgaaaatgattttatatattcaacaaatatgtatttgaatacctgtagtttgttaagcacggtggtaggcatcagcgataccatattaaaacactcagattccttaacgttgtaaaatccttacttattttaattacctgtgtctataacataatcaaccagttcagtaaatatagcaaaaatagagttccaactacgtttgttttacctgtttatttcatttaattgcttataagctatttattttatttatacccatcaaatttaacaactgtttgagctagtctgtaataaaaggcaaaaataccttaaaacctcatgagaatacttcagtgaacccaggctggttcttgtgagtaattttttttctaataccccaagccttctaatagttattattagaaacaaacataccagtaattgcttgattcagttttgctagggaccagtaataagctgattactattcagttctttttttttattttttaattatttccacaacaaaagccacattcaatactttataattctataatcattttgtttctttctttgaaaaactgggataacattttctatcttaagtctcctsacagctttttaattctctaattttcccaaataaatttctccaggattatyaaccaacttcttaaacgaaattgtcaaactatacagctgtctgtcctacagttttttattatggtgtagctgtatttaaatacaaagagggccaggtgcagtggctcacacctgtaatcccagcagtttaggaggccaaggcaggggatcacttgaggtcaggagttcaagaccaccttggccaacatgatgaaacyccatctctactaaaaatacaaaaattagctgggcatgatggcacaagcctgttatcccagctacttgggaggctgagacaggagaatcacttgaaccctggaggtggaggttgcagtgagccgagattttgccattgcactctagcctggacaacagagcgagacttcatctcaaaataaataagtaaataataaaaataaaaagagatctaattgcatctgtcttttaaaattgacttatcttttaagttatttgacatgttttatagtttttataaaagtcgtaggaataggaaaaggatttacatatatcccttttcgcatctgaaagctgactaaataaccagtattacaggctggtcatagtggctcacgcctataatcccagcactttgggaggctgaggtgggcggatcacctgaggtcaggagttcgagaccagcctggctaacatggtgaaaccctgtttctactaaaaatacaaaaaattagctggacatggtggcgcatgcctgtaatcccagctactcgggaggctgaggtaggagaatcgcttgaacctgggaggcggaggttgcagtgagccgcaatcgtgccatcgtactccagcttgggcaacaagagcgaaacactgtctcaaaaaaaaaaaaagtcatacaatcttattctgaaaagcagattatcctcaaatgattatatattcaaatgaccaatatatttaactgtgtttcttctcttctcacctccctttctccctgcagtaccgtgtggaatcaatgatgttgcgtattgctaaaccaatgaactatattcctgtgacacctagtgttcagcaaagatcccagatgagagccccacagtgtgttcctctaattatggagcctgaatcccgcttctatagcaactctgttctcgttttggatttccaatcactttatccttctattgtgattgcatataactactgcttttccacctgccttggccatgtggagaacttgggaaagtaaggtttttttcacatttacaataatattgttgtgctttgtacttcttactaaaattagacactttctgagtgtctctttgctctggacaccttccctatgagcaagataaatggactgtatcccagctaatccattcattatagttgtcttaccaattgacatggatcaccatatgattaatccagcttcatggatggatgactcatgaagaggattgggaataggtcagccttgcaactgtttcactccatatgtaactatagtctcttttaaaatgaaagttaaattgttgatgtaaattacctttcagtggaacagtttgaggattatgatcttataacttcaactagacctcctctttatttttcttataaatagtccaggattttaaaaattaaatgttaggttttattaattaatgtaaattaaattttataaactgatrataacattttaaattctcaaaggattagatacttttcttaaattgtaggaaataacggagtcttcctttttattgatttttgcgtatttgagatcatgtgttggttttagtatatcctatattccttcatagaaagcatctgtggaaattatattggtaatcctgtctttttattaaaaacaggaatttggaaaatttacaagatttacagtatttctatttaaggtttaaattattctttaaatatattcacaaggatgttaaaataaatttttatttaagtaatttagtataagatgattgggctggacgtggtggctcacacctgtaatcccagcactttgggaggccaaggcgggcagatcatgaggttaggagatcgagaccatcctggctaacatgaggaaaccctgtctctactaaaaatgcaaaaaattagccgggtatggtggcaggcacctgtagtcccagctactcgggaggctgaggcaggagaatggcatgaacccgggaggcggagcttgcagtgagccgagatcgcgccactgcactccagcctgggtgacagagcgagactccatctcaaaaaataataataataaaataaataagatgatcagatgttgagttgaaatttggtatttcagtatagattttacccataaattttaggatagtgccatttaagaaatgtttcttgtaataaattrtgaatatttgaaaaactattttggtaatgaggcaaataaacatattactaagtacatgaattcttgtttagatgtttgaaaatgaatttctaatggagttagaaagattttttaaattgcgtaaaatctctgttctatgatttgaggaagtatttgcttaatgttctctttcttaacaggtatgatgagttcaaatttggctgtacctctctgagagtacctccagatttactttaccaagttaggcatgatatcacagtgtcccccaatggagtagcttttgtcaaggtaatactctcttgtaaatgaaagataacaactatggcttaacttttggagagctgataatggtttagatattgttggcacataatagaaaacaaaaacaccgagtttgcttgaatattttatctcaaaaagtcaaagatatgagaatcttctaagaaatcacttcaggaacaaaccagtcaccttgtttttcttgaatttaggttttaaatctttaaattgttaaattttagttaacgaaatattgaaagaaataaacgtatgcttatactttctgccctttattagaatcaggcagacttaaatggcaacttaatggtcaaaatatattacctacaaagatttaaattgttttaatgtgtagatgctactagttgttcttctacattattttaaattaagactatcttagaattaatgatactctaataggcttattgtttatatttttcagaagatatccaaactaaaaatagggtcccttttttctctcctgtatctcccctcaaaagagacagaggaaaactttacaaattaaagacaaataagagacatcttaaaagaagattatattgcctcttaaatgccaactttattcctttcttttctattttcttagcagtgagtctgtactagaatcatgagacagtagagtggttgatggtagagtggaccccaccagccctcaaattcattctggtgtactatatcaaaagtggcatcattctctaccmgtaagagggaatactaaactaaaattagccatgtagatgaagaaaattttaaccaaagagttcatggtatgtttctttttggaaaattttaaaatgtagtatttctaaggactgatgtagatgagatctacttggagaaatggaaacagatttttttttattaaatgggtctctatataaaaatcagttttccagtcacatttctgcgaatttggtccctgttctttttatcttatgtcttaaaacattatggctgcttcaaaatgtacaccaaatgaattagaggttagaatatgttccattgtcgcatatctagcagcttattatctccctttaacagcttttttttaaacttgcatctacttttggacccagtgtgtaaagcttaatgaaaataagattttttaaatattcaggtgtgtgaatatcctatacctgagattttaattgttaggtctgacatgcattaccttgcacgtgtctgtgaatcatcatcaaagttaatactgttttgtggttttcattcctactggagttctcataaattctccctagtcttgatgaatacaaatgattttttttttggcatcaacaaattttatcacctcactattcatcccctcttccagattgctaataaatgtaggccggaggggatggcttagtggtctaagcatcagatttgaaatacctagagtccctggaactgcaggtttgaatgtcagcagagtcaacccagctcatcattcttccaaggtagataaatggagttccatgcagatttctgtgtggggtcattaggatgagatctttaaaaactgagttggttatgagtgatacaagtcccatgtgtcattttgaaagaatgggggtttctgtcaaagtttcgaacaaaatttccctctgaagttgttgtatggtcacttatgcactagttgacatcctcctccctggaggtctctgaactcacatagaagtgctctgttagwtttataaacattgcaggaaccatttaggagaaatcctcttccaagaaataaaatgtgatgattttatattgacggccactaatactatggtcactctgttgttagcatgtttcaattcctgacagttggccattattatgttttatgcttccttcttaattatgtaaatctataatgtttgaggggttttaaacattttttttctttatgatagccttcagtaagaaaaggtgtactaccaagaatgcttgaagaaattttgaagactagatttatggtgaagcagtcaatgaaggcttacaagcaagacagagccctgtcacgaatgcttgatgcgcgtcagttgggacttaagctgatagcaaatgtcacatttggctatacatctgctaatttttctgggagaatgccatgcattgaggtaagtgatacaaatctgtagttttttcaaaagagactaaaatacagtgaggcacggtggcactcacctgtattcccagttactttggaagctaagatgtggtgcgggggtcttcagcccagagttgaatcctgcctggacaacatagtgagacctcatctcttttttaaaagaaaaaaaaaaaaaaaaggccaggcatggtggctcacgcctgtaatcccaacactttgggaggccaaggcaggcggatcacatgaggtcaggagtcgcgaccagcgtggtcaacagggtgaaaccccatctctactaaaaacacaaaaataagctaggtgtggtggtgggcacctgtaatcccagttactcaagaggccgaggcaggataattgcttgaacccaggaggcagaggttgcagtgagccaagatcgcgccattgcactccagcctgggcgacagaatgagacttggtctcaaaaaagtggctcacacctgtaaccccaacactttgggaggccaaggcatgtggattacttgagctcaggagtttgagaccagcctgggcaacatggtgaaatcccatctctaaccaaaaatgcaaaaactagccgggcatagtgttatgtgcctgtggtcccagttacttgggaagctgagatgggaggatcactagagcccaggaagtcaaggttgcagtgagccatgattgcaccactgcattccaccctgggtaacagaacgagaccctgtctcaaaaaaaagagactaaagcagcattaaatgaatgcctgttcattcaagcatttcattttgttttaaaactttaaaccatttcatttctatgacataacatcagtttttctcatgccaagcctaaatatatatatattcttggggatctgtgacttttctctataagatacctctgtgtctttattccaatgataattttagaaattagcatacacctatttctgcatgatcttcataactatactgtaactttctattagcataaaatttcagtgccacctttgtagcagtttttacaacagccttggtactgcataattcattttatgtattgacaagagatctgattatagttatgttggcttgtccaaatgtcacaattagccaggtgtggtgtctcacacttgtgatcccaactcaggaggctgaggtgggaggattgcttgagcccaagagttcaagactagcctaagcaacatagtgagcccttgcctctattaatacacaaaattaaaaactaaaaaaawtttttaagtcagaataaacaacagtcattccatatttactagtataccagtagatataaagcacaaccttttttgcaatgatagtgacagttgaaagacatttttcatagaatgacttaatttcatatttactaagttaaggtrtttatttgatacaaatacaatatagtgtgacagggtaatataaataatatactagtgagtgagaaaagaacagagtaacttgttatattgtgatcttttcatgccaaatgaaggtcagagaacattgtggtatatcatatttgcattagttcagtaagagaaaagcagggaaagcataaagtcttcacacagctcacagtaggcaaaatgaactccaaaaacatgagcaaggcagtagtggcatattcacattgaaagcagcaaaataccatctatagtggaaacttaatattgttaacttgaatattttggtacagtaatatgattttgtgctggataaatttttttatagttgcactgtaaaggctgtaagcaataaaagtttgtatctaggtttatatttgtatacttttaggtaagataaaaaatactttgtcagtcctgggggttcatattaatacatttgaaaaccactgatctatatgatctagcaggaaaaaaaaaatggaaatgatattactaatgtaaaaccaaaagctatccttttttttttttttttgaaacagcgtcttgctttatcacccaggctagagtgcagtggcttaaccacggctcactgcagcctcgacctcccaggctcaagcaatcctcccacctctgcctccaagtagctgggactacaggtgcttacctctatgcccagttaagttttctattttttgtagagatggggtttcgccctgctgcccaggctggtmttgaattcctgggctcaagtgattctcctgccttggcagggattacaggtgtgagcgaccatgcttgtcccaaatcctttcttaggggccatttccacatttccctaatttcttccctgcctctcggttttaaaagtgtttattaatgtattttagtaataatgcagaaattatactrtttttaaaatatgtaaatactgtaactttagaataaccagaatttggtaggatttttgaactagcagtggaagtttaggaatagggtttcaccagggagtacgttgctgctttgcacggtgaactcagactgccaagcagtacctgcttccttgaccctggtcttctcagctatcctcagattaatgactgcaagcatgcatttgacccctcatcatatgctaacttcgcaacagtacaatgttaacttctaggtgaaatcatgagtggaaaaagcagctaacatcacagaaagagcctctcatgaataagtgaaaagttagcaccaatagagtaaaaatggaagatatcagccactttttttttttttaaagggcagatggcttcattcttttttatggctgtatgatattccattgtacacataatatggcatttcctttatccattcactcgttgatggacacttaggttgtttccatatcttggctattgtgaatagtgctacaataaatatgggagtgcagatatcaattcaatgtaccgatttccatttttttttttggggggggtatatacccagcagtgggatatctggatcatatggcagttctatttttagatttttgcagcatcctatattgttctacatagtggctctactaatttacattcccactacagtgggttcccctttctccacatccttgccagcattcattattgcctgttttttggataaaagccattttagctggggtgagaagatatctcattataattttgatttgcatttctctaattagtaatgttagtcatttgtatgtcatcttttgagaaatgtctattcagaccttttgtgcatttttaatcgaattatttgtttttttcctactgagttgtttgagttccttacatattctggttattaatcccatgttagatgggtagtttgcaaataatttctcccattctatgggttgtctcttcactttgttgattatttcctttactgtgcagaagctttttagctttatgtgatcccatttgtccagtaatcagccctaaaaaagaataaaatcccgtcatttgcaaaacatggatggaactgaaggacattatgctaagtgaaataagccagacagagaaagacaaatatcacacattctcactcttatggaaactaaaaaaaataaaggaactcatggagatagagagtagaatgatggttgccagaggcaatgaggtggggagggagggagataaagtagaaatgattaatgagtacaaaaatacaattagaatgaataaaatatagtatttagtagcacagtaactatagtgaacagcaacttattgtatatttttaaataactaaaagaatggaattgaaatgtctaacacaaataaatgataaatgcttgaggtgatggatatcccagttaccctgatttgatcattacacattgtctgcctgtgtacatcatatgtaccgcatatacgtatatatacaacagttatgtatccagaataattaaaagcttttaaaagcgggaggcaaatggattactgactgtggtctcctgctttccttcagagaacacacaatcaaaaaagtactagatctggactatcatagagaaagatgagactttgtaagcatataaggagaatatggagaataaataaatgtagctaatagttgtaggttaatgtctctgtctcagtaccatcatagagaaagacaagacttggtaagcaaaaattcctatgaagagaatatggagaataaagtagctaatagtggaggttaatgtctctgtctcagttggacttacttcataaattaaaatttttatatgttgacagttttctactaaattattggtcattcatatttatgataaaggtatatttgtgccttttaaaaaattgtctgaactttatttcttcctttttatgtcttttcagggaattaatttttacttaaaacatttgtttttattaagacttttgaggccaggtgcagtggctcacgcctgtaatcccagcactttgggaggccaaggcgggtggatcacgaggtcaggagaccaagaccatcctggctaatgcggtgaaaccccgtctttactaaaaatacaaaaaattagccgggcgtagtggcgggtgcctgtagtcccagctacttgggaggctgaggcaggagaatggcgtgaacccgggaggtagaggttgcagtgagccgagattgcgccactgyactccagcctgggcgacagagtgagactccatctcaaaaaaaaaaaagacttttgagcatccccaatcatggcctaaattgtgaaaccatttcttttcctcttttaaatcctctcttagccctttaatgaagtaatgcttttcaggttaggaaccttggcacaaagtagcagaatctgttaatttaattacttctccttccctcttccgcctccccctcactctagtgctgctgaattcttcttattatgtggtcttcaggggtaactgcagagttctgactctttggggtataacttaaatgcgccagagtaagagcattaggcagacatttaagaccactatgtatatgtwcgagtatatacttgtaagtatacatctcagaagtatatttgactttgacactaaaatggcttgcttatgcagctctttttcctcacatatttaaaagttgaccttgtttgaaagtggcagtaggtaacagaacattttattcaatttgagtttccattagataacatgatttttgtaatgtattaagttacagtttacattctcaagattttctgatgtactagaggtctcagcagaattcataatcttaatttaaaacctaaggccaggcatggtggcttacacctgtaattacaacactttgggaggctgaggcgggtggatcatttgaggccaggagttccagaccagcctggccatcatggcaaaaccctgtctactaaaaatacgaaaaatagctgggcatggtggcacactcctgtaatcccagctattcgggagactgaagcacgagaattgcttgaacccaggaggcagaggttgcagtgagccaagctcacaccactgcactccagcctgggtgacagaacgagactctgtctcaaaataagtaaataaatcagaataaataaataaataaatcccaactcgtttctactactagttttattatttattcctttgttcatgtacttaatatgtcctttgtaatgcaaytttaaatagccttttaaatactattcaatcctatatttagtaattcaaattttacagtaaagggagaaggatgattattgctattgtttgcttcttaacaaaaaaaaatgtgcagtttgcgttttaaaattgcaaaaggaatgctccatttatgttttatgttgaatggcaatttttcccactcttagctttaatgagtttaataaataaaacagcattgttatatagtctccttaatttacttaactgtaaaatctcattagcatgcttctcatatttgtcaaggcccagcatctttttgttttgtaaactcatgctgtggtcactgttaaaattcactaatcaccaatgagtaaaaccttcctagatatatatctacctatttaatttaaattgaacagttttaatatatttcccatcatataattagatacatttttcyttgtataactagtgacaagattgaagttcagcattaactttaatgatattgaaagacattatcatcaacacttcaacagaaaaattttgagagatacacgtacatatactcatgcacccacaaagagtgcttttctgcctratgagttgtaagggcacataagaaagttgaataggtcgggcacggtggctcacgcctataatcccagtactttgggaggccraggtgggtggatcacgaaatcaggagttcaagactagcctggccaatatggtgaaaccccatctctactaaaaaatacaaaaattctctgggtgtggtggcgtgcgcctrtagtcccagctactcaggaggctgaggcaggagaatcgcttgaacccaggaggcagaggttgcagtgagccaagattgtgccactgcactctagcctgggtgacagagtgagactcctcaaaaaaaaaaaaaaagttcttgaataaagaaggattattcttccaagaatccaacgtagctgagtaccttgtaacaagtgcagtccacttactgttatactcaaagacaagtttgtatattgattggttctttcaaattcttcacctcagtttcttcttgagtacttgtagaaagaatgatgatactgrtggctattttgatttcttttttacgttcttttctcgtttcatttctggaaatatttagtaattaaatgtattatatgttaaagtctgttaacttatactgagctatgttaagaaattatttccaatgtgtttgtaccaacaggttggcgatagtattgttcacaaagccagagagaccttggaacgagctattaaactggtgaatgataccaagaaatggggggctagggttgtatatggcgatactgacaggtaatgggtttttggttttgtagttgtcttttgcatctctctagatcttcatttcagtgtttaaaatggcttaagggaatcttttctaaaaacagagttctgtctgagtcctttccagtccttacgatctcatgatcagagttaacacagatcctgatttaccagataggatcgtaagagacagtttgtgtcctgagccacaaactgaagatacctatggcttccctccaggtagctctaagccaagtagatagtgatctgtaaactaactgtgtacacaggagtctagtttatttaaagaaactacttttaatgtgaataattcctctaatatagctgtaactctctgaatttaagtgtatatcttaaaataaactgtttttgaaggacaattgccagaactgtgaatggttaacttaccactcggccccagaatatgttgaccttctaagagaagtgcatataggcaaatacagttttccatttgattccagagggtccacagacttcctcaagcctattatttatggattggcaaataatgtgcctgcatttgaaggcacgttattaataatgtaagttattaacaccagcttgcatgcttccttgcttgctgtgatatttttcaggtttcagttatttatgtaacatcttttttgcatggcttattgaaattcttctagaatgtaggcactattcaaatttcttacagtgaaattttttccatattggggacgtagagtcacagtgtgatcatgctaagagcacttgcttcaagacctctgatctctttacagtccaacagagcaataggagataatgcttctgatcattaaatagcttataagtaatctttgaacagcatttaatcttatccagttctttaaaatgttcatacagacagcataatcatattaatgctgaatgagaccttgccttatagagcagctgtttcattaccagccggtggggatagtttcaaattatccaggccctaattatccatattctctcctgttgctcatcaaaagccacttcttagtttggctttggttattttattgttctatgaaactacttctgctgggtattccagcaaaataagagttactaaaataagttctccacttgttagcagaactccttaaaaaatatttagggaaaaatgttaatcctttaacttactgattttaattcaggggctatccatgttgttgacaacacccagaagtcagcatgattctgattgtagttatattatttaccctttaagatctgtaagaagtcaagctacaaaaaataatagactcacagaatgtcagagccrgaagggattttgatattatttaggccagcagttttcatacttggggagagcttagaatgtgcctcaagtgatgcttattaagaacaaatttccctaggataagaaatttaagatcttgcaactagtcagtaaagagccataaattgatattcagtgttttgattcctagctgatgctttctctctacatcagattttatagttattatatgattccagtcaaaggaaatttacttgcaatgtcattaaaacttttgatcaccattcactacctgatacattcaacaaacattggccaggcgtgctgcctcatacttgaaatcctagcactttgggaggccaaggcaggtggattgcttgagcccagaagttttaagaccagcttgggcaacaaagtgcaaccctgtctctacaaaaaatttaaaaattagccggacatggtggtgtgcacctgtactcctagctgcttgggaggctgtgaggtgggaagatcgcttgaacccaggagttcaaggctgtagtcaaccatgatcatgccactgcactccagcctggatgacagaatgagaccctgtctcaaaaacaagaaacccaaaygtttagtgacatctgtatgagagcaattcacaacagtgtcaccctggcagaatacaagtaagttcttgaaggaggacacaaaaaagtcagtaccatagtttttggccccacagtgcccagacctacccaacaatattttacttcttagtaattactttgccttgttaaatataatttaaatttgtgtttttttttccttggaaggacaataatgataaaaggttgagaaacactgctcttgggataataggtaatgcctrgtggagtgaaaaagagttcctggctgggcgcagtggctcatgcctgtaatcccagcactttgggaggccaaggcaggcagatcacctgaggtcaggagttcgagaccagcctgaccatatggagaacgccatctctactaaaaatacaaaattagctgggcgtgatggcgcatgcctgtaatcccagttacttgggaggctgaggcaggagaatagctagaacccgggaggcagaggttgcagtgagccaagattgcgccattgcactccagcctgggcaacaagagcgaaactccatctcaaaaaaaaaaggccaggtgcagtggctcacacctgtaatccctgcactttgggaggccgaggcaggtggatcactaaaaattaaaaaaattagctgggtgtgrtggtgcatgcctataatcccagctactcaggaggctgaggcaggagaatcacttgaacgcaggaattggaggttgcagtgagccaaaatcgcgccactgcactccagcctgggcaacaagagcaaaactccatctcagagaaaaaaaaaaaaaggagttcccaactgagagtgaggagacctggattctctttctagctatactcctagatgatggcataaccattaataagtcattttgcctctctgaggcttagttgcctcatcatcaaaatgaaggaaatctgatagacgaaggtaaatgaccttccaattatgatgacattccaattaaacgtttagttatttttaaatgtacaataagttatcgttgactgtaatctctctgctgtgctatcaaatactaggtcttattctaactacatttttgtacccattaaccatctccacttccccacacatacacagtacctttcccagccgtggcaacctagcagaaacttttttttttttttcctgagacagaatctcgctctgccgcccaggctggagtccagtgcagtggcgcaatctcagctcactgcatgctctgcctcccaggttcacgccattctcctgcctcagcctcctgagtagctgggactacaggcatgcgccaccatgcccagctaatttttgtatttttagtagagatggggtttcactatgttggccaggctggtcttgaactcctgacctcgtgatccacccaccttggcctcccaaagtgctgggattacaggcatgagccaccgcacccagccaataataacttttaagatgtaaagtatatgtacctttatttctttatcatttttatggaattataatttttaacaacatgtatagtatgtaataaaatattaaaatatataggcccaagttaccagctatcatgcccgtcaagatatagaacactttttatcaccctaaaaagttatcttattctccctttacagtgaatccctcgccctcactccatgccctagacaaccacttatctgatttttattactgtagcttagttttgcctattataaaaccgtacagaaatatgtgtatgtgcacttattttaaatgttgcatacggccgggcgcggtggctcatgcctgtaatcccagcactttgggcagatcacctgaggtcgggagttcgagaccagcctgacsaacatggagaaaccccgtctctactaaaaatacaaaattagccgggcgtggtcgtgcatgcctgtaatcccagctactcgggaagctgaggcaggagaatcgcttgacttgggaggcagaggttgcggtgagctgagatcacgccattgcactccagcctgggcaacaagagcaaaactccatctcaaaaaacaaacaaaaaaaatgttgcattcatcattgcatctgaacattttaagaataatctttcataaaaagttggcagttgcacatgaagttcaacatacacttagcatatgacccagtgattccactcctttatgcttatcttagaaaaaagaaaacctggccgggcacggtcacacctgtaatcctagcactttgggaggttcaggcgggcagatggagaccatcctggctaacacggtgaaaccccgtctctactaaaaatacaggcgggcagatggagaccatcctggctaacacggtgaaaccccgtctctactaaaaatacaaaaaattagccgggcgtggtggtaggcccctgtagtcccagctactcaggaggctgaggcaggagaatggcgtgaactcaggagttggagcttgcagtgagccgagatcgcgccactgcaccccagcctgggtgacagagcaagactccgtctcaaaaaaaaaaaagaaaaaagaaaaaggaaaacctatgtccacacaaaaacttgtgtatgattcttcattggagctttgttcgtaatagtccaaaactgcaaaatatctaaacgtctatcagtgagtgattggacaagcaaattgtggtatatccatacagtggaatactgctcaacaatggaaaccaaccagttgctgttattctgacaccatggatgaatctcaaaatatgctgagtgaaagaagacagatataaaagagtacatactatatagtttcatttatataaaatttttatttatttacttagagacagggtctaactatattgcccaggccatctcaaactcctggcctcaagcagtcctccacttcagcctccagagttgctgggattacaggcaaaagctactgtacccagctcatttatataaaattcttggaaaaaacctatataacagaaagcaagtcttatgtattgaacctggggccaggaatagactgaaaaattattgtgaaggagtacaaggaggttgaggcgcagtgagccatgattatgccactgcactccagcctcggtaacagagtgagaccctgcctcttaaataaaataaagtaaggtagtattggtataaatgagcatcagatggcctataaagaaactaaaaaaaaccttcagatggttcgaagtatagcctagattgaaggtctaattaactaaggcatttttattctaccttagtgaatgttaaaattaattcagattgagacaatatttattttaaagacttttagtagagttgaataaactacttttttcctttcttttaatttttcatattaggctgtcaggcaagtactgtctccattattagcagggactttttccaaagaaaccatccaaaatgggatttaaaaatccagtataaaaacacttcagaaatatgagattggtttatatggctagaaaaaaraatcttaaagtcatgtttcaagatatcatccatttccactatttaatgtcttttcactagaaatataagtgaagatgaactttataatctatcttacttaaatatttattaaccattacttctgttggtggtcaggttgtagaatatactgaaatagaaaaaaagatgcccaatgcattttatcagttatttttgagtatattttgtattggtattttgagtatattttrtattggtgttttttattcatgtaattcaatattattcattaccaagtaacatgatccattatagcatatgaaaagatttacagatatacacaaagtgtttgtaatgtcttttttgtatatgatatgattacagatgttgattttcttccgtgtgtctttttatgttttctaactatttttcagttaacatacattacagaatatatgtctgtcttttttttttcttttttttttttgagacggagtcttgctctgtcacccagactggagtgcaatggcgcaatctcagctcactgtaacctctgcctcctgggttcaagcrattctcccacctcagcctcccaagtaactgggactacaggcacacgccacctcccctggctaatttttgtatttttttagtagagacgggattttgccatgttggccaggctggtctcaaaatcctgacctcaggtgatacacccgcctcagcctcccaaagtgctgggattacaggtgtgagccaccgcacccagccaatgtctttcttttttaagttgagtgattctagccttaagggaacttctcccatatcacaagtacatcttccattttcttataatcatatagtctcttattttgtgatgtacttaactgtgtaccacagtggtccccaaccttttttttttttttttagatggagtcctaagctgcagtgcagtagtataatctcagttcactgcaacctctgcctcccaggctcaagcgattctcctgcctcagcctcccaagttgctgggattataggcacatgccaccaggcctggctaatttttatattttagtagggatggggtttcaccatgttggtcagactggtctcaaactcctgacctcagatgatccaccrccttggcctcccaaaatgctgggattataggcgtgagccactgtgcctggaccacagcagtccccaacctttttagcaccagggatcggtttcatggaagacaatttttccgcagaccaggtggtttggagatgaaactattccacctcagatcatcaagcattagattctcataaggtgcacacaacctagatccttcacttgtgcgcagttcacaatagggttcatgctcctatgagaatctaatgctgccactgatctgactgatctgccactgatcacagactgactggtatcagtctgtagccttggggttagtgaccccttgtgtaccatacaaagccttaaatgtccagggatgatccaggactttcttgactactgggatatctgagctgatctgtgtgttagaaatattggatgtcttaaaagatttgtaacaagatataagtacataaggaaagtaataaaacaggagagcttacatagaaagcatcttaaagagtaaataggagaaagggagttttctttggcattagacaagagtcatagccaggaaagttactcttgataaaatttttgttataatgacttcctcattaccttactttatttttaatccccttagtatgtttgtgctactgaaaggagccactaaggagcagtcttttaagattggtcaggaaattgccgaagctgtaactgctaccaatcctaaaccagtgaaattgaagtttgaaaaggtaagaggaatgtaatattagtaattacatataaaattcatataccttctagagacctctgatttgttcagtacattttcagaatcactaacagtatacgggtctattaaagtgttaaatttgggtcactggctcatgtctgtaatcctggcacttcgggaggccaaagcaggagggttgcttgagaccaggagtttgagatcagcctggacaacatagccagaccccatctctacaaaaattaaaaagttaaccaggcatagtggcacacgcctgtagtcccagctrttccagaggctgaagtaggaggaccacttgagcccaggtattcaaggttacagtgaactgtgattgaccggtgcactccagcctggggaacaaagtaagaccctgtctctaaaaaaaaaaaaaaaaaaagtatttaaatattttctcttttgtataattttctcaaaatttgtttagtaatgtatatatgtaaggaaatgaaaactttgttccagtaactattattgtgtaacagatcaccccaaacttaatggtgtaaaacagccagcatttcattctgctcacagattttctggctcaggaatgcagacagggtgcaactggaatggcttttctctgctgcacgatgtctagttcctcagctgagaagactrttaggggttaggggtaacccaaccagcagctaagggttgaaaccatctgaagcttgcttaccatcatgtctggtggttgatgctggctactagttggaacatcagccagaacacctaccagtggcctttcaccggggctgcttgttctccctcacaacatgagggttgggttctaggtgtgaacatcccaaagaaacacaaaagctgctttgttttgtatgacccaggctcaaagtaacacagtgtcccacgcctctctagatttaaagggagtgaacttagaccccactattaataggaagaatgtcaaagtcacattgtaagaagaccatgtaggatggaagatatattctttctttgcaaaacaaagtctaccacaaggactttgaactctttttcacttacctttagatatcaaatatgtatttctttctttctgtataaaagatacttagcctaggaactgtgtggaatacgaagaagcataagacacagtcctgccctctaagagccagtaatctaaaaggaaaggttaggaatgtatataagcagtctcttgttgtaaacataacggaaagcaagatgagaatagcccgcttaaacactgtgagagcacaaaggaaaggaggaattgcgtcctcctgggctggatagggagactccatataggaagtaacaatgaactatgtcttgaaaaattgttagaatttcagtaggcagacatggggctgcaatcattctgcacagaagaaaatggcatgtatggaattggaaaaggacagtatggaaatacggggaagcaggagatagatccggaaaaataaagttgagaccagactgtagactgtcttgaatgccaagctaaagtgtttatactttattcagtaaataaacaaaactggtagcgcaagaaaaggagtgagcaagtggtaacaacttaaagacaattcattttgctcccacgtgttatatcatgaatttgttgggcccaaagtcatatatagaattttttaaataattgatacttgattaaagaaagcacaaagayataaaaataaaacattcttggtggggggaaatggtttttaagaggcattttattaattttaccacaggtatatttgccctgtgttttacaaacaaaaaagaggtatgtgggttacatgtatgaaacactggatcagaaggacccagtatttgatgcaaaaggaatagaaacagtcagaagagattcctgccctgctgtttctaaggtaaggtttmtctatcttgtcttcatctgtaagaaataagtggctaaagtgtctggtgaaaatgtaactacccttaaacatgcatctaggtgaaggaactatagcctatataattaatataactataggagtaactacatgaattttgagaattttatttgtagtgtcttattttgtttttgtttgtttgagacagggtctcactttgtcacccaggctggagtgcagtagtccaatcctggctcactgcagccttgacctcctgagctcaagcaatctttctgcctcagcctcctgagtagctagaattttatttctaataaaaacaatttatttgattttagtccttaagtttctgacttcctcccataccttacgttttatcaaaaattactaaaaagcaatacatgagagtttcctgcctattgcctggagatcatatatgtcatagtgtaacaactcctgaaagcagagcaggataaacaagacaaacagacccggtgtggtggctcacgcctgtaatcccagcactttgggaggccaaggcaggcagatcacttgagatcaggagttcgagaccagcctggccaacgtagtgaaaccccatctctactagaaatacaaaaattatctgggtgtggtggcgcatgcctgtaatcccagctactcgggagactgaggtgtgagaatcacttgaacccgggaggaggaggctgcagacagccaagatcacaacactgcactcagcctgggcaagagagtgagactccatcaaaataaaaagagagaaacataatccattccagattaactgaactttcatttatttggattatcaaatacaaattaggaagatttccaaacaattagctataaattactcaaatttctcaaccataataaccctgatattttttggctttttctttattcgggcctagactccttctatagcaaaacaaaaataaatggtataaatgggaatagcattctatatactgtttgatgagagcattaaaagcatagtggattgaatattatcaatatattatgtcatatatataatattatgtgaatttgggatttttttcagcactatttctggaagagatataatccagtaccttctttctctgtaggcagaattgtactcaagctaaattaataagcttattgtataaatatccattggttccagtattcagaataagacacagagctttcacctagaactaacttaatctacttggccgggcacggtggctcacgcctataatcccagcactttgggaggccgaggcgggcggatcatgaggtcaggagatcgagaccatcctggctaacacggtgaaaccccatctctactaaaacaaaaaattagccgggcgtggtggcacacgcctgtagtcccagctactcgggaggctgaggcaggagagtcgcttgaacccgggaggcagaggttgcagtgagccgagatcacgccattgcactccagcctgagcgacagagcaagactccgtctcaaaaaaaaaaaaaaaattaatcttacataaatccactgcatgctggttatttcctagtagaaatttccaacacagaaaattctgtcatagttatttatcarcatttttataaaaagtcaaaaaggctgattttgatttgactgcctggtgatctttaaacttctctgtgtttcctgtgactgaatcaggaccctttctatactggtaaataaaaaaacaatacatgaaatcgtgtctggtttcttgtacctagaggctttgactattaaaaaaaaaaaacttaacgtgttttatgttgcttatcacatracaaatgttaatttgcatgtcattccacatggttttccttaaactacatgatattctatttttagaaatagcaagctctctaaagtctcaaataactttcaatttttaataattttattatcccatcattgtaagtaacagattatttaggtaggttagcaggttacccagtagttacataattgaaagtgtaataacaatggtgaaacatactaggagatattttatctttacttgcatatcttttttgttttaagatacttgagcgttctctaaagctgctatttgaaacgagagatataagtctaattaaacagtatgttcagcgacaatgtatgaagcttctggaaggaaaggccagcatacaagactttatctttgccaaggaatacagaggaagtttttcttataaaccaggagcttgtgtgccagcccttgaacttacaaggtaatgataccctcagtaccttgccaggatagtcctgagattctgcacaggtctagaagacccaaatgaaaagacagtccatagacacagacacaaaattgtttctttacctgcgcacatgaagcctcactgaaagttagtgaatattccctcatacttcgtaagatgtgaagaggaaatcctcttttgggctttccttcagaaacttatgcaaagaaattgtgacacagtccttgattcatttgtttttcccacatcaaaatcactaggtagtccttaatattgttctaccaaagcatttagatggtatcattctggaatcagatagtttaaccaggtaaattttctcttatctttcatgatagatttaatgatagttagttctcattcttaggggataaaatacatytttttcctgcccctggaggcagggtctcactctgtcgcccagactggaaagcagtggtgcaatcacagctcactgcagccttgacctcccaggctcaagcgaacctcccacatcagcctcccaagtagctgggataacaggtgtgcaccattatggtggctaatttttttgtggagatgggggtctcgctatgttgcccaagctggtctcaaactcctgggctcaggtgatccttggcctcccaaagtgctggaattacaggcatgagccaccactcccacctaaaatacatcttaagctagttgatatctgccaactcattattttccaggtaacagtgatttacagagtaatttttaaactcttgtaggatatctacacttggtgtcaactaagcaaaatgtatatatattattctcaaagaaatagtaattctgttttgaaattgtcttttgtagttttttcattgttttattattgtttaattctgacttaatttgtgagaaagatggcttccataacagtatttgggtgtggtttttttctttgaattcgaataggaaaatgctgacttatgaccggcgctctgagcctcaggttggggagcgagtgccatacgtcatcatttatgggacccccggagtaccacttatccagcttgtaaggcgcccagtggaagtcctgcaggacccaactctgagactgaatgctacttactatattaccaagcaaatccttccacccttggcaagaatcttctcacttattggtattgatgtcttcagctggtatcatgaattaccaagggtaagcttaccaaatagtacatgtgctctaactatggagagatttcactccaaattttcagtagaactaaaggttttatgtgctattgatatgggagtgctgggaagggaagagtgtggtcccgtaaaatgatacggaaagcgggaggggaagtgctgggtagagaaaggtgggtccctggctagggctccacccccacagatctaggtgaggataggcactcctgctttcatgcccaaatgttaccattttccaagaccaccttggcctgccatgccccaatcctgggcctataaaaacccgagaccctagtgggcagacacacgagcggctggacattgtgaggaacacttcggtggaagacccaagcagctggtcgtcaagaggagcacgccagcagaacagcacaccgagaggcactggcatgctggcaggccattgaccggcaggacaaggtggagtttggccagggcagtcagagaagagacggggccacctagaagcccaactccaggggaaaaccatctccctgctgattccaccatcagatgagagctacttccactcaataaaacgttgcactcattctcctagcccacgggtgatcggattcttctggtacaccaaggcaagaacccggaatacagaaagccctccatccttgagacaagctagagggtctaattgagctggttaacacaagccgcctatagacagcaaactaaaagaataccctgtaacacacacccactggggcttcagctgtaaacattcacccctagacactgccatggggccagagctccacaacctgcccgtctgtgtgctcccctagaggtttgagcagcggggcactgaagaagcgagccattgtccctctcgcacaccctgcaaggggaacaagggaacctttcctgtttcactgtgagagcaaagcagatcctctgtcctaaactggcaaagatgccatgctctcctggtttcctaaaagataaacgttttaagtattctacaaacacattcctagcttctatcaagttggccaaattatagaaatattaaaataaatcccacaacaatttcaatggtagccgcaaataacgtagaataagccagttaatagaaaataaatgtacagcaaaaattccttcgaaatgaatgtctaagaaaggtgtaggatttagtatctagacacactagacacagccctgaagaaaccagagtaaagaattactgcaatggtaaaatagcattatagttgttccccaacttatgatggttcaacttaagatttttctacttaacgatggtgcgaaaatgatatgccttctgtagaaaccgtagttcaagtacccatacaaccattctgtttttcatttttggtacagtattcaataaattccatgagatattcaacactttattataaaataggctttgtgttagatgatcttgcccacctatatgttactaagtgttctgagcacatatcctggctctaaggcaggaaactcagattctttattactaatgttcatttcatcatcggcaagaatgttaacccaatgacatttgtaagaggctaacctaataacttttttacaaagggatttattgcggcactattcacaatagcaaagacttggaaccaacccaaatgtccatcaatgatagactggattaagaaaatgtggcacatatacaccatggaatactatgcagccataaaaaaggatgagttcatgtcctttgcagggacatggatgaagctggaaaccatcattctcagcaaactatcacaaggacagaaaaccaaacaccgcctgttctcactcataggtgggaattgaacaacaagaacacttggacacagggcggggaacatcacacaccagggcctgtcggggggtggggagctgggggagggatagcattaggagaaatacctaatgtaaatgatgagttgatgggtgcagcaaaccaacatggcacatgtatacatatgtaacaaacctgcacataccctagaacttaaattataataataaaaaaaaaatgtatctgataatattaagatgtaagttccatgaaggcaaggacttcattcatttctgtagctccagtgtctggaacagtgcctggcacatagtagctactcaacatttgttgaatgagtraatgaacgaatgaatgaatgcctgagtaaacctgtaattagcatgaaaatagcagctttgctgtgaagctgactcaggcttacttctgaatggatgtttttatagatccataaagctaccagctcctcgcgaagtgaacctgaagggcggaaaggcactatttcacaataytttactaccttacactgtcctgtgtgtgatgacctaactcagcatggcatctgtagtaaatgtcggagccaacctcagcatrttgcagtcatcctcaaccaagaaatccgsgagttggaacgtcaacaggagcaacttgtaaaggtacagttttgttccatgggcccagaatcacaagcagtctgatcttacaggaagatatagtcactcttgaattatagtgtgagatacaaaactggtgtgaaaagtgaaatgaagagtctaaatgataaacttcctaaaaatctcaaaaatatcataaactattaataatggtttgttttataatttattttttgttttttttatggaatagtgtgttgtgtttcttaatagctacaacaagaatggccatccatccaatttcttttataatacaggttgagcatccctaattgagaaaaatcaaaattcaaaatgctccaaaactgaaagtttttgagcaccaacgtgactctcaaagggaatgctcatgagagcatttcagagttcagattttcagattaatgatactcaaccagtaagtataatgcacttattccaaaatctgaaaaaatttgaaatctgaaacacttctggtcttaagcgtttcaaataagggatactcaatctacagtattaaaaagaagaaaggaaaagtctcaattgctctactagtgcttaccattctttaaagaaaaatacctagttgtcttagagaattgcttgctagtaaacttggaaggtttataattctgtgagtccaggtagatgattaatggcatgattgagtcatactgtgtgccacagactgttctaggcacctttacaggtgagtaaactgatacagagagtttaagtgatttgcatgttacactgctaagtggccgagctgggatatagacataaaatgcaaggatgatttttcaagtatgagaattctagcagaaataaacaacaaacatctcaaagtaagttgaagaatgaaatctaaagaaaaatttgccacctcgcaccccccaataaaatcattactccttattgttgataagtcatctccgttctgtccctacctgctatccctctgtcacgatttcttgctcttctctgtcacactctacctcgacccataccatattgaacttctcttaggtctgtgaatgcccctcgccgcctcctcctggcctttaaacaccctgctccttctgccaggaacactttcctctacctatcccaccccaccccccatcttctgaggaatcagctgaaacctctggactgggtgaagccttccttgcagtaggctcctgccataatctcctctgctttactgtgatttggggtttgtctgtcttcctcactaaatagcaaatgaaccagtgaggacagaggcccagttctttgactgtcaagtcagttatgcctagcatatagccaagcccatggggctggtctgtaaatatttattgaataaatgaacaagttcctggttaatgcatgattaaagaaggaatatatcactggagttattaccaaccaactttcagccattttttaccagttttgtggttctagtcagtacaaccactgaagtcactgggtgctcccagcttctatttatttaatagacttctgtcctgatggcagcagccaactctcatagaaaattcccttgctggatcctagtatgacgcctaaawgagagcaggacctccagggctctgctaaggtcaggctgttaaatggtcctttcctagactttcttatgttttttctgcactcaatgacaaacacatcactacttggtgccatcaatttacccagagcccatcctccttcaacattaggtgttcattctttttttctttttatttatttatttttattttattttatttttgaggtagggtctcactttgtcacccagactgaaatgcagtggcatgattacagctcaytgcagcctcaacctcctgggctcaagtgatcctctcagctcagcctcccatgtagctgggactacaggcatatcccaccatgttttactaattatttttttttagacatcgggtctcactatgttgcccaggctggtctcaaactgttggactcaagcaatcctcccacttcagctgcctaagggctgggattacaggcatgaaccatgatgcccggccatcttatttcttataaaaatacagtttaaaagaaagtgatgccacagccataaaaaaagaataaaatcggccgggcgtggtggctcatgcctacaaatcccagcactttcggaggccgaggcgggcggatcacgtgaggtcgggagttcgagaccagcctgaccaatatggagaaattccatctctactaaaaatacaaaattagccaggcgtggtggcacatgcctgtaatcccagctactcaggaggctgaggcaggagaatcgcttgaacctgggaggcagaggttgcagtgagctgagattgcagcattgcactccagcctggggaacaagagcgaaactctgtctcaaaaaaaaaaaaaaaagaacaaagaacaaaatcatgtcctttgtaacaacatggatgcagctggggctattatcctaagcaaattaacgcagaaacagaaaaccaaatactgcatgttctcacatataatgaacattgggtactcatggacataaagatgggaatgatgaacactagggattccaaaaggggggtgaggagaggaaaagttgaaaaaccacctgtcagatactacatttactgcatgggcaacaggatcattagaagctcaaacctcaacatcatacagtatacccatgtaacaaacctacatgtatacccttggatcgaaaaaaaaaaaaaaaagaaaaagcgatgctatttataaataatgatggtttgtcatctttcaagagctattttaatttgaggtgtttttcaagaacgttcaaatgaatgtctcccatacactaatttgtagaaatttttaatgaagcagaaattactagagatgtaatgagaattagaaacacatccaaacaggagattttacatcattctcaatccaagaccaatcaagtgatcagaaataagtgaaattatggaaattgtaaacattataagtcagaccttgtgattatatatcaaactctgtaacccagtaccaaaaaatgtacttcttaagtgtttctagaatgttttaaatgtctcccatgcactaatttgtagaaatttttaatgaagcagaaattactagagatgtaatgagaattagaaacacatccaaacaggagattttacatcattctcaatccaagaccaatcaagtgatcagaaataagtgaaattatggaaattgtaaacattataagtcagaccttgtgattatatatcaaactctgtaacccagtaccaaaaaatatacttcttaagtgtttctagaatgttttaaaaatatctggccaggtgtggtgactcatgcctgtaatcccaacactttgggaggccaaggcaggtagatcacctggggtcaggagtttgaaacgtttggccaacatggagaaaccccagctctactaaaaaatacaaaaattagccaggcatggtggcatgagccttgtactcccaactactcaggaggctgaggcaggaaaatcacttgaacccaggaggcagaggctgcagtgagccgagatcacaccactgaactccagcctgggtgacagagcaagactccatcttaaaaaaaaaaaaaaaaaaaaaaaaaaaaaaaaagtcatagtctgttaaaaaaaaaaaaaaaaaagcctcggctggggatcatggctcacgcctataatcccagcactttgggaggctgaggcaggaggatcacttgagggcaggagtttgagaccagcctggccaacatggcaaaaccccatctctactaaaaatacaaaaattagcagggtatggtggcaggcacctataatcccagctacttgggaggctgaggtaggacaatcgcttgagccagggaggcagaggttacagtgagctgagattgtgccactgcactccagcctgggcaacagagtgagactccatttcaaaaataataaattaaaaataaaataataaaaattaaaatttaaaattagccaggcatggtggcgggcacccgcaatcmcagctactaaggaggctgaggcaggagaatcrcttgaacctaggaggcagaggttgcagtgaactgagatcatgccactgcactccagcctgggcaacagaatgagactctctctctcatctcaaaaaaaaaaaaaaaaaaaagaaagaaagaaaagaaagcctcagtacatttcaaaaagtagaaatattacaaatgaatgtaatacaatgctataaaatggtaattaattacaaactaaaaaaaaaagtgatccttccacttgtaaattctgttaaacaaaatgaaaacactgcaaatcagattctagatggcagacctcagagaaaaattcatcaccttaacactgttaatcataaacatgaaagaatgaaagcaaatgaagcaagcatctgactgaaaaattttttttgagacggagtctcactgttgcccaggctggagtgtagttggtgcaatcttggctcactgcaacctctgccttccaggttcaagcaattctcctgcctcagcctcccgagtagctgggattacaggcatgcaccaccacgcccagctaattttcgtatttttagtggagacagtttcaccatgttggccaggtggtctcaaactcctgacctcaggtgatccacctgcctctgcctcccagagtactaggattacaggcatgagccactgtgcccagccttgactaaattttttttgaacaagaaagccaaaggatagtaaaaagaataaagattaaagcagatattttttaagtgcctgcctccctatgtgctacaaagtagatgtccgggttggggcactaaagttttaaatgtaagcctgaatcaagctataatgctcagggtttaaaccagtaaaggatcttgaaactaaacactgagttaaatttagtgagtcaagtaattccatcctggcttatttatcagacaagcacagaaagagcttaaatatttatcagtttgtcctggcacctgaatgtaactgcaattcatagagctgtaatacagaaattctatatttgggaatagatttgagtctcttggcagagatctaattagcaaaggcttcatcatagaacagcatactcagtcttcatggagcatactgaagcacatgtttgtaagcagtctgcttgtgacaatatcataatattggatacagtaaccagtctacttagaaaaagtgtgcccttcggttaactggaagataactggggcaaagaacaaaacttcactggcctgtgagccatctctgaaactgaaaccctttgataaatataratcaaagaattcactagagcrtatttgatttctcttaaaagacaatccagagtagttgttgccatttggtatggcttttttaaaatcacttgtctacactattcaggtgaaagtcggcctgcattttcttaacctttggagtcttcattggcatcctttttaatttttttatgttcttcatgttttataaccttttttttaactatatatgcaacttgagactttaaagtatttttaaaaattgatcattgtgtaaaacattatagtgcttctctttttaaaaattgccttatgatttattattttccttaagatcagatcttattatacatccaaatcatctgggaagccttaagaagtacagattcttaggctttcatgcctggagattctgactcattatgggtctgggatggggcacttgtttatttttaagctcattgttagccagggttaagaaccactggtctgcaccactactttcaaattcacattatttgattttttttttttttgaaattttacagctgggtctctgggggtgacatcacatgttggcaggttccttgatgccccttgagccacaaaaccagcaagtttttattaggggtttcaaaaggggaggggtgtacgaatagggagtgggtcacatgcttcaaaggcagtaaaatatcacaacagcaaagaggcagagtgagatcacaaggccagggtgaaactagaattactgatgaaggtccatgtcgtgctgggcacacattgtcattgataaacatcttaacaggaaacagggttcgtgatcagacaaccagtctgactagaattcgccaggctggaatttcctaatcctagcaagcctgggggtgctgcaggaggccagggcatatttcatcccgtgtctacaactgcataagacagacactcccagagtggccattttagagacctacccctgagaatgcattcgttttcccggggttattccttgctgagaaaagaattcagcgatatttctcctattcgctttctgaaagaagagaaatatgactctgttctgccaggccctgcaggcagtcagattttatggttatctcccttattccctgcaaatcgctgttatcctgttcttttcaaggtgctcagatttcatattgttcaaacacacatgctttacaaacaatttgtgcagataacgcaatcaccacagggtcctgaggcgatatacatcctcagcttacggagatgacggaattaaaagattaaagacaggcataggaaattataagagtattgattggggaagtgataaatgttcatgaaatcttcacaattcatgttcagagattgcagtaaagacaggcataagaaattatgaaagtattaatttggggaactaacaaatgtccatgaaatcttcacaatttatgtttttctgctgtggcttcagcaggttgcttttctcttctggaatacgaaaaagagtaacttttttatgattggcatatgagaatatagtctaagtactttgaaaacgtgtttatagttcatgtaagagacattctttggtaattgggtagcttatgtagattttaataggattccattgtaaatgaaagttaatcttaggaattaaatgaatccttagggaaatttgtactctatctttacaaaataatatcctttagaaatgtctcaacatagggtagtctaggcttccaagagattaaaattaatgaaagtttctgtaatgtatgtctgccagtaatctgtggtagtctagaaagtagggattataaaaatttgttgtttgcatacacgcataaaaactttcctattattttttgtatttctcttatgctttcagatatgcaagaactgtacaggttgctttgatcgacacatcccatgtgtttctctgaactgcccagtacttttcaaactctcccgagtaaatagagaattgtccaaggcaccatatctccggcagttattagaccagttttaaattgtcaatatcacagtattacaggtgctatttttttcagtgcttaccactaaactgttgtgcatggtgctttttaactttcatcgagtcaaggatgttcactgtctgttatctgaagactatgaagacttctatgctaaccgaattaaaatgtacttgttgatctctgaatagctcacttcttacaatgtacaaattcctcattctgtcaccttttaaacattgttttataatgcaggtgttggatttgctccagtatgtgtaccatcttgtaaattcatttgagtagatcatgtttacttcccagtggaaggagcactgaaaacctcttaaagaaaaagcatttgtgtgttttccttgaactgtctgtatcaagacgtgttacttcgagatatccattcactttataattttgactgcaaaatattttgtaaatacacttttttacttttcaaacgagyaaaataatgtgcaatgatttttatacaaatgattttcaagttgtttggtatatttcctctaggttttgcttgactcaaagtagatcgttattttgatcaaactgtgcaaacagtagtaccacgtgtagcattttgaaacattawtttttaaaaaatgctgtcttgctttagctattaatggggcattgtgaggaactgtgcaaagacatttttgttacaaacctgtgggcctgttgcaatactttaaaaataaaaaattttattccatttgcttgttttgtatagacatttctattgcttctaaatatacttaaaatattttctttccttatgtactgtacagttaatcttatttgccatcatcttgaacacaaaatgtgtatttagaatatttgtataactgtgtaaaataaaaaaggaattatgtggtcagtgcattgttttttaaactggaaatcatkttgttttaaaagttaataatggaaaccatattaaaattgaataaaatataaaataatatagcagtgtgacttcatcttttttataagcctgyattggttacatctttyttaccctacccttttytgagttttaatgaagtaaattatttaacatatttttatatcctgtttgawattgcaatttccttaccaaaacttyttcagggttaaaamamaaaaaaaaaaawaaaaaaagggcagcaaaaatgggaaaatttaatttagcactcatccttttagagakttttaagagtgtacttgttagtagatcttcagtgttcattttcattttgatataattattaattaaattacagagaaagcaaaaactacattacttcttaaaaacttaaatgccaatttttatatgcctatttttttcaatagaaaaaagttagttattattttaacagaaataactcacctggttatttaacagaaataggtcttccattgccagaatatgtacttgcaaatgttgggaggattctttttctgaaaattacatggtaaatatggaaccaaagagatacatagcctgtgtctgaacataatttatttcaagtcttgttaagacataatgaatttccacttctggggttttttttttgtttgggaggctggggctagtcctcagcattggggttttttcccccttttatatgtgtagattgatgaaattctgttacttacaagttctgtgctgtcaggacttccacacacatcatctctttctcatcatagtaacttgacacaatattttcaacacaataaccatttttaacctgattgattgattataattggatacagccatattaacaaatggttattcaacatgaatgcctaaaactagctcacactcagcctgtctctggttctgttttctgcaggaaagctcctcctttgtaactgtcctcagagtctgtagcttaactgccttttagtgaggtccatttgctgtttcactaactcatcggggagggtgctgaaatttggaactattttaccaagaaattttcttgtaaggatcttcctgtgttccataattttccctcctttttagatgattggctattaataaagttttgtctctcagatcacagaaaaaaaaaatttaagtatggctgaagaaacagtttcattctttaggatgttttcatttacctgaaaaggagccagaagctcagagacatcaaataacttcattaaacatttccttaatgtttaatgaattaagtgaaacattaatatttgttaaagttgtttaacattgttttctctcatttttctcactttctactcaagcttttccctagatgaatcatgtaataatcaattctatatggacacaacatagtgtctttgaggaaggacaataaatttggaaaaaacataaaaatgtgaagagagcagttttaaagatatgaagaattcttagaggaggtggccctcatcttgccaatggagcaggccacccagagagcttgtggactccgttcaaccccactgactgtcatgggttataccctcagtctcagatgatgcaccctacctgccatcaagtgtgccaccctgatcacctaaacatcttttccggatcttacattagttaagtcttgtagctgtgtagtcgatcttttcatctactctcttttattttcataacagttggagtacaggaatattccttaaggcccatcaaataagcttgttttgtcttgaggggtcttgcattgttgcccaggctggagtgcagtggggcgatcttggctcactgcaacctccaccccgagttcaagcagtcctctcacttcagcctcccaagtagctggggctacaggcatacaccaccacgcttggctaatttttgtatttttggttgagatggggtctcgccctgttggccaggctggtctcgaactcctgaactcaacgatctggctacctcaggctcccaaagtactgggattacaggctactgggagccaccacgcccagcccaaataagcttttaaattgacttctctattgtagactagtatttcttaaaatagtcacatttaattttataaagtaaaaataaatctggctataaatgacattgttagggctctgccatcagctgtggaggttgggggagatggcaatgcacaagtagctacttttaggctggatatgccagacctctattagtgaactctgtacctctgggaggatggttggcattcacaccctactgatttttaatcccataataccatgtgcccttttcccatgatgtgatgagaattgttacctttaaccatttgaggttttgttttgtttcagacagggtcttgctctgtcaccgaggctggagtgcagtggcatgatctcggctcactgcaacctctgcctcctgcctcaagcgattctcctgcctcagcaacctgagtagctgggattacaggcatgcgccaccatgcccggctaatttttgtattttcagtaaagatggggtttctccatgttggccaggctggtcttgaactcctgatgtcaggtgacccaccatcttggcctcccaaagtgctgggattacaggcatgagccgccatgcccagcccatttgagttgtataatagtggataaaattcagaaacattaatgccccagttctgcttaataactagctttgcacaggcaaatagtcacagattatgtctatacttgaaatccaaggaggaaatcaaaacacatgcaccacctaatctacttctctgtctactttcctcaacctacccaatagctgcattttggcactttggccaacctccaagagtggtttacaaagcaaaatatcttgtggaggagttctcatattcataagatcaggtttctttgtatatctggtgagaagagagtgtaaccaggaaggcagatgaagccattttttaaatcaaaagaacatcttactgcctatgagtctttacctgtcttgctactgatgccaccacaagtgtcttgaagggaaggacaggaaagttttggggaaagtgatagagtaaggagctttcatgctctaggcttccccatgatcactaatggcaatgcaactctttggaagagtaactcatttggtcatagataccaagtttaaaaatattcacactctgaaaacaggataataccacctgccccctgattacccgacagaggctttgcaaatatgaatatgaatataaaaagttacacagattttaagtatttgccattcaataaatatttactaaccatcaagatgtgcatggcatttcactcatctggagataccgaggtaatcccctgcccttgtgtatttcatagctgtttgggagacacacataagtaaatgggcattagatacaagatgatgtgaagatgtctttgctgccgcctcctcccctattggaagaacccaaagttaagaaagacaaggtcaggccaggaactatggctcacgcctgtaatcccagcactttgggagtccaaggcgggcagatcacaaggtcaggagaccgagaccatcctggctaacatggtgaaaccccgtctctactaaaaatacaaaaaaaaattagctgggcgtggtggaggcacctgtagtcccagctactcgggaggctgaggcaggagaatggcatgaacccaggaggcggagcttgcagtgagccgattgcgccactgcactccagcctgggcaacagagcgagactccatctcaaaaaaaaaaaaaaaaaaacagaaaagaaaaatataaaaatttagccagacgtggtggggggtgcctgtaatcctagctactcaggaggctgaggcaggagaatcgcttgaatctggggggtggaggttgcagtgagctgagatcgtgccactgcactccagcctgggtgacagagtgagattccgtctcaaaaaaaaaaaaaaagagaaaaagaaaaagacaaaaaattagccagacatggtcgggggtgcctgtaatcctagctactcaggaggctgaggcaggagaatcgtttgaacccaggagacagaggttgtagtgagcagaaatcgcgccattgcactccagcctgggggataaagtgagactccatctcaaaaaagaaatgaaaaaagaaggtcaaaactgataattgctagagaactcaagaaaggcttaggaacagaaggccccaggtaggaacggattgtttaaaaggaagagttagacttcacaggccaccttgattccacatttttaggtgaccacatcctgtctaccgcccaacaacacacacacacactttaggtttattttatagagaaaaagaaccagagaggcactgaactgggggacactaggcactgaggagagaatgaggtatcactgagcgcagggagaggaagtggagtcggcatgctcaacggcaaagtgagacctgctcaccctttcccaaggtgtgagatgccacggtcagggccatagtcccatcatcaccgtgtgctgctgtgactcacagcacattacaattgattatctgcaccaacatttaatatcaatccctctattagactgcaaataccacaaggtcagaaatcatgcctgatttgtgtcccaacattacccagcaccagcacagtgcctggatcttgctatagaagcaatggtacctgagcacctcagacagatcaaaaatactggctagagggaagcatagggattgtagctatataaaagcttagattctttttaaaatatgcttttattttttcaagacagaattttgctcttgtcacccaggctagagtgcagtgacgcgatgttggctcactgcaacctccgcctcctgggttcaagtgattctcctgcctcagcctcccgagaagctgggattgcaggcacacaccaccacacccggctaatttttgtaattttagtagagacagggtttcaccatggtggccaggctggtctcgaactcttgaactcaggtgatccacccacctcggcctcccaaagtgatgggattacaggcatgagctactgcgcctgccctaaaatatgctcttcttttatatgtactgctaccaataatctacatttaaaaataaagcggaggtaatgcacatgttaattaggtcaatttcaccttccacaatgaatacatatttcaaaacatcatgttgtacacaacaaatacaattttgtcaactaaaataaatttaaaataaagcagacgagatgtatattatacacacacacacatataagcacacttctgtatatgcactgatatctgtggaaggtgcacaaaagggagtggttaccttggtggcggttaaggctggggggtcaaaagtgagatcacttttcaattcacctttgtactatttgattttattactaaatgaatatattaccccccattaaaagaaaaaactttgtgtctgtttctattgctactggactgcagctatcaaggctacttgattagagtccttttggaggtcattctttgcatggagccccaacagagttccccaggcagagtgtggtgagctcccagctgcattatcttcccagacttgccaggacaactaagtgttttcatggcccataacctcattagcttagttagggtgtcccacctggttttcccagccataacaattatggaaaatgtttattatttcccttttgtggatagtctcttttactaaaattgtgagcatcagtttctgattaaaattcctccttttgtggttgttttattttttctttgattgagtgccttgggaataataataatagctgggtttttttttttttttttttttttttggagatttgctctgctctgtcgcccaggctggagtgcagtggcacaatctcggctcactgcaagctccacctcctgggttcacgccattctcctcctgagtagctgggactacaggcgcctgccaccacgcccggctaattttctgtatttttagtagagatgaaatttcactgtgttagccaggatgctctcaatctcctgacctcatgatccacctgcctcgggcctcccaaagtgctgggattacaggcttgagccaccaggcctggccttttttttttttttttttttgagacagggtcttgctctgtcgcccaggctggagtgcagtggtgcaatctctgctcactgcaacctctgcccccagagttctagcgattctcctgcctcagcctcccaggtagctgggattacaaatgcctgccaccacgcc

SEQ ID NO: 94160 - DNA, 318999 bp, Homo sapiens
cttttcaatggaaatgatgttttttaaagtagaatgtggccaggcgtggtggctcacgcctgtaatcccagcactttgggaggctgaggcaggcagatcacttgaggtcaggagttcgagaccagtctggccaacatggcaaaatcctatctctactaaaaatataaaaaaaattgacaaatgggatctaattaaactaaagagcttctgcacagcagaagaaactaccatcagagtgaacaggcaacctacaaaatgggagaaaattttcacaacctactcatctgacaaagggctaatatccagaatctacaatgaactcaaacaaatttacaagaaaaaaacaaacaaccccatcaaaaagtgggtgaaggagatgaacagacacttctcaaaagaagacatttatgcagccaaaaaaacacatgaaaaaatgctcatcatcactggccatcagagaaatgcaaatcaaaaccacaatgagataccatctcacaccagttagaatggcgatcattaaaaagtcaggaaacaacaggtgctggagaggatgtggagaaataggaacacttttacactgttggtgggactgtaaactagttcaaccattgtagaagtcagtgtggcgattcctcagggatctagaactagaaataccatttgacccagccatcccattactgggtatatacccaaaggattataaatcatgctgctataaagacacatgcacacgtatgtttattgtggcactattcacaatagcaaagacttggaaccaacccaaatgtccaacaacgatagactggattaagaaaatgtggcacatatacaccatggaatactatgcagccataaaaaaggatgagttcatgtcctttgtagggacatggatgaagctggaaaccatcattctcagctatcgcaaggacaaaaaaaccaaacaccgcatgttctcactcataggtgggaactgaaaaatgagaacacatggacacaagaaggggaacatcacactccggggcctgttgtggggtggggggagcggggagggatagcattaggagatatacctaatgctaaatgacgagttagtgggtacagcacaccaacatagcacatgtatacatatgtaacaaacctgtacattgtgcacatgtaccctaaaacttaaagtatagtaataataaaattaaaaaaaattaaaaaaaaaacacagctatgaattgcgagtggcagaagaacatacagagaggaccagtcagaaagaaggtctgcatttgaaattccacccagcacctggtcattctgtgcttctggaggcaactgatggagccttctcagggtatgtggtgaatgcataattataaaatacataagataaccaagaaaacaattaaactggaagtgttttcaaaatataaaacattctaaatttgtaaaatatatatatattatatatattttatatatatatatatataaaatatatatatataaattagctgggtgtggtggcacacacctgtagtcccagctgctcaggaggctaaggcatgctaatcatttgaactcaggaggctgaggttgtggtgagctgaaattgcgccactgcactccagcctgggtgacagagagagactgtgtctcaaaaaaaaaaaaaaaaaaagaatgtgaatgctaaagatgcttattactacaaaattgtcattacttctaggcctttccaagggacaaaggaagtaaaatgctttttttcccctaataattcttactgggatataagaaaaacattttttaaaaagaaaagaatcataagttcatattctttctaattcaactttaatattacatggattctacttactctgaaaatcactgttcctaaaaactctagtaatttttacctatatatacatgaatagtttgaaagtactataatagtatctgtatttcaaccaccaataagactattgactaaagcttaagatatctttgtagttctatttatcctgagcatatattctgattgtacagtgaaaacaatattttctaaagtaattaaagtgtttacttggtatggttatgccaccaacttaatatacagttagattatttgttttcaaattttaggaattgcatttttctttcggatttgaaattattttgaaaatgtaaaacatatacatgattctaaaatcaaaaccatatagccaaggcttattcagagtagtctagcttccatgcctgtctcctccacctgtttcctcctattccaaatatatgcaaatactcatttgtagtttagctatcttacaaaaaaaaagcacatatactgttctgcactttggtttttttttttttttacactaatatatattcggagatcatttcacctcagtgtaaagaaatggccctcgttctttttcacagttgcatagtttcattgtgtagatctactcgagtttgttcaaccaatctcttatttggggttatctggattgtttccaatcttttgctattacaaataatactgcaatgaataaccttgtgcttaagtcattatttgggatattttcctagaattgggtttctagggcaaagggcaatatatatgtaattttgctgaggattatcaaattcccttccatagctgccatgtaccattttgcattctcaatggcactatgtggcatctccatagcctgctaaccaagtaggtggtcaaacttttggatttttgcctccttttatcatctttgcccaagatacaccacgacgctttcatctgcctttggaagaactctctcaggataaacaataggtgattgtattgagggtgacataaggagggtggctgcaatatctctatctatttccactcacctaatcatggaaatgccagcgcccacagcactatccttgttaagagcttgtattttccaaggctggctcgggtttccagccaaagaaaaggacatcaaatatgaccttacttctttctaaggtcagtagaatgcagagtgcccagtgagttctactggtataagcttcagaatcctgaaaaaggtagaggaggaactgtgatcattttttgtcagcgtgctgtctccaaaacaactccgatgccaaggggaagtccctgagtgtggctgaaagtttccataggttgtggagtgaccactctctaacctgcagggctactcacacccaggacttcttttttgctgctttgtaggagtaaatgtcatggatggacactgtttttttctttcagcatctcccatttcccagtgggcaattttgcactccagggtgacagacatttggtaatgtttggagacatacctcgttgtcacaacttggaaaggggtgctgcttaacatctagtacgtagaggtcaggaatgctactcaacaccgtacaatactcaggactgccccccttcccccaacaaagaattatctggtccaaaacgccaaaaatgccaaggctgagaaatcctgctgtattctttctttatgcacacattcacagacatctttaatataactattatcagtggcagaggaagggcagaatcacagatactccccctccctgtttctccaaaagtcactagcaattcagaaatttctttaatcataaagactctaaggaattatatatttatctgggagattaaagaacaaataccattttaaccttctaaaaactgattatcattaagtataatgcaaccttttaactgtaagtataaaggaaaatgctgattatttaaagtaaatgggacccaaagtcccatgaataatcaaaaacttggttaatagagtatgaccagagaataatgcacttggcttctgtggagawattaaagtacatgctgtgaattgctattgaggaaattgcgtgaaaagttacccttaaggtaccatgaggctgaagaaacagcctcaggtgcacaatatatcacattagtctctatctatctttgtattttcatgacttctttcaccttggataacccagaagctctggccttggaactttttggaatggtaaagtatctcactctccatatttattttcatctcctggaatggtaaagtatctcactctccatatttattttcatctcctaacagacctgaattttgttgccaagagtttatctctttcacaggaattattttcaaacttcagcttacttactttaagggcatagactgtgtttgatacttataatcacaattcatgttaaataaaatgtgcccctgaaaagttacacctaaactgaatttttgtaaataaaaaatttaaatcacaaggaaaacttgccaaagggagagtatgaagctaaatcttttgtagagaaaatcatcttgttttgcaaagtgaacaactactctttaagtcccaatctttatttgtagctcaagaggctggtacagtattatgcatgatgctcatttaaaaaatactgacaggctgggcatggtagctggtagctcacacctgtaatcccagcactttgggaagccgaagtgggcggatcactcgaggtcaggagtttgagaccagcctggtcaacatggtgaaacccagtctctactaaaaatacaaaagttagccgggcgtggtggcaggcgcctgtagtcccagccacttgggaggctgaggcacaagaattgcttgaaactgggaggcggaggttgcagtgagctgaaatcgcgccgctgtactccagcttgggtgacagagcaagacccatctcaaaaaataaataaaaaataaaaataaaataccatgaatttggaaggattttgaaagttttagagagttttataagctatttttaagagtgtaaaaaatggataatatatcctttattaagaacggttaacacctgttttaggtgataagaaaggaggtaagatcttaggcacatttgaaaaaaaaataggtagcattacttaaaagataatcatattgactgtttcctctcagcaataaggagaaaagagtggatgggagcctattatttagacggtgtaatctttcgsttagaatacggattctgaaaccagattgtctgggctcacatccctgtctagtgtggtcttagggaacttacgcgactcgactgcaccttagtttcctcatacaaaacacggagaatactaatattatctacttaatgaggttgttctgaggattaaataaagtaatacatgaactagtacgtgaaaagcactccggtcagcgatagtcttcaatcctggagttgagctccaggctaggcataaagaggaagataagaggcagggagtaggcaacgtttcattcttcctctccgcacccgcgggaaggaggcaccgctgtttctcccaaggctcagcgaggaggccggtaattcgaagttggatccgaggactttccttgggacccctttccgccgcaccacgctgccttatgtctggttgggccctgaggacacgagggctcagccccacgccccgactaggcgttccaccactgagacgtggccccagctccaggaggcatgcagcccgagaggccgccttcacgcccggccacggccactgccactgccaggggctggtggcgatagcgacaaaaagcttccgggaggaactggtgcctccgcccgacgcccttccttgcgggcaagccgggggctgaccgttgttcgtgacaccaatacttatgcatgccactcagtgctgggcgccggggactctaatgaatccagactcggcccagataccgtgtgcagagggaccactcgccgcccacaactgatccctgtcactgacgacctttgctggcccagagcggcggggtgggaggagctgaacctcccaacccgggttcacctccaaagcaccgcccctgcgggggcgttctcgggtacgccgtaaagtagagagtatacttaacaacccgcctctgtctttacggcaggccgcattccatgcctccaatatggcgtcctccacataggcagtggctgtggtttctaccccgggtggccgggggcagtgctgagctgggactgttgtttgcccagcmtgggctgcagaaagcagcagttaaagttcgtttctggtcactgctccaggaagccaccttactctgagggtcaagaattgccgcttccttttagttactgtaagttcctcctctgcccctggtttgtttcccgcggcacttctggatacccccaggtcccagacccttccagactcaaaccatgaacyttcsgcagctgctgttgcacttgccacgttatcttggagcctcgggttccccgcgtcgcctgtggtggtccccgtccctcgacaccatctcctcggtgggctcttggcgtggtcggtcctccaagtccccggcccactggaatcaggtagtgtcagaggcggagaagatcgtggggtaccccacgtccttcatgagccttcgctgcctgctgagcgacgagctcagcaacatcgctatgcaggtgcggaagctggtgggcactcagcaccctctgcttaccacagccaggtgagctacccctctcccgctgacacactcgcactcattggaatacttttttttctggcgggcatacgcattctagctctctcagactggctcctgatttatctctttttagtccttcctttttactcactcctcctagacattccgtgttgtctcttctctagtccacttaacgttcttgctcagctgagtgcataagtggttttctttgaaacacttgtatgctttcctcgattttgcttcttaattgttgaggatgaagatgcctcagtgatttgtggagaaatcgagcggagatgtaggtttattgagtcacttcctagaaatttttttttttttttaatgggatagattaattttctgtcccgcactgttcagggggtcacctccagaaagtaggcaaggagagagagagaggctgaaggtagataattctttccaacgaatgtcttggggttgaagtaggaatttatcccgttagtagtcattatcttcttgggatgtttatcacttatgctgtactactgctgtgaaacctgcctttaggatttataaaagttttttttttttgagacggagtctcgctttgtcscccaggcgggagtagctgggactacaggtgcccgccaccgcgtccggctaattttgtttttgtatttttagtagatacggggtttcaccgtgttagccaggatcgtctcaatctcctgacctcgtgatccacccgcctcggcctcccaaagtgctgggattacaggcgtgagccaccgtgcccggccaaaagttttttttttttcttccacttaaaccccacacctgaattgtaattagtttaaacatacagcgaagttacaaaaataatatagttcaaagaacacacttgcatactctttaatcagatccacctgctacgtagatatgtctatatatgtcaatatatacattaaatacatatacacacagatatatatactattcacgtgtatatatctttctatatatttttttctgaatcatttgatggtagattgcatacatcacgatccttttcccctaaatacttcagtatgtatttcctaagcatagcagtaatctcctacgtaagtacgctacagttaccaacttaggtatatttaatattgatacaatacttttatttaatctaccatttaatttcaattttgttaattggcctaataatgttctttatagcattctttaccctccaggacaggattcagtccaggatcaagtattgcgtttagttgttatatctctttcatcttcttcaattaggaacattttcatatctcttcttggcttttatgactagagcactggttctcaactggggcaattttccccccctgaggacatttggcatgkatggagacatttttggttgtcacgaatggaggcacattactggcatttagtggatagaggccagggatgctacccttcaattcccaggacagacccacaagaaataattaggtgctgcaaaatgtcagtagtgccaaggtggagaaatccaggactaaaaggacctttttctattgttgtttttaaaagtaaacttctattttgaagtagttttagatttacatgcagttggaagaaataacacaaatctaatatacacctaaccctgtttctcccaatggtaacatcttttgaaacgatggtgtaatatcataagcagggtatttatgttgatacagttaagataaagaacatattcagcactataaggattcctcatgttgcttttttagccacactcacttcccttacccaccccttgctttaatttttcgaggcacctgtcattttcttactacaaaagttatcaaatagtaataataaagtgattttattccttggcatygttcccagttatcaggaatgtcaccttatgattagctggaatgttagttttccagagattctagatgatacacactcaaaacacatacacatatgtttaaagcttaatgaaacgaataagcctactattacccaacttaagaattgtaactttaccagtcctgttgaagctaaatgtgtactcctcagtccatctccctgactcccactaaactgtttttaaacacttttccttttcaaaattaccaggggtcctggtgtggtgtctcatgtctgtgatcccagcactttgggaggcaaagtagaaagattgcttgagcccaggagttcgagaccagcctgggcaacatagcaaaaccctatctctacaaaaaataaaataaattagttgggcgtggggatgcacatctgtagtcccagctgcttgggaggattgcgattgcttgagctgggaggtcaaggctgttgtgagccgtgattgtgccactgcacacctgtctgggcaagagaccctgtctcaaaataaaatgaaataagtaaaattacattgttatttttctaaataataatgtttcattttactggtttctttgcaatgtacaaatatgatagtttattgcatatgaccttatgtgacttcctttttaaaattcatggtttctgagattcatccrtgttgtgtgtttaactgtagttcattaggtttttactgtgtgtgaaattctgttgtgtgaatataccatagtcatcttttgtttgtttatttattttcagacagagtttcactcttgttgcccaggctggagtgcagtggcacagtctcggctcactgcagcttccacctcccgggttcaagtaattctcctgcctcagccccccaagtacctgggattataggcgcccgccaccatgcctggctaatttttgtatttttagtagggacagggtttcaccatattggccaggctagtcttgaactcctgacctcgtgatctgcccacctcagcctcccaaagtgccgggattataggcgtgagccaccacgccgggcctcacagtcatcttgtaattaacatttgggttgttgcatttgttaatattatgaaaaatgctgttataaatatgtttgcatatcttttggtgttcatgtcacgaggatataaaaacaagagcgtaattgttggatgtgcacatgtttatctttagaatgctttctaaagtgaatgtaccagtttatactctcataaacaacttctgagttcaggttactcctagttctcataacactagaactaagagatttcttaagttttttttttttttttttttttttttttgagacagagtctcgctctatcgccaggctggagtgcccagtggcctgatctcggctcactgcaacctctgacaccctggttcaagcaattctcctgcctcagcctccccagtaactgggattgcaggcatgtgccaccacgcccagctaatttttgtatttttagtagagaaggggtttcaccatgttggccacgatggtctctagctcctgccctcatgatctgcccacctccgcctcccaacgtattggaattacaggcatgagccactgcgcctggcccagatttcttagtttttggtaatccagaaggaggtttctttgtgtttgatggaaatgatagtgtcaatgataggggctgtagtattgcattatgagtattgtagtccatcataaagcacagaagtgaaaagggtgaagctaaaaagagccttattaatgtgtatattctgagaaccgtagttcgtctacttagttgcaatagcatcagatgagggtttggagaagatctcttcagaggccaccagaggcatcctagatgaaagtttgtgagactaatggttctgaaactttcctaattgttgcctaacctgccttgtagtactatagtacagtgacagaactggaaaggcacagaataagtaagtttttgcaaagttgtcctagcatgtatgtgttgctgtattttgtaagaaaagaaagagctaatctgcatataattttattctatttactacaataatgtgttgcaaattatttaaacagcctaaactcatagacagccaatgaagaaacttttggggtgtggatatgtatctgtatatatttgtatatacactgtacacagttatttcagcaaaggagcaggcatttgatccagaggttaagcaggtaatgattattgtaaattataactaaaatcaaggattaagcagctgtattttttttgtttttttatttttatttttttgaggcagagtcttgctctgttgcccaggctggagccatttacttttcgaataaagctacatggtatgttaggggtgaatcatgtctaatagccctaaagtttacgtgaatggtgactttgttagcaaacagcaggaaaaaaaaaaaggaaaccaccataatttgctattcactgatctctttacctaagacatcttgtcaagaaaagggaaaaacagcctagatgtgacatatattctttaacactaaatgagaaatgaggttaaaaatcttgaggtttggtgagataatgattctgttactaggaatagaggagcatttagctcattgttactcttgttcatctagattttctaggatctctctgttgtaaactataattagataaataattaattaaatgtttattgaaacttatgaagtgatataaagaagtctagaccaggtgtggtggttcacasctgcaatcccagaactttgggaggccaaggtaggcagattgcttgagctcaggagtttgagaccaacctgggcaacatggtgaaaccccatctctacaaaaaataccaaaaattatccgggttgctggtgcatgcctgcagtcttagctacatgggaggctgagctgagaggataccttaagcccaggaggtcgaggctgcagtaagctgtggtcgtgccactgtgctccatcctgggcaatggagtgataccttgtctcaaaaaaaaaaaaaaaaaagaagtctgaaacatggaccctgtcccttgatgagttgacacaaaagatatttacaaatatctaacagaaggaaacaaatgacttgtggttaatgagctaccacatagagagatggcttggaatagtagagaacctttcatggagaaattgggactccattgaaggatggatggataaaaattacatgagtaatgttttagggtagtagttatataatatttgtttttttccttcatgattctttcttttttcccctttcttctccaggctaccatacctctactaggtatggggaagaccttaaaagcaaggataagcagcatgaatagagctagaatagtaaaaactagaacattttaggataactaaaatgttggaaaaagaaagcatgggttgaggaatcattccacctactgttaaatcttactatatagctgcattaatcaaaacactgcggtattggcagaggaacagacagatcaatggaacagaatagagaacccagaaatagattaacacaaatatgcccaactgatttttaacaaaagtgcaaaaacaattcaatggagggaggatagtttttttttttctttctctaaaaatagggctggaacaattgaacatcataggcaaaaaaatgaaccttgacctaaacctcacacagtattttttaaaaatcaatgtaaaatggattatttgtgaaatcaatgtccacttaaaatggatttaaacatgaaatgttaaactataaaactttcagaagaaaacataggataatatcacggccgggtgcagtggctcatgcctgaattcccagcactttgggaggctaaggtgggtggatcaccttaggtcaggagtttgagatgagaatcgctcaaacccaggaggtggaggttgcagtgagccgagactgcaccactgcactccagcttgggcgacagagcaagactcagtctcaaaaaaaaaagaaaacataggataacatcttcaggacctagggctaggtaagcagttcttagacatgacaccaaaaaattcataaaagaaaacaataattggactccataaaagttcaaaactggccaggcgtggtggctcacgcctgtaatcccagcattttgggaggccgaggcgggcagatcacaaggtcaggagttcgataccagcctgaccaacatggtgaaaccccatctctactagaaatacaaaaattagctgggcgtggtgatgtgcacctgtaatcccagctactcaggaggctgaggcaggagaatcgcttgaacttgggaggcggaggttgcagtgagccgagattgcgccacagcaagccagcctgggagacagagtgagactctgtctcaagaaaaaaaaaaaagtttgaaacttagctctgtgaaagaccctgtaaagagggtgaaaagtttagccacagactgggagaaaatatttgcaaatcacatattcaaagaagggcttgtatccaggttatgtaaagaaatctctgaactcaagaggttgggtgcggtggctcatgcctgtaatcccagaactttgggaggccgaggcaggtggatcacttgaggctaggagtttgaggccagcctggctaacatggtgaaaccctgtctctactaaaaatacaaaaattagccggtgtggtggtgggtgcctgtagttcaagctacaccagaggcttaggcaggagaatcacttgaatctgggaggcagaggttgcagtgagatcgcggcactgcactccagcctgggcaacagagtgacactctgttgcaaaaaaaaaaagaactctctaaactcaagaaagcaaacaatacaattagaaaataggggaaaaagcttgtgcggtggtgcatgcctgtaatcccagctactagggaaacagaggcaggaggcttccttgaacccaagagtttgacttcaaggctgcagtgagctatgattgtaccactgcactctagccttggcaacagagcaagactttgtcacttaaaaaacaaaaaagaagaagaaagaaaagaaaatgggctaaaagaaaaacctataaaggtagcaagtaagcatatgaaaagatgttcaacattattagccttttgggaaatgcaaattaaaatcacaatgggatgttgaggtgatcgggcccaacaccaggccctgagggctacaaagtctggcggggtcaaaggaatgagaaaagacaagttaagagttcataaggtgtgtccagagggccagcgctagattggaggctgcaaaggccccgagctctgggaacccgccctatttattggtgatcaaacaaagaagcaggtggtgaggacrtgagggtaaacaggtgagggcatgaggaggtgagagtagaaaggtagtggtgcattaagtgtagctgtgacggtttagcacttcctttgacccatatagaatatgctctgctgcttgagataatggagggcatgtttacaagaaagaagcaaggaaccaacaagtctgtgcacattccagaggctacgaggggtttatgccctgagccctggattccatcaaagccacaaggggttttatgccctgggcttagatttgtggtgcggcagtgtagccttccaccctttggcacagagcttggtgttccaaaggccacgaggggtttcagaccctggatcccggacatcttccaagactcttttacattatgacagacaagccagtcctgcctcagctcttctaccaacaatgggatactactatgtaccaattagaatggctaaaataaaaaatataatatgtaattctagtaacgatgcagataaactagatttctcatrcattgctgatgggaatgtaaaatggttcggcccctctggaaaacagcataacaatttcttataaaattaaacatacgactgggcacagtggctcacgcctgtaatcccagcactttgggaggctgaggcaggcagatcacttgagtccaggatttcaagaccagcctgggcaatgtggcaaaatgctgtctctacaaaatatataaaaaattagttgggtgtggtggtgcacacctgtggtcccagctacttgggaggttgaggtaagaggatcacttgagcgcggaagttggaggctgcagtgagccatgatcgtgccattgcacttcagcgtgggtgacagagtcagtccctgtctcaatcaatcagttgattgatcaatcagtttaaacatacacttaccatgtagcccagcaatcagactcctgagcatttattccagagaaataaaaacttatgtccataccaaaacctatacacaaatgtttgtggcagtcttatttgtaataggctgccataacctatagaattataggttgaaaatcctacatatatgtatttctcctttgcagttaagtttcttgtattaatgccattttcattccacagcttggatagggctgtgtgttctttctagaggaaagatcctttctttagaatgatgttccataatttcaccttgatggtttttggagtggagaatgaaggccttcttaacttaatcctatatcctttattttgggatgattttgtgtgttatttcttcagtatcatggttcccaccatttttctctctcatgttggaattttgtagttggtcattgtgaattgattcctcaacattcttccccctacattcatagttttcctttctttaatttatcctctacatatatactgtttgttatactgttttaattctgtctttaattatttcccaactggaaacaacccacatatcctagtgagtggttgaacaaactgtggtccatacataacaacgaaatgctacccaacaataaaaagaaatgaaccactgatacaacaacttgggtgaatctcagatgaattattctgagtgaaaaaagtcaatctcattcatcaaaaaattaaaaatagaattaccatatgacccaacaattctgcttctgggtgtgtttccaaaagaattgaaagcagtgtctcaaagagatatttgtatacccatgttcatagcagcagtattcacagtagccaagaggtagaagcaacccagttgtccattgatggttgataggattaacaaaatgtggtatatattaccatggaatattattcagccttaaaaaacaaggagggaccaggcacagtggctcatgcctgtaatcccaacactttgggaagctgaggtgggaggatcacttgaggccaggagtttgagaccagcttgggcaacacagtgagaccccatctctataaaaaaataaattaactagacatggtggctcctaaaaataagttggctagacagctgctctagaggccaaagtgggaggatcgtttgagcccacgtgtttgaggttgcacacgtgtcataatatggatgaacctggaggacattatgctgagtgaaatatggaggacattatgctaagtgaaataagccagtcacaaaaggacaaatactgtgtgattccacttatataaagtgtctagagtagtcaaatttagagaaatggtgtgtagaaacagaaaggtggtctccagggactggaagaagggggaaatggagagttgtttaatagttataggatttcagttttgcaagataaaaagttctggagattggttatacaacactgtgaatacacttaatgctactgagctgtacacttaaaatggttaagatggtaaattttatgtaaattttacccaattttttaaaaagtctatctcaaaagtttatatattgtctgattccatttatataacatttatatcattttcaaaatgacaaaactgtggagatggagaatagtaagtgttttctggagtcagggacaatgtgaggaatagggaggagtgtaaatacaaagaggaatattgtggtagaacagttgggagtcttgtggtggtgagtgtgtgaatctatacatgggataaagttgctgatacagtttggctgtgtccccacccaaatctcctcttgaattgtaatccccataatccccacgtgggagggactcagtgggtggtaattgaatcatgggggtagttttctccaggctgttttcatgatagtgagtaacttctcacaagagctgatggttttataagcatctcacatttcccctgctggcactcattctctctcctggtgccctgtgaagaggcaccttctgccaagatgtgaaactctgggtcaattaaacctcttttctttataagttacccagtctggggcatctccttagagcaatgtgagaacagactaattggtaccgtagagagtggggtgctgctataaagatatctgaaaatgtggaagcgactttgcagctgggtaacaggcagaggttggaacagttgggagggctcagaagaagacatgggaaagatgtgggaaagtttggaacttcctagagacttgttgaatggctttgacaaaatgctgatagtgatatggacaatgmaatccaggctgaggtggtcttagatggaaatgagaaacttgttgggaactggagtaaaggtcactcttgctatgctttagcaaagagattggcagctttttgcccttgccctagagaactgtggaactttgaacttgagagagatgatttagggtatctagtggaagaaatttttaagcagcagagcattcaagaggtgacagaacataaaagtttagaaaatttgcaaccctgacattgtaatagaaaagaaaaactcattttctgaggagaaattcaagctggctgcacaaatttgcataagtaatgaggagccaaatgctaattgccaagacaatggggaaaatgtctccaggatgtgtcagagaccttcttggcagcccctcccatcatagacctagaggcctatgagagaaaaatggtttcctgggccaggtccagcccccmctgctgtatgcagcttctggacttggtgccctgcatctcagcagcttcagcaatggctaaaaggggccaaggtacagctcaggctgttgcttcagagggtgcaagccccaagccttggcagcttccatgtggtattgagcttgagatgtgtagaagacaataattgaggtttggaaatctctgcctagatttcagaggaagtatggaaattcctggatgtccaggcagaagtctgctgcagaggtggagccctcatggagaacctctgctagggcagtgcggaagggaagtgtagggttggagcccccacacagagttcccactggggtactgcctagtggaactgtgagaagagagcaaacatccttcagaccccagaatggtagatccacgtacagcttgcaccatgtgtctggaaaagcctcagacactcaatgccagctgtgaaagcagccaggagaggggctgttccctgcaaagccacaggggcagagtttcccaagactgtgggagcccacctcttgtaatagcgtgacatggatgtgagacatggaatcaaaggagatcattttggaacttttaaggtttaatgactgccctgttggattccggacttgatgtggggcctgtatcccctttgttttggccagtttctcccatttggaacagatgtatttacccagtgcctgtagccccagagagatgtgtctaggtagtaatgcacttgcttttgatttttttttgttttgctttttgacggattctcactctgtcgcccaggctggagtgcagtggtgccatctcggctcactgcaagctctgcctcctgggttcacgccattctcctgcctcagcctcctgagtagctgggactacaggcgcccaccaccaygcctggctaatttttttttgtatttttaatagagatggggtttcaccgtgttagccaggatggtctcgatctcctgacctcgtgatccgcctgtctcagcctcccaaagtgctgggattacaggcgtgagccactgcgcccggccgcttttgattttataggctcataggtagaagggacttgccttgtgtcacatgaaactttggacttggacttttgggttaatgctggaatgagttaagactttgggggacttttggaagggcatcatgactgcattttgaaatgtgagcacacgagatttgggaggggccagggtcagaatgtcctcacctaaatctcatcttgaactgtaatccccataattcccatgtgtcatgggagggaactggtgggagataatttaatcattggggctgttctcatgatagtgagtgagttctcatgagatctgatggttttataaacatctggcatttcccctactggcactcattctctcttctgctggcctgtgaagaggtgcttttggccatgattgtaagtttcctgaggcctccccagccatgtagaactgtgagtcaattaagcctcttttctttatgaattacccagtcttgggtatttccttatagcaatgtgagtgcagactaatacagttgcaaagaactctatacacctacacacaaaataaatgcaggttaaaagatgctgaaaatggaataaggtctgtagttaacaatctatcaatatcaattttttggttttagtgttctatagctattacatgatttcaccattgggtgaagggtacmtgggactctgtagtgtttctgcaactttgtgtttgtctgtaattatttcttttttttcttttttttttagayggagtcttgcttcgttgccaggctggagtgcagtggtgcaatcttgactcactgcaacctccacctcctgggttcaagcaattctcctgcctcagcctcccgagtagctgggactacaggtgtgcaccaccacgcccagctaacttttgtatttttagtagagatggggtttcaccatgttggcccagatggtctcgatctcttgaccttgtgatctgcccgcctcggcctctcaaagtgctgggattacaggcatgagccaccgcgcctggccaattatttcttattttgaaaagccttaaaaaaagcacttcaaatccagagagaaagagagagagcatgcacgagagagagagaaacagacagacagagacagagagagaaagagaaagaagacctgggagacagatgtgtgtgttgtagtttcatctctgtcagtacttaaccgtgtgatccccaggcaagtcattttatctctctgggctttagtttcctaagcaatgaagtaaggagtttgactagattatttccaataatgttgccaattccggactagcatggaaattaatattgtatctgaatgtggcaggtaaggaagccgtcgtcagttctcaarcrgagaataaaccaggttgaatacaatgtaatagttgaagtctgtaatcctttttccacaatttaaaatctgaaaagctcagaaaacagaatttttttagacttacacatctgacctggattgatgtgaggctatttatagtctttatttatcccatttaatatgaatatttatgcatttgatgcagaaatattaaggcttttgattacagggtgttgcccagttcctgctgcagtgttgggtaaaatgcaccttcctaaaatcagaaaaattttggattctgaaagacatttggtttggtttcagggactttggatgagggatagtggacttgtccaagctggatggcccaggtatgtgacatagwttggtaggatggaataaactgaaggtaacaacatgcatcaactgtccccttcctctcaatacaacctctacccaatggttttattactgtttccctaactaaatgtaattatccacttgtgcaatatatatatatataaaatatgtaatttataaaaaattatatataaattttcgttacttaaatttctgtataaatcactaaaatttaagtacttttagttgtttcacaggcagtgaccaatacttttccaatacagaattggttagacttttgttgtttctaaaacatagatgattctttgagtagtaaggctttatttattttcattgattactcttgacagatttggcttttaggattaaatttttgtttaaatactcyttttgcttttgccttcaaaaaactatgctcttgatttcagatttaaatggataggattaatttagtatgcagctattggagacgaattatgacatttagtctcttctcttagggtgtgttgattcctttgtagggactttatgttcctgagttcactactgttatttggctacctaaaaaacctcattagtcctttctgcatggtaaaattcttcagagctctttgaatttattattagaaatttaattttagtctcttccatgtttatgaaagaccctttctagattcagttctgtaattactgactgaaaacctacattacttatgaagaactttttcatggatgactaggagaaaattataaattttaattcattccacaaatatttgaggtgctctgggcatggatgtacaaacaagaataagacccagttgctgccgtccaggaatttaggagagacagtatagtaatcatgagctctggaatcagactgtttgggttcacatcctgcctctaccactgtcaagctatgagctcttaggcaatttatctaacttctctgtgccttagtttcttcatctgtaaatcaaggatagtaatagaacctggtggctaggtgcagtggctcaaacctgtaatcccagcactttgggaggctaaggtgaaaggattgctgaagctcaggagttcaagacctgcctgggcaacacagtgggatcccatctatatawaaaaaaaattaaaaagtagctgggtgtggtggtgtgtgcctgtggtcccagctacttggaaggctgaagagagaggatcacttgagcctgggagttgagactgcagtgagccgtgattgttccactgcactccagcctgggcgacagagtgagatcttatctcaaaaataaataaataatagtagctatgtcatagagttttatgaagattgaatgatttaatatgggtaaagtgcttagaacagtacctggcgcatagcaagtacccaaatattagcgattatcattattattagaaattcattttcgtggggagacatacacagtaccttgagataaatgccgtagtgaacaatatgctgtagaaacatagagggagaaaaagatctctctccctagagaaaatggaagactaccagagatgaagtaggatatgagtcaggtcatgtgggatgaaaaagagatgactgaggcaggaaaagaatttaagacataataaattgctcagcaaagtctaggaaaaattgtagtgtggggtagactgcaccacacggtgggatgggatgaggcaaaagaaataggctagaaatatctgcttctgccatgatagagtatctgatgctaaacttgcccttccactgtaaacaaacagaaaactggacaagatacatgaaccaactatacattttttttattgctgaaagatattccattgaatggatatagagcaatttgtttattcagcgtaaatgaatatataggttgcttctgtttttggctactgtgaataaagcttctatgaatgaaataaaatgtatttaaaaagcaaaggaaaggttgtggccagattttgagttttgtatgtcatgttaagatgatctaattttatcctgaggtcagtggagatcataaaggttaagtactagacagacctaagcagatgtgcttttttgaaagctgactttggcggctgtggtggttgtgaattgcagaaaagaaaagctagaggcaggaaagcctggcagaagactgctatggtttattcatttcttctttcagcagctagttaagtgtgttctctaatggccaagtactatgcttgttagtcagggaaacaacaccagacactgacccacatccctcctctcccttcccctccccaggatttatattcaaataagggaaatagacatgtaaaacacaaagtgcaataaattgttacatatgttaggataaaagtgtttccaaataaaatgaagacataaacaatagagtggcaaaaggtctcaacgagatgatttaaacattgaaaattgagatgttcttgcggatagaggaatgatgatggtgagttataaacttaggcagtagtgatggagatgaagtggaaagactggattcaagctacatttgtgaagtgaggttggtaattgcagacttgataattgtgagagtgaaagaacagaagaagartaagctgagcaattgagtatgttgagatactagcagaagtatgttgggtgtagagtgtagggggaaattttgtagacctgttgaacgtgaagtatttgcagcaagtggaaatgtccaaactgaagttaggaatgggttaggtcctcctacaggaggtaaacactaaggctagagttggaagtactcaatacaggtgagatttaaagccataggggtttctcatctctcagggaggaagtatagaattatctcagcattgtttagttgcaagcatagaaattgcttttgttttttgttttttgtttttttgtttttgttttgagatggagtcttgctctgttgcccaggctggagtgcagtggtgtgatctcagctcagtgcgacctctgcctcctggattcgagtgattctcctgcctcagcctcccgagtagctgggattataggcatgtgccaccatgcctggctaatttttgtatttttagtagagatagggttttaccatgttggtcaggctggtcttgaactcctgatctcaggtgacctgcctgctttggcctcccaaagtgttgggattacaggtgtgagccaccgcgcctagccaagaaattgattttggattacttaggcaaggaggarctaatcaggccttaggaagaatgagaactggggacgctctagggcagtcagtagcaggaatttacagacagtttctctagactacagcactgctgtcaggaagttttggctcaggctgccttttatccttggatggctgctcaagattcaaagtcctgtgagagggggtctgtttggtctttattgccaaatagatcatttccttcatgggtgaatggtgtactaggtttgagcctgcttgagtgttggccacccctgtggtcagctggggagtaagctactgtatttcatgcctgcttagacctcacagaataagggaaaagaatttccctaattgaaaagtgaaatgtgttacaggccaaaaggggaatggattctgagcagggcaccctgtccttgaatttactgccttctgccccctttcttactgtatagataatttaaaagaattcccaccttaaatgaggaaattagtcattctgaccacctccacaaaaaagataacttattgtcatgtctaggacctctgagttgtgttcagtcttctaattttgtgacctaattcttacattcttcaacctgygggctaaatggtaaatttatccactaccatcacacttatatgtagtgcagaggaaataatgaggtagaggaaacaccaaaaaaccgtggacacgctatggcagagactggcggcagcctttctcaattttcatcttccccttccactttggtgagagaaccctgaatttattcaggtataagagattacatttcttagcctctcttactgctgggtgtgactgtgtgactaatttctggccaaaagaaatgttggtagaagcatttgaatttctagaaagcctcctcaaagagaggagtctacccttcattctcccttcttttatcttgctgctttgagtgctgatgtagtggctggagctctagaagccatttttgagtgacacattttatggatggtgggctggagagtaagaaagaacataatagccttgtggaatttccaacacagttttgtattgcccatttccagacttctttttacatgagaaagaatacacttcttactgcttaaaatgttactttgattttcatgtcacaatcactaataccaaataaagaatttagattatgaccataacttcagctgggtggggtcctttgcctgatgggttgttacaccttcttcatcctaagccattggtggcccagcttagatagacatgaaatagtctttcattatagtttattattatgcactccagagcatttcttacattctacctgtactcattctcttcctcctgtatacagtattcagatactctctttgtagcggatatatccctctatttaagcctctcatttgctttttctggcatgatgagccaggtagcaatctcagcttccagctcaaaggcaccatttttatatctcctggtggaagcattctttccctgggcacaaaacctttagtagctccctgtcttagaggaaggaaacaattttgagaggtcattagctggagttgtgagaagtgccatgtccagtacccagttggaaaagtgctggtttggctcataagctgtgttctatagcaatagatcctagctggaaccttgtctatgttgtcataggctatttcaccattgtgtgagcctgctgcttctgaaagatgcaaagagtacatgttaagatcaaagaagcccttggttaccagccagttgcctcacttttgttgggaagtgattttattcatcagtggcactaagtggaatatcacactggcacacaggtaagtccacagatggtagtgttggtagcaacatgacaggtaaatcacatccaaatacagaataaatatctcttctgaaaaggacaaattactaacctctctaggatgaaaagggtcactggagtccatcccttatgaggtagatggctcaactggaggagtgtaccatatagggacacttagcagtgagaccaccagctcagccttggtgggaggaaatccctgttgttgagcacatgtatagccactgtccctgtcaaaacactaacatttagccaagtactgaattgactaggcaaggaaaatggctcactctttcagtaacagtcaccttgtccatatacttattagtactctcttcttggtggtaattttgctgagcagtcacatggagcacagatattctcaggtgctggtcccattcccaaaaatgtatctaaatattcctttcccaaactaccttgtcactagtcatccaaatatgctcctccccagtcctgcttattcagccagtctattggacatgccagaaattaccatgtagatactgacctcaggccacatattttcaagtaaagtgaacaatgataygtaccactgtaagtgcttctcacarggaggctttctcctctcagctgattctcaggatcacccctgaatggagttgttatgcaacagtggtacacttgcagctgtaacataatgctcaggtctttctttaaccagggagaggcattttcccctctgcaagcttgctggtcatagggcacttctcatgaagccataggtgtartttgagggagaggtggcatgtagcaggaatatggttgtaaggaatgtaagtgatctgatatgcaatttaattgtgccttcacagctcattttgggcttgctggaatttagagttaaatgcatccaataacaactcatgatggacagctaggttgcatggtcacttaatgttctattctgttttcactggatcctagtagcaagccaggagctgtttttcagaaagaaatcattacttcagttgcttgctgaaattgccatggccttgtttcaatacctgtattcattgcagcttttccagattaaatacaacatcattttaggtggacacatcttttcaattctctgtacaggaagaaagtggagggaggagggcagtatgcctgcttgcagtatgtctttgtctcataataacatttcactattcctttataaattttagaaaactcaccccttagaaatgcaataattttcataaggaaagggaatttgatcatcttccacttcatacctcttaccataatagtccttccttctgaaccagggagtcattgtgggcagtatttggtaacatctgaaaactaggtgtgcttgggctttgtcatgatgactgttgtgagaagaggttgaattagaacttcatctcctatacatgagcctcataaattgtcaatccaactgatgaacctgtggtattcttaattcctaagaattaatgttagctcaaagccagtatgtaataatcctggagaggttttggtatttcccttttgccagctcttgattacctgggtaaatggccagagatccaatggggggaaataaaaccttccaaaagggatttggcctccccttcattcaaggaaccgtgggtctcgaatttgggtgagagttcctgactctctactgtagtggctcagacaagttcactagacctggagttatttgttcatttttggttatttaaatcaaaacaggccgggcatggtggctcacacctgtagtcccagcactttgggaggccgaggcrcgtagattgcttcagatcaagagttcgagaccagcctggccaacatgcgaaactttgtactaaaaatacaaagaaaaaaattaaaattagccggtgtggtggtgcatgcttgtaattccagctacttgggaggctgaagcaggagaatcacttgaaccctgggggtggaagttgtggtaaactgagatcatgccattgcactccagcctgggtgacagagcgagactccatctcaaaaaataaaaataaaaaataaaaacagatctaagtgggttgcctgttgatttgagttattgagtctaattaaatatagacagggatttctgcctatcacaacaaagtttgagatgacctaatattccatatccaccttgctgcctgttaggatcaccatgcccacttcgtttctgtcagttaactactaccacctggatgcgacctttccctgggtgcctctcattgctttctgagttcaaggagtccatttcagtagcagtccttctcacagaaatccttagccctagaaactagagccagtaaagtgattagtaatgattgtcatgtgcttttcaccaacctgtttcctgtgtcgagagtgaaagaatcttctggcctcaatcaggagatataagagcagtatgttacatgaataacaatttcatatacagttgacctttgaacaaaatgggttagaactgtgcagatctatctacttatacgcagatttttttcaaccagaggtggggcataggggaatgtgaagctcgtgtgcagggaggccaatttttcataatacacaggctcccacagggctgattttgggtcttgagtatgcatggattttggtatatgtggaaatgaggaggtcctagaaccaatcccccatgtataacaaggcacgactgtaaatttttttttttttttttttttttttggagacagggtctcactctgtctcctaggctggagtgcagtggtgcgatcttggctcactatagcctctgcctctcaggctcaagcaattcttgtacctcagcctcctgagtagctgggactataggtgtgcgccaccttgcctggttaatttttgtatttttagtaaagacagggtttcgccatgttggccaggctgctgktcttagactcctggcctcaagtgatctgcccaccttggcctccaaaagtgctgggattacaggtgtgagccgctgcacccagcctcacaactgtaatttgaatagagaaaaggggtgagagaatgcattttcatgatagtcttcccttatttcaaagaattaccagtgcgatggcacacacctrtaatctcaactgctcaggaggctgaggtgggagaatggctcgaggccaggagttgaagggtgcagtgagctatgagcatgccactgcactcctccagcctgagtgacagagcaagactgtgtctcaaaagaaagaaaaaaaaaacccacactgaggcagtcagcacccatttcatattgggaatagcaatttagtatcagtcaagtaccatcatctgtcrtagtaaattaatgccaatttgaataaattttgttttcaatttgtactttatttttttaattgacaaataataactgtacatattcatggggtacatagtgatgttttgatacatataatgtatgatgatcagatcagggtaattagcatgtctgtcatttcaaacattcatcacttctttgtgttgggaaygttcttaccctcctagctatttgaaactatgtaatacattattgttaactatagtcatcctacagtgataaagaacactagaacttactcctcccaactgaaattttgtatcctttaacaaatctctccttttagttacataagaagtataaccaaatagagtttatcacttttacatgtgtacatatttaaataatattttaataaaaattatttaaggcagtactcagtaactgaatttttacctttaaaaagggtacatatattatttaaggctgaagaattctaactggtctgtgttcttcattttgagcccaatgaatgaggatacattggttataggtttttaagtactataataattccttttgtttagataataatttggattcagataatttctcttctcatgttgctcattactactgtattgccaactgcttttcatcaatcctgtattctgtaattgtcccttctttattctctagggccaagatttgtctcccttttctaaaaacaccttagaggcccattagttaccaaaaaaatccatctgtgtttgtggtttgacgaagagtttaatgaatgttttcccaaaagtagctatactagagagtaggttttaaaaatgggcacatagttaacacatcagatagttgtttctgatttaatattttttggaagttctaaatacaaatctttagtttatggagtgcagctggatttgcttttcttcctgtgactcaccaaaggctcttgaaaacctttcatttttttttcgcaatttttgtgttctgtaacttcgtttcaacaaatgttttaaaatagctttaaaaaattattctcctggagtctccttggaatattatttcatttgcttcaaagattttttttagcaaattaaaaagattttatttccagtattgtgatgctagagataggtctaatgaatactctaaaaacttagcagtcatgttttgaatttttgaaacagtgataatttgcatgatcgagctcttgacagtgtttaataattacaggggctttatgacaggagatttctgtctgttaaaatgttgatattacaaataaatgagatttatcttcagaataataataccttcacaaatctaccttctttaacatctctctctaactttaggctatgtcttttaggccactgtgtttttaaaaggaatgtcatttagtttcacaggactactactctagtatatataaagcttttgctaaaagcatttttgattattttaaaatatttattttctcacatactttttattctgtagtgaccatgattcaaatcaagtgtgactatatgacaatggagtatgcatggtacaattttatgagtacacaaaaaggaggtcattttaatcgtgtgtgtgtgtgtgtgtgtgtgtgtgtgtgtgtgtgtgtgtgttttgaggcagtatgttgctctgccacctaggctgcagtatggtggcatgatcatagctcactgcagtattgaactcctgttctcaagtgatcctcccacctcagcctcccgtgtagctaggactacagatgtgtaacaccacactgggctaatagattaatttttttttaagagatgagatcttgctgtgttgcccaggctggtcttaaactcctgggctcaaccaatcctcctgccttggcctctcatagtactgagattacagacatgactcactgtgcccagccctaatcaaactgattttttgtttgtcttttactgttgagctttaaaaaaaatttttatgagtacatagtaagtgtgtatatttatggagtataaatggaggtatatatgtatatatatacacacacacacgtatatatatggaggtattttgatacacgcatacaatgcctagtaatcacatcagggtaaatggggtatgtgttacctcaagcatttgttatttctttgtgatacaaacattctagtaatactcttttaattattttaaaatgtacagtaaataattgttaaatgtagtcacactgttgtgctatcaaatactagattttattcattttaacgatatttttgtactcattaaccatccctaccacccacctgccactatgcttcccagcctctggtaactatcattctactctgtttccataagttcaattgttttaatttttacctcccacaaatgagtaagaatatgtgaagtttgtctttctggcctggtttatttcacttaatgtcctccagttccatttatgttgttgcaaatgacaggatctcattttattttctgactgaataaatactccattgtgtatatgtaccacatttgctttatgcactcatctgttcatggacacttaggttgcttccacatcttggctattgtgaacagtgctgcagtaaacatgggagtatagctatctcttcagtatactgatttcctttcttttgggcatatacccagcagggggattgctggatcacaagttatctctattttcagtttttgaggaacttgcgtactgttttccataatggttgtactaatttacatgcccactagtcgtgtatgagagtcctcttttcactataccctcactagcattcattattgcttatcttttgatgaaagccattttaactggggtgagatgatatctcgttgtagttttgatttgcatttatttctctgatgatcaatgatgttgagcaccttttcatatacctgtttgccgtttgaatgtcttcttttgcccactttaagatcaaattattcgattatttttcccttcaagttgtttgagccccttgtatattcttgttattaatcctttgccagatggatagagtttgcaaatattttctcccattctgtgggttgtcttttcactttgttgactgtttccttttctttgcaaaagctktttaatttgatgtgatcccatttgtccatttttgctttggttgcctgtgctttttgggacattattcaagtaatctttgcccaggcaagtgtcctggagagtatgcccaatattttcttttagtagtttcatagtttgaaatcttagatttaagtctttaatccattttaatttgatttttgtgtatagtgagagataaaggtctggtttcattcttttgcatatggatatccagttttcccagcactacttattgaagagactgtcctttccccaatgcatgttcttggcacctttgttgaacagtgagttcactgtagatgtatgaatttatttctgggttctctattctgttccattggttaatgtgtctgtttttatgccagtaccatgctgttttggttacaataactctgtagtataatttgaagccagtaatgtgattcctctgttttgtccttttggtcaggatggccttggctatttgggtcttttgtggttccatataaattttagggttttttttttttctgtttctgtgaagaatgttgcattgaatcygtaggttgcttttgggtagtatggatattttaacataactttaaaaatacttacgaatatgagtataccyggtcaacgtaggaaaaaactggggtggagcttttccatcctggatgatttttactatttcataagatgagttaaaaaaaaatttttttcctggaggacattatgttgtgaaataagtcagaacagaaagatacataccacatgtcccacttatatgtgggagctaaggaaaaagttgagcttaaagaattagaattgtggttattggggtggtagggaaaggtagaggggagggaaggatagggagagattggttaacagatacaaagttacaactagatgggaagaataagttctagtgtctgtggcattgtagggtgaatatggttaacagtaatttagtgaatattttcaaaaagctagaagagaggattttttttgtttgtttttgtttttgtttttgagacagtgtctccctcagtcgcccaggctggagtgcaatgacacaatcttggctcactgcaacctccacctcctgggttcaagcgattgtcatgcctcagccacaggcgtgcaccaccaygcctggctaatttttgtatttctgtattttgttggctaggctggtctcaaactcctggcctcaagtgawccgcctgccttggcctcccaaagtgcttggatcacaggcatgagccaccgtacctggccaaagagaggattttgaatgttcactacccaaagaaatgcttaaggtgatggttatgctaattacactgacttgatcattgcacattgtatgcatgtattgagaaatatcatgcatcaatatcccataaattatgtgtcaactaaaaataaaatgaaaaatagaatgtttttgcttttgaatgtatgtttgaatagtgggctcatttgttaaatgatcagggtaatgtctcttgatccaaagaggataatcctgagatgttgatggtttactttccccccaaattatattgtgtttttgattatctatgtgttgattacccagtgaaaaatttcttttaaattcctgctagatattattctgccacctgtttgcttcttccaccactttcattcagtagtaggtttggaaatcagactgatagcaatttcagttcacaattctaactaattttagtttaacttaattatagtaaatgcataatattctataaagagcactgcagtttagggaagcagttctgtatgatgctgtagataagaaaatagatttgtgagcctactagtacctgaattttaattccaagactgccatttcctagctatgtgaactacagaattccttaagccttgttatctcatctgtaaaagaggtcatattgttgtcattgctgtctcacaggattgtaatgaggattacatgagacaacagattgtaaaatgtttagattaactgttcaataaatatagctactgttattaactattatttgtactcagtaatcatttctctgtgatcttaggctagtcatctttttttttctttgcccaagttttcttgaaaaatagttttaggaacccacaaaaatattatagatgaaagtgatttgaaaggtatgctgtactgtacaaatataaggtagaagtgcagtattatgattgttattagaaataataacgggtggctgggtgtagtggctcacgcctgtaatcccagcactttgagggtccaaagcagcaggttcgcatgagcccagagttcaagatcagcctgggcaatgtggcaagaccttgtctctactaaaaatacaaaaattagccgggcatggtggcatgcacctgtagtcccaactcaggaggctgaggtgggaggataacttaagcctgggaagtggaggctgtagtgagccatgattgcgctactgcactccagcctaggcagcagagtgagaccctgtctcaagaaaaaaggaaaagaaaaagggtgacagttaaagctatgtggaatagtgggaagaagttagttttagaagctgtgtcttccaaagaggtctggctttagcccagacatcagtcatttactacctgctatttgagcaagttaactactcagaacttcagttttcccattggtgaaaaggggaataataatacctatcttgttgtgaggctcactgaatgaaaggcttaggtgacagaacccaacgtgattttctttcctccttcctacctggagaatagcaaatttccttggcaaaactaatcatcctttctggagcaaaatatcgattaatttttttgaattacaataaaataagattgactaatgggttaggaagattaggaagatgaagaaattgctggtgctggttaacatgtggccctgaattagattttagaacttttttctttttttttttctgagacggagtttctctcttgtctcccaggctggagtgcagtggtgcagtcttggctcaccgcaacctccgcctcccaggttcaagcaattctccaacctcagcctcctgagtagctgggattacaggcacccactaccacgcttggctaatttttgtatttttagtagagatggggtttcaccatgtggccaggctggtctggaactcctgacctcaggtgatccacttgctttggccacccaaagtgctgggattacagatgtgagccaccatgcccggtcctttttaaattttatttttattttttttgagatagaatcttgctgtgtcacccaggctggagtgcagtggcacaatcttggcccactgcaacctctacctcccgggttcgagtgattattgtgcctcagccttctgagtagctgagattatagatgcacgccaccacgcctggctactttttgtatttttagtagagacagggtgttgtcgtgttcgccaggctagtcttgacctcctggctttgagtggtccacccaccttggcctcccaaagtgttgggattacaggcgtgagccactgtgcccggcctaggttttagaacttttgaagttaaagtggtttaatatacaaaaaaagagtgcaaaatatgaatacaattggctacagtggatgtgtgagttataaacccccacaaaatagaaaatagggagctgaaggtgtcttaggtgggtgagaataatatatgtcaagaggtcttgtatatgctaagtaattttagcaatgaataaggtattacccttgtcaagagtaaaggggagacatttggggatgacagatctcccaaaatctttctttctgggtttggtgtatatatatatatatatatatatatatatatatatttttttttttttttttttgagactaagttttgctcttgttgcccaggctggagtgcaatggcgcgatcttggctcactgcaacctccgcctcccgatttcaagtgattctcctgcctcagcctccgaagtagctgggattacaggcatgcaccaccacgcccagctaattttgtatttttagtagagacagggtttctccatgttggtcaggctggtctcaaactcccgacctcagatgatctggctgccttggcctcccagcgtgcagagattacaggtgtgagccaccgcgcccaccctaggtttagtatattcttcttcatggccgctatgtgtttatgtacccactgctgctactggaaccatacaggcatttagatgtctcaatagttcgaggccaaagagtgtttagatacagtagtgtccagtctagctttatggactaaaagcaagatacctgcctctttgtatgtctaccaaaccttgaaatctcactgtatgggagtttggtagagttttctgcagacagataaattctgctcttgtatgttgtattatagagtaacttcttcaacaagttcttgtgttctgtgcatagagtttagcttgtgcatggcttctttcctctctagttgcttatcttgccactccccactttccaccctaagctgtagccacaggaaataaggcatctgcattcacacctagtacactctgcgtaacctttataggactcgattcaaatgttagctcttttgctaagcattccctgatttctctaggttaaatgttcattcctcaaagtttctgtcttctcagaaaatcagaagctgtgacaccactgagtttgcattctcccagagcatgggagtgctggtgtcaggtagtggctgcatcctttagactgggcatatgttctccattccacaatttggcgtgcttcagttatagttgctgcttcatggatgaactggcctggacctctaatttaggtataagtgttcccatgactgtgaactttttgaaagagatgattttctatttatttaattatgaatgaatgaatgacaggaatcttgctctgttgcccaggttggagtgctgtagcgtagtcacagctcacaacagcctcagactcctcagctcaagcaatactcccacctcagcctctggagtagctgggactataggtgtacactactatacccagataattaaaaaaaaatttctttttgtaaagatgggggagtttcactatattgccaaggatggtcttgatctcctggcttcaagtgatcttcctgcctcagcttcccaaagtgctgggattacaggtatgagccactgcgtctggtctgattttctcttttatgtttctgttgcccagcatatacttgatacagaaagccttcaataagtacttatagaattgaaggaatggaataaaattttgcctaaccagagagttttgccctgtcctgacctttgccttagtcacggcattcatcttgtgtatcattcttcaaagcatagaacatcatggttgaagatagtgatcaactttttctaaaaacagagcacaaaagaatacacttaaattgtagcaagtgctgattaaaattaagtggggaagctttttgaagctataccacttgttagcaatggattactacaagatgctgttgcatccttttattttgaaatcttccatgggattgacttgcaccttaaagacagagtgaaggacaatataaaattccttatgagtctctgcagtgtactagtgagtaattggaatagttcagaaaattttgactgtatcttatatacactatgaaaatatattagttttaaacattatagatatagatagaatttcagaacaaattctaatcagctggtgcacaacctctgtaaaaaatgtgaaatttgtcaatccaaaatttgttcctctctcagaaacagctgtctctaaatagggcctcatattgttggtaaattcattataaatgctggaagcaactccagtttgatatggttgggatttgtagaaataatgtagacgtaggctatctacaaaccattttttttaaagtaacaatccaatctaaatactcatatgcattacaaatgagtgtcataaacttaaattctggaacctccaaaaatataagaaacctctggaaatataagaaagggctcatttaggatggaatgacaaacaatagggagagttctcattttggtttctgcccacctgctcccaccccttaaccaaaaaccaaaacaaaatatctggaattatttaggtaatatagctattcttaaaagaatggatttctaattataaaactctttgctggcacttaaatgtccttttagatagatagaattcatgattggtaaaaatatgtttgatttcataaaggctctctcaaatcatgagtgcagattttggaagtatcagggacaagactctattagtcaattttcatgctgctgataaagacatacccgagactgggaagaaaaaaagatgtaatggacttacagttccacatgactggggaggcctcatgatcatggcgttaggcagggaggagcaagtcacaaaaaatggtttgtggatagcctacatggatggcagcaggcaaaaagagattgtgcaggtaaactcccgtttttaaaacatcagatctcgtgagactcattcactgtcacaagaacagcacaggaaagacccatccccataattcaatcacctctcattgggttcctcccacaacacatgggaattatgggagctagaattcaagatgagattagggtggagacacagccaaaccatatcattccgcccctggtccctcctaaatctcatgtcctcacatttcaaaaccaattatgcctttccagcagtcccacaaagtcttaactcatttcagcattaactcaaaagcccacagtccagtaactcatcttaagtcacttccatctatgaacctgtaaaatcaaaagaaagttacttcccagatacaatgggggtacaggcattgggtaagtacagctgtttcaaatgggagaaattggccaaaacaaaggggctacaggcctcatgcaagtccaaaatcaagcagggcagtcatatcgtaaaactccaaaataatctcctttgactccatgtcttgcattcaggtcacgctgatgcaaagggtgggctcccatggtcttgggcagctctgcccctgtggctttgcagggtacagccaccctcttggctgctttcatgggctggtgttgagtggctgcagcttttctgggcacacggtacaagctgtcagtggatctaccgttctggggtctggagaatggtggccctcttctcacagctccactaaacggtgccccagtagggacttyttgtggaggctccaaccctacatttcccttctgcagtgccctaccagaggttctccatgagggctccgcccctgcagcaaacttctgcctaggcatccaggcatttccatacatcctctgaaatctaggcagacgttcccaaaccccggttcttgacttctatacactcaaaggctcaacaccrtgtggaagctgccaaaacttggggcttgcaccctctgaagccacagctcaagctttatgttggcccctttcagccatggctggagcagctgggatgcaggggaccaagtccctagactacacagcggagggaccctgggcctggtccataaaatcattttttcctcctaaacctccaggcctgtgatgggaggggctgctgcaaaggtctctgacatgtcctggagacatttttcccattgtcttggtgattaacatttggctccttgttacatgtgcaaatttctgcagcttgaatttctccccagaaaatgggattttctttttttttttttttcgagacraagtctcgctctgtcgcccaggctggagtgcagtggcgcaatctcggctcactgcaagctccacctcccaggctcacgccattctcctgcctcagcctcccgagtagctgggactacaggtgcctgccaccacgcccagmtaattttttgtatttttagtagagacagggtttcaccatgttagccaggatggtctcgatttcctgacctcgtgatccacccacctcggcctcccaaagtgctgggattacaggtgtgaggaaaatgggattttcttttcrattgcattgtcaggctgcaaattttccaaacttttatgcccagtttcccttttaaaactgaatccstttaacagcacccaagtcatcccttgaatgctttgctgcttataaatttcttctacaagataccctaaatcatctctctctagttcacagttccacaagtctctagtctctttgctaaaacataacaagaattacctttgctccggttcccaacaagttcctcatctccatctgagaccacctcagcctggatcttattgttcatatcactgtcagcatttttgtcaaagccattcaacaagtctctaggaagttccaaactttctcacattttcctgtcttctgagccctccaaacttccaacctctgcctgttacccagttccaaagttactttcacatttttgggtatacattcagcaatgctccactctactggtaccaatttactgtatgtctgtttttatgctgctgataaaacatacccaagactgggaagaaaaagaggtttaatggacttacagttccacatggctggggaggactcacaatcatggtggaaggcaatgaggagcaaggcacatcrtacatggatggtggcaggcaaagaaagagatcttgtacaaggaaactcccgtttttaaaaccatcagatctcgtgagattcattcactatcacaagaactgtgcaggaaagacccacccccatgattcaatcacctcccactgggttcctcccacggcacatgggaattgtgggaattacaattcaagatgaaatttgggtggggacacagccaaaccatatcaaagactgatggagttgttcatatcctttgagaaggaatcagttcattaatccatgagtattattcccttggattttcccttagcatattctccaatgaggtctctaatttcttgttaaatgatggtcgtttcactttgaaagacatataccaaaggtatacawttcattttattctcttttcacattttaaataatttttkctgcaggaagacaaagagaatgcaatgccytacacagcctgtatcttcagcctctcctttgtagttttgtccttgtaagtaagacaaaggataggtaggagaaataatagctaagtgttgaaaaaaaaattagtatcaaataagagtggaactgaaaggtttacttgtgttatagttgatcaacaaatgtttattgactcactactgtgtattaaagcacaataagggatatgttgaggtaaaaaaggttcctgcaagagaacttggggaaactagatgcaaataatgatgcagtttaatgatacaaggtccagtgtggtggcttatgcctgaataccagcactttgggaggctgaggtgggaggatcacttgagcccaggagtttgataccagcctgggcaacatagggagatcctatctctataaaaataaaaaattaaagaaattagccggatgtggtaatgctcgcctatgrtcccagttacttgagatgctgtcatgggaggatcacttgggcccaggaggtcaaggctgcagtgagccgtgattgcaccactgcawtccagcctgggtgacagagtgagaccctgtcccaaaaaaaaaaaaaaaaaaaaaaaatgatgcaagataaaaataatcataattgttagtaattgctaaatgaagtgtttagctaagtgctacaggacttcagggtagaacactgtgggctggctaaaccaaaggctttatggaagaagaaaaattttaagaagctgctggaaatgggtagaattgtatagatggaaaataggaagaagttgtttctgctctgccttttacctggaatgccaagtgtggaaatcaggaagaggagtggtagtattatgttacttttgagtcaaaatcagcagttaatcatgtgggagaattttaacttaatgagcctaagaaagcttcttgatgatttcagcatattgtaagtcctcttaattcaggtctgtaaaacaaaaacaaaaaacttctttaaatgctggaagggcttcgggagagtgatataatccaggaaattcactatgaaagcaacaatattttattattaaacttggacatttcaagtrtttaactgagggaaataacagacaaagaagccatgtgtctctgctggagaaactttattttccaactgaacaataaaaccttacttaccacagactatcaaataagctttcagagattctgatattgatacaagttaccaatgtaaaaaggaaattatttcctatatgctgtcctccttccttatcctcagaaatgaaattctttttttcccaagatcacattaaggaagatattattatcattcttgtcattttattctcttttccctttttgctgtccagctttcttctatgacaaatggagagtacacttgtcaatatgttattaataaattaacagtttactaatacctaaaacaatactcattgccatttacaactagatataacagagatgcagagattatcaacttcatgatgagcaagcatacatagtccttgggttgcatggatttttttctttaaagccaccctggtcaggctttttttgtttgtttttaaactaaaaatgaatatcttttcaggaacctggaggagtcataaagaaaaagcagatgttactatatcaggcagggtagttttattttttctatggaagtaaaaaaaattatgtagtgcttttagcatcgtaatatatgaaatctccagttaaaagaacgctcattagcttagtatgtattgtttaatttaaaaaatgaaaattaattttatttttgtataaaacatgctcctgtcggacaatacagaaatatataamgaaaagttaccctagtcttaattactcagagatacctagtgttaatattttggtgtatagcctgcatggccataaaaataggtttatcacatgtgtatatttttgttacttttctctctcaacagtatatagagaattgcttttaaaattaataaacataattttaacaactacgtgatatttcattataatgaatattccataatacagttaattatcctcttttttttaaatgtttttctcctgaattcttcactattatagatagtactgtgatggaatttgcatgtatgtcattgcacacttgtttgattatttccttaggataccttcctaaatattgactttttgggattaagagtatgaatatcttctattggaaatattttcatacattaatttctgtccatggtatatgggagtgcctgtttttccttgttcttactaaccttggatattgataatttttgccaacttgagagatgttataaaagtcttcttgtatgttgaatattaatactaatattagtatttgaatactaatgagattgagtcttttttgttatgtggttggccaattttatttctttgttgagttgcctagttatattctttccttatttttatttgcactatctcctattgacatagaagagctcttcatatattaagggtctttttgtcaaatgttttaagttttttttttttttttacttttaaaattttataggtttttgctgacaagttttttttaacctttttattttgaaataattactgacttacaggaagttataaaaattgtacagagaggtccttttagccatcatccagctttccccgtggtaacatcttgcataagtatagaacattatttaaaccaggaaattggcattggtacagtactgccaactaaactacaaaccttatttggctttcactcgtttttacatgcattcgtttgtgtgtgtgtgtgtgtgtgtgtgtgtgttttctgtgaaattttatcacgtatatagatttttgtaactaccatcatcaagatataggactgttccatcgctatgaagaaaattcctggtgttgcactttgagactacaaagtgcagcaccaggaattttcctcctttcctaaccttgagcactgcctgatctgttcatttttatgtttttgtcttttgaaatgttatagaaatggagtcatatagtacgtaaccttttgagattgacagttttcactcagcgtaatgtccttgtgatccacctaagttgtgtatgccagtagtttgttcccttttactgctaattaatatctcattgtatgaatgtaccatagtttatatatccatttaccataaacatttgggttgtttctagtttgggctgttacaaataaagctgctctgaacattcatgtataggtgattatgtgaacatgtttttgtttctttaagataaaagcttgggagtgtgattgttgggttgtatggtaagtgtatgttcaatttcataagaaattgccaaattgttttccagagtagctgtactattttacatttccactggcaaggtatgagaaatctagtttctccatatcctttgttagcatttggtattgtcagtattttttattttagccattctaatagatgtgtagtaatatctcatcttagctttaatttccttaatgcctaatgatgtcgaacgttttttcatgtgctgatttgccatacttacatcctcattggtaagatgaataytcaagtctttttgcctattttcaaatagaytgtttgtttccttactgcggagtttagagaattctttacatattctggatagaagtcctttggatataaaatttgcaaatattttcttctagtatgtggctcatctttttatcttgttaatggagtcctttgcagagtaaaagttttaaattttgatgacatccagttactggttttttttttttcttttatagattgggtttttgatgtgatgtctgagaactcttttcctagccctaggtcccaaagatgttctcctatgttctcttctaaaagttttatagttctgtggttcacattttacataaatccgtgatcctttttgcattgatctttgtatgcggtgtgcgttttaagtcaagcttctattttattttttatttttgcccatggatgtccagttgttccagcatgatttgttgaaaagactattttccctccattgaactacttttgtacctttgtgaaaaatcagttggtgtatttgtatttatccacttctggattctctgttccattggtctatttgtcttttcttctgccaatactatactgtcttgattatgatagcgatgtagtgagacaatataaggcagagtgattcttcctacttttcttctttttcaaacttgttttagaataagcttgtctgtatctatcatagttgtggtagtcrcagcaaaaggctagcacctctccagcttgtctgtgtgggactggttctggctgaggctagaagaaggtgacggtactttattggagtgagcttctgaacatccagttgagcagagggtgggaaggagaattttttayggaataggaagtgattcctaaagatataacatcatttaaaattattttcctttagtgctatcagttttaagtataaataatatcaatagagcatttaggatggctttgcttgaaagcagaagagtagataggtaagttcttaaggaccattctgttgttgttttcattttatccactgttgtcagggacttcggtttaggtttctacagcaaccagtctggactacataataccaacactttgtgtgcatgtggtgttaactctgatgccttatacactacatgtggcagagttacagttgctatggagatcaatctttggacacacttggttgataacgatgcttttcatatatggattttgctgctgaaagaatatgaggtgatgctaagttaaccaaaagatgcataagactgtcagtagtttatagcttagaatctcacatttgaaaactttaagttatacatttgctcacaaacatactgaagtatgtgtgtgtgtgtttgtgtgtttacaagtttgatacctggaaaatacagtagagggaaaatgtgattctaaagaacacattatcagagaatttgatggattatttctcttggctagtctataccatttctaaaacatactgtaaaaattcaaagactaaatatcttacataattttagtagtattatcataaggtcagttgtcagtaggtaagcaaaggaaacacaattcttgtgtactgctctaatttgaatgtagatcctaataaggacctttttcttggagcactatatctctgaagtcttaaatgccacaaataaaaaacattgaagaagtagaataaagagttttattttttctcttcctttgacaaagtcagttaaactgggatgcaactctcagtgctaaatttaaactaatatagactatcactgagtgttttcatttgtagcatttttgagacaaatgtggttttagattgatatccatttctgctttggcctagggaaactcgtcatttatgagttgctatactagagcagtggttctcaacgctggctgcacattagtatgtgggttaaaaaaaatgatatttgagcctcacaaaaatcaaatcaaaatctctggggacaggagaaggcatgacatttgtactctttttgtttttttttttaagctaactacttgatgctaatatacaactagagttgagaaccactgaagcaaaatatgttttcatctagacttaaattttatctaatttttaaaattagcatgcaacaatagaattgatatgaaatattacagaaagtttagaaaggtcagtcttaccatctatattagtttcctattgctgctgtaacaaatgatcaygaagctagtggctaaaaacaacacacctttatttttattttgttgtttgtttgtttgttttgagacagagtcttgctgtgttgcccaggttggagtgcagtggcgcaatctcggctcactgcagccacctcctcccaggttcaagcgattctcctgcctcagcctcccgagtagctgggactacaggtgcctgccaccacacccggctaattttttttgtatttttggcagatgcggggtatcatcatgtttcccaggatggtctcgaactcctgacctcaaatgatccacctgccttggcctcccaaagtgctgggattacaggcgtgagccaccacacccaaccaaacaacacaactgtattacaagtttattaacttgtgttctggaggtcagaaatctgaaatggtcttatggggctaaaataaggctgcaggcagagctgtgttccttctggaggttctagagaggatctgttccttgcctttttcaaccactagaggctgcctgcatcctttgacttgtacctcatcactctttgctctgtcctcacatctcctctcaatctgaccctcctgccttcctcttttgagcacccctgtggttatgttgggtccatccaggataatcctcccatcttgagatctttaacttaatcatacctgcagagttcctcttatcacataaagtaacaagcactggttctggggttgaggatggggatgtctttgagggccaattattcagcctgccatactaccctaacacaatgattgtcactttgacattttccttcctagtcttttttaatatgcatatttttatttaaatataatcatggtaaatatgattttctatccttttccacttaatcttcttaactgtcattttaaattgctgtataatgttgtatctgtgattatatattttattgtcttgtattacacatacctttaccctgttgaatgtttatgttgttttggattcttattattgatcaagctgtgataggtgtatatatgtgtgtgtgtgtgtgtgtgtgtgtgtgtgtattattattaatttttttgaagatagggtctcactcttttgcccaggctggagtgcaatggcatgatctcagctcaactgcaacctctgcctcctgggttcaagcgattctcctgcttcagcctcctgagtagctgggactacaggctgcrccaccgtgcccagctaattttttgtatttttagtagagatggggtttcaccatgttggctagactggtctcaaattcctcacctcaagtgatccagctgcctcggcctccccaagtgctgggattacaggcgtgagtcactgtacctggccaatatttttgtttattagatagattccatgatgtggatgtactaagctaaaattataaacattttttagtgtttaaattcactgccagattgcatttttgaggagttctaaccaatttgtaacactatcagcatgtatgagagtactagtatcactatatctttgccaatattggtcattatcattttagaaagatttttgctaatcaggtgaaaaaagttaccctgagctacatgtaatttatttgaacattatgtttctatttatttgtttatctttgtatgtcttgtttacatatgtcttgtggtcttgtttcttattaatccttaggagacattatatagtgaaattattgtcttatatgctgtaagtgcttctttaaaaaaatttttattttttataaaaattaaatagagacgggggtctcgctgtattgcccaggctggcctcaaacttctgggctcaagcaatccacccgcctccacctcccaaagtgctaggaatacaggtgtgagtcactgcacccgcccagataagtgctttttgaaatccaatttttaaatttacatgttgacatctttttttttttgtagttcttctattttctctacagttaagtttttctacctaataaaggtctgtggtaaatacccagttctgttttatttctttaatggtttagtctctgcctttagcaaattgctagcaagctaagaagtttcgggacttgtgagtctagatctagctctgtgacttactctaccaaagcaagtgccagattaatttgttctatttacatactttatcaaaattggaaacagtttttttaaaggactggagaagaaatctagcaattttagcacagtcctaagatgtttgttgccctttgccagaaggtttacttaccatgctgtcatgttatgtgttcatgcaaataattgagaattatagtaagctatcttagtcaatgataaacaggcagaatacactttaattacattctaatttattatctggtgaaagtaccttgctaacaaatcaacccggatatgacttattggatagcctttgcacttagaggaataatcagcctgtaatcataaacaacatgaactgttcatcttctagattgctatcatatttattaccctcaaatgtctgtgccgagtctctttcctgtttgtttcccatcttctctggctcatgggtccccatcgtgcctgctgtaagttggaatactgtgcttacaaatttttttccttgaaaaaaaggattagacacatgcctgggaacagagttctgtcgttttaccataggaataaaatacattttccccaaataacagtaaatagaataaagtttcggcaaaatgtactaatacataatttgttccctgcttccctggtaagaactagcacaattctaattctataaagaaatacaaacattgccctcaggaatagctatcacatcctttaatatcccctgttacttccctctggttctaaaaagaaggtatgtaaattaaactaagaaaccagctagccaacccctgttcctttcttctgaaacaacctcctgcagagaatcgatacctgggagtacattttactaagtgaatgcagttctctgatacagtaccttttcataattccaccacttaagactgatagcagaaggaacaacctgtggcactacttccacagagtaatttggaagtcggaagcattacattttcccagttgatgcaaatctttttgaatatgactttaggtggacattgaagtagagctaaggtgtaggtgtagggatacaaaactgtagaacaacttaaatatatatccaaccttctagatggagccacaataaatgagttgttaattgccttctctatttcagacacccttttttccttctcctctacctctttttcagtgattttagttgaatctactgattctgcttggtgtcttagcaaccaaaggagacagtaatcctgatgtgagagtatctgttttttatgaacaaggatcttacacctagaagaggccttactagtacttttggtataatgctgtctgtgcctataatctgtagctggtaagtagtagaagggacctggaacttctgcattttagtgctatgattaacaaaaaaaaattttttttgttccaaattgtgttaaaatgggaggtaaaaagatattggtctatttcactatttttccacattggaaattggtttgggcatgcacaccagcttaggtgggcttaggagttctttctgtcctaaagaattctgaaggaactaaaataaaaaaaaaaawtttttttaacctatgatgtgctctgttaattacttccattggagattcctagcttgaacccggaggtggaggttcaaatatgagtggtaaaattgtgatataataatatcacctttctaattttctgaactagattacatytaagcctcactcattgagttgagattctatgattatgccccttgagtgccatgccccaattccctgtgattctctaccttcacacagtcccaggtttytggaatttccaatgggacattctccttttagtatgttcagccccagtttggctcagatcaatgtattgtcactactttaattgatgcctctgtttcctaacccttcttgctgtctccttstggctaaatgctatgtgttatcctttttgtgaatgttaacaaggactggggataccttgaatacctttactttcctgctggggaagcccatatgcttctgttgggactatctcaaaagagaaaccacaattaggattttgaattcagattgagagaaggagagaagggtatcttgacaagatgcagaaggaagtatttctragcagctagagccttattttggcatccagtttaggcagccacctattttatctggctctctggctgtgcttaagaatgtatgtatacttgcaggggctaatgccaagccaaatccttttctgaagttatagcctagtttgctttggagaaaatgtacttcatgtttgccactcccttggctctctagctgttacttcctagtctggtttctgatatttccttgtattggcagtattttctggatctgtgcattctttgtgtgaattattcaagaacctccttctgagagtgtgwttgaactccattttaggaataattactgtacagttatactctgaaatcagtggcattttgacctttaggaagacccttttagaaacaaattaaagccagatagccctatttggcctaactggaatgtaagtcccactttggcttccagccacataattctcccaaaatagatcttactatgatcactaatgacttccatatcactaaacctaatgtatttattttagtcttcatcttaattgtacttttgacagtttcttttttcttaaaaaatacttttctttttgttttctttctaactttgtagcaattcattttctgcctctgtggcaggcctatccaggtgattaaatgttgaatcgctctcttcactctattctctctccagtttatcccatacatattcttcaattgccacagtcttccctagcctaacctcacctacctatcctcttttcaatccactctttacattcctgaagaacacaaaagtagacgtgaatgcataaaaaaagtaccatgttctttgtttttctatgcattcctgtatcacgcctgtaatcccagcactttgggaggctgaggtgagtggatcacttggggtcaggcgttcaagatcagcctggccaacatggtgaaaccttgtctctactaaaaatacaaaaattagccgggcatggtggcacacatctgtaatcccagctacttgggaggctgaggcaggagaatcctttgaacccaggagacagaggttgcagtgagccaagatcatccattgctctgtcaccaggtgaagtacagtggcataatcatggctcactgcagccctgatctcccgagcttaagaaattctcccacctcagcctcccaggtagctgggactacaggcatgtaccacaatgcctggctaaatttcttattttttgtagagtcttgctatgttgctcaggctggtactgaactcctgacctcaacaatcctctcaccttggtctcccaaaagtgctgggattataggtgtgagccaccacacctggccctcataccatgttcttaattgggaaattgagactcatgataaagtgtcaattctttcttacttaatttacaaattgaagtgatcctaataaaaaatactacaaaaactgtaataaactaaattctgaaaaactttgaaagagaagaagtctgaaacatcttgaaagacaaatgaagacttgaccttcctgatattaaaacataagctaaagcttcaattaaagtaaggtatttggtgcatggatagacagcctaatagggcagaaattaaaattcagaaatagattagaaaatataacaacctaggatatggtaaaaagcagtatctcatatcagtgggagtaaggatggactctaataatggtattggtacaactttgaagccacctggaaaaagagaacattagrtcctttatgttgtatactcagatacattttacatgggtcagagatttaaatataaaaaaatgaaaccagaggagaatttaattataaccttagaattataaagcctttctaaaattatgactcaaaatctggaagtcaaaagattggtaaatttgcctttaaaaatctctgtgataaaaaactaccataaggaaagtcaaaagagaaatacagtttttaaaacaattgacgcttatgttgccgacagttgtataaatggagagaaggaaagttagcacatgctcataaaaacattatagaaaaatgggcaaagggctgggcacagtgtttcacacctgtaatcccagcactttgggaggccgaggcaggtggatcaccygaggtcaaaagttcaagaccagcctggccaacatgatgaaacctcgtctctactaaaaatataagaaattagctgggcatggtggcgggtgcctgtactcccagctacttgggaggctgaggcaggagaattgcttgaacccggaggtggaggttgcagtgagccaagatcacaccactgcactgcagcctgggcgacagagtgagactccgtctcaaaaaaaaaaaaaaaaaaaaaaaaagagcaaaggacatgaacagatagtttgacagaaaaagaagtacagttgccaggcgcggtggctgacgcctgtaatcccagcactttggaaggctgaggcaggtggatcacctgaggtcaggagttcgagaccagcctgctaacatggtgaaacccccgtttctactaaaaatacaaaaaaattagccgggcgtggtggygtgtgcctgtaatcgcagctactcaggagrctgaggcaggagaatcgcttgaacctgggaggcggaggttgcagtgagccaagatcatgccattgcactgcagcttgggcaacaagagcaaaactctgtctcaaaaaaaaaaaaaaaaaaagaagaagaagaagtacagttattcctcagtatcagtgagggattggttctagaaatcccccaccccccaatactaacatccatagatgctcaattccgttatataaaatgaagtagtattgtgtataacctttgcacatcctcctgtgtacttgaaattatctccagattacttataataattaatacaatttaagtgctatttaaatcgttgtaaaactatattgtttagggaataatgacaagaaaaaagtctgtatatacccagtactgacacaaccatctawtttttttctgaatatttttgatctgtggttggttgaatccatggatgcagaacccacaaacatggagggccaattgtatagatggctcttaaacatgtgaaggtatgtgcaaccttacctaaaataaaaaagaaatgcaaattaaaactacagtaaaacagttttctacctgtcacattggtaaaaactcaaaagtttggtaactcatttggttgtccagttttcataaatgatgtcatacattgttggtaggagtgcagaatctaaccatgtctgtcaaaagtacaaatgcacttaccatttgacccagcaacctcacttacaagattgtctgtaacagcaaaatccagtagcagttgggtaggctttttcttctcatccacgagactcattaaataacccatggtaggccgggtgcagtggctcacgcctgtaatcccagcactttgggaggccgaggtgggcggatcatttgaggtcaggagtttgagaccagcctggccaacatagcaaaaccctgtctctactaaaaaatacaaaaattagccaggcatggtagcacgtgcctgtaatctcagatagttgggaggctgaggcaggagaatttcttaaacccagggggcagaggttgcagtgagctgagatcatgccactgcactccagcctgggcggcataagactctgtctcaaaaaagtaataacaaaataacccatggtagatacatcaaaccgtggaatgctgtgcaattggaaacaaaagaaagaatagatatactaagtgaaaaaaaacagggtagatgcccaggcattagtgcctgtaattagtgcctgtaatctcagcactttgggaggctgaggcgggcagatcacctgaggtcaggagcttgagaccagcctggccaacatggtgaagccccatctttactaaaaatacaaacattagatggacgtggtggcacgtgcctgtaatcccagctatttgggaggccgaagcagagaatcacctgaacctgggaggcagaggttgcagtgggctgaggttgtgccactgcactccagcctgggtaacagagtgagactctgtctcaaaaaacaaacaaacaaacaaacaaaaaacagcgtagaggacagtacatataacatgctatcctttgtgtaagaaaggaggaaagtgttttatgggtgtgtgtgtgtctgcgcgcacatgcacctgtggattcataccaggataagcgtactatgtaagactaagattgattaccagtggggtggagaaaatcagatagacattgacagggtgggagtgagacaatagacagtaccttcttcttttacgttctttcaatttaaaaaatgcattaaaatgcccataattctgataatyctcttcccctttttctaacttcagcattttctattgctcttggagacttttaatgtgaatggcttggagacttctaatgtaaatggcaaagccctggatggcctattcattcagcatgcttccccttattctccctgtgttggccgcatttgctttttttgtctctaactcaaactccatcacaagaccttttctcatactcttctctctgcctggagactttgcctagttaaaacttgcttatcctttgatctgtatagaatgttatttccacagagatgcctccccgggtaaggtcatattttcctttcacgtacattggtagcaccttgttcatctcctttctcactgtgatcataaatgcagtggtacattcttcattgagaatgtttaatgtctgcctctgccattagaaaatagccttctgagggcaggaaccgtgtctactttgcagatagaagtacctatttcgtaggatagtgaggattacatgagtttagctcagtgcctagtacataagcacataatgttagttaaatcctgctgtatattgttttggttgtagtagaaggagattatattgatggtgaatacgttaactgggttaagtttaaggaagaattctgactctccttgtccagaaatagatcacctttggagagaagtagctagtctttttgtgacaagggaaagagaaaaatagcttcactcctgtactattcttgacttctgtatctaagtcaaactgtaagaaagcagctttttccaaaatattttctcctcttttccagcaatatttccctaattaaaaaaaaaatcaagtaggtaggcagtttcaaacagagattttcgattggaatttgggaaattaatatatagaattacagatccatatctgttatatcaaccaaagttataaaaatcaagaggatgggatccaagatgatacaacagacatttcatgtcatggcatagggaacaggtttgttgtgaatcatgtgatttttagggtggcttcagagagttttaaaaattatattcttgctgcttaatattttcttccagtgttctgcagttaccatggactcatctgagttcctgacattttgaaagttggtaggttattttaacatatactctaagtgtcaggttttaactttttatatgttaagtagatattaagaaaattgccttttcagtttatgcctttgacttatttattttacgtgacttgaatgccacctgctgccttgctctcagggaattggagtccttagatccaaaatgagatatgaataactaggaagtattgtttcctgtcattttccttcgtagcttggagtgttcatggagcaaaaagcacagactggcggcttgtaaagtatttagrgttctctgattcattttgctcagcttttagagtttgttgaaaaatctaaatttctagcctcttttgaaaattcagaaggcatggtaacaatgaaaaaatagcattcccacatggcatcaattgacagtgcttctgtaggtgyggcagaagcattccaggttgccacagctttcattttttgcttgccagatttgttcctattgcttcattcatttatattccttgtctggctctggcttctttaggcatttgagattgttacccctggcatagacgggtaggacactaccaggttaagaggaagggaggctaaatgcagtaatctgctgagctgattcagttacagtctcagaggactccaatccctatagcatgtccttgggacaacaaagggagtccttgttttctctccagataaattagatttttttgaatagcaatggatgtcttgtagaaataagtataggagtgttaaataatcatttaataacaactgctagtaaggccaggtgtggtggctcaagcctgtaatcccagcactttgggaagcttggggtcaggcgttcaagaccagcctagccaacatggtgaaaccttgtctctactaaaaatacaaaaattagccgggcatggtggcacacacatytgtaatcccagctacttgagaggctgaggcaggagaatcatttgaacccaggagacagaagttgcagtgagccaagatcatgccactgcactccagcttgaatgacagagtgagactctgtctcaaaaaattaattaaaaaataaatgaataaataaataaatgaaagactggccgggtgtggtggctcacacttgtaatcccagcgctttgggagtcctaggcaggcggatcacgaggtcaggagctcgaaatcagcctggccaacatgggtaatagcccatctctgctaaaagtacaaaaattagccatgcatggtggcaggcacctgtaatcccacctacttgggaggctgaggcaggagaattgcttgaacccaggaggcagagattgcagtgagccaagaccgtggcactgcactccagcctgggcaacagagcgagactccatctcaaaaaagagagagacctgctagtaataagtactactcaatcaggatttgtgttacctccaggactgttttctggagcttcctataattcttctaaaattataaaaatatgtcacctgtggtaaagtgtttgaatttatatttttcttaagcagagtttttaaggagaaataacccattgctaacaagttggtaagtggcatagaaaacaaattcctcatacctccaaaactctgttttgtttttttgcatttaaaaagttgtggtaaaatatacataacataaaattcaccatgttaactatgtttatatgtatggttcactggcattaagtacattcacattgttttgcaactatcaccactattaattttcagaacttttttatgatcacaaatagaaacagtaactcctcatttgctcctctccctgtacctggtaacatctattctatttttgtctccatgaatttgtctgttctatataccacatataagtagaatcatacaatgtttgttctttatttctggcttacttcacttaccataatgttttcaaggctcatccatgttgtagcatatatcagaatttctttcctttgtattgctgaataatattgcatcttatggatataccacattttgtttatctgttcatctcttgatggaccaaaaccctaaccwtttgactgcactacactccccaacccccagtcagtggctaaataggagagcagagcaaattcattctggttcattctcctcactgacttcttgttcttcctttctaatctcccctggagattgcatgtcagcatgacttttgatatctgtgaacccaaagcaattctgcttcctttaaacattagtgaagctgtttatgaatgttattctacccacttcacctgcttaactttaagagtatagtgatttccagcctggttctatctcacttatggttcttctcttgtgaatttgaccttcttgatatagccagctagatagctgaagggcttagttagctttctggtctcagctgtgtcattcactaactagctgtatgactttaagctstatcactagtctcagttatgaaaggaagagtttggagtagatgatattttgggtttcatctaactcccatattctatcattcaaaacatactttttatcatcagattggtggtagaagcaaaaattgatgaaaatacatttagagtttgtgattaaataagattgtatgtcagaaagtgcttggtaaagatgatcttaccatgatttagactataaaaaggtttccctacaaagctattggaaacagttaacttaattccttaccactcaggtaagtgagctgtagagtaaggaaggctagttaactggatctaaaacagtaagaagttgtatcttttttgatcatctaaaaaagttaaataataacatttggaaccaatttcaatacattttataatttttgatatagccataaaagttacttttattacttgcatttgagtgtgtttgggtaggatacctgaccgattgcttatacctgactatattattaatagaagagaggtgggaaagtcaaaggcagattctgataaattgataaagctgagatagatcagtagtttactgattttgttttattaaattttaaaaattttgtattaatataggaggtacaagtacagttttgatacatggatatattgcatagtgctaaagtctaggcttttggtataaccatcacctgtaaagtttacattgtacccatttctagtaaggtgaatttttgtcagcagcatatagttggttcaggttgttttatctattccaccrttctgtatcttttttttttttttttttttgagacggagtctcgctctgtcgcccaggctggagtgcagtggcgggatctcggctcactgcaagctccgcctcccgggttcatgccattctcctgcctcagcctcccaagtagctgggactacaggcgcccgccgctacgcccggctaattttttgtatttttagtagagacggggtttcaccgttttagccgggatggtctcgatctcctgacctcgtgatccgcccgcctcrgcctcccaaagtgctgggattacaggcgtgagccaccgcgcccggcctctgtatcttttaagtggagcatttaatgcatttacattcaaggttaatattgatatgtgagttttttttcctgtcatgatattgattgttatctagttgctttgtagatcctttgtttctctctcttttttttctgtttgtggttttgtgttctgttgtgttcctatttaatttctttctcttcctcctttttgtaattgttttataagacctctgagttctatacttacacgtgtttttatgatggcaagtatcacctttcgtttccatgtttaggactcctttgagcatttcttatactaccagtctagtggcgatgaattsctacagcatttgcttgtctaggaaagactatttctccttcacttatgaaatttattcctgcagggtacaaaatttgtagttgacagtttttttttttctttaagcattttaaaattagaatcccaatctcttctgccttgtaaggtttctgctcagaagtttgctgttactctgatggggttttctttataagtgactagatactttctcttgctgattttaggattttcttcttcacattgattttagacagtctgatgactctgtgttgaagtgaggtccttcttgcaatgtatttgcttggaatttgttgagcctcttatatctggatgtctaaatctcttgttagaatagggaagttttcatgaattatttctttaaaaaggttttccagacttttttctttttcctctccctcaggaatattaatctatgtaatatggtttggctgtgtccctacccaaatctcatcttgaactgtagttcccataatccccacatgtcatgagagggacccagtgggaaggtaattgaatcatgggggcggttacctccatgctgttctcatgatagtgagtgagttctcacaagatctgatggttttataaatggcarttcccctgtacgtgctgtcttgcctgctgctatgtaagacgtgcctttactccttgttcgctttctgccgtgattgtgagtccttcccagccatgtggaactgtgagtctgttaaacctcatttttctttataaattatccagtctcagatatgtctttattagcagtgggagaacggactaatacagtgaattggtactgggtagaaggaggggctgctgtaaagatacccaaaaatatggaaacaactttagaactgggtaacaggcagagactggaagagcttggagggcccagaagaagacaggaagttgtgggaaattttggaacttcctagagacttgtcaaatagctttgaccaaaatgctgatagtgctatggacagtaaagtccactctgagatggtctcagatggagatgaggaacttgttgggaactggaccgaaggtgactcttgttgtgctttagcaaagagactggtgtcattttgccctgccctagagatgtatggaactttgaacttgagagagatgatttagggtatctggtggaagaaatttctaagcagcaaagcattcaagaggaagcagagcataaaagtttgaaaaaattgcagcctgatgatgctgtagaaaagaaaatcccatgttctggggagaaattcaagcccayagcagaaatttggataagtaatgagaagccaaatgctaattgccaaaacaatggggaaaatggctccaggacatatcagagaccttctggagagcccctcccatcacagtcccatggcctaggagggaaaaatggtttcttgagcctggtccagggctcccctgctgtgtgcagctgctggacttggtggaaatggtgccctgcatcccagccgctccagccatggctaaaaggggccaagatacagctcaggctgtggcttcagagggtgcaggccgcaagtcttggcagcttccatgtggtgttggtcctgtgggtgtgcagaaaacaagaattgaggttggggaatctctgcctagattttggaggatgtatggaaacacctggatgtccaggaagaaatttgctgcagaagaagggaaatgtggggtcagagccaccacccaaagtccccactggggcactgcctaatggagctgtgagaagagggtcaccatcctctagacaccagaatggtagatccattgacaacttgaaccrtgtgcctggaaaagctgcagacactcagcgccagccatgaaagcagctgggagggaggctgtcctctgcaaagccacaggggctgagttgcccaagacggtgggagcctacctcttatatcagcgtgacctggatgtgagacatggagtcaaaggaggtcattttggaactttaaggtttaatgactgccttgttggatttcggacttgcatggggcctgtagctcctttgttttggccaacttctcccatttggaacaggagtatttacccaatgcctgtactcccattgtgtctaggaagtaaccaacttgcttttgactttataggctcctaggcggaagggacttgccttgtctcggatgaaactttggacttcgacttttggtttaatgctgtaatgagctaagtctttgggggactgttggaaaggcatgattgtgtttttaaatatgaggacatgagatttgggaggagccaggggtggaatgatatggtttggctatgtctctacccaaatctcatcttgaactgtagttcccataatccccamatgtgggagggacctggtggggagataattgaatcatggggacagttaccttcatgctattctcgtgatagtgagtgagttctagttctagtttatagttctagttctagtttatagttctataaactgctttttataaaaccatctagatctgatggttttataaagggcaattcccctgtacatgttgtttgtctgctgccatgtaagacatgcctttgctttctgccatgattgtgaggcctctctagccatgtggaactgtgaatccattaaacctcatatatatacacatgtatatatatttttatatatatatatatatataaaatgtatgtatatatgtgtgtgtatatatatgtatacatatatacgtatatatgtatacatatatatacgtatatatatgtgtgtgtgtgtgtgtatatatatattacccagtctctggtatatctttattgtgagaacagactaatacactatgatttatamgtttgattgttttatatagtcccatacttgttgaaggctttgtccattcttttttgttttttttgtttgtttgttggtttgttttttttttgagactgagtcttgctctgtcaccaggctggagtgtaatggcgcaatctcggctcactgcaacctctgcctcctgagtttaagcaattcccctgcctcagcctcctgagtagctgggattatgggcacccaccaccacagcyggctaattttttgtatttttagtagagatggggtttcatcatgttgaccagactggtctcgaactcctgacctcaggaagtctgcccacctctgcctcccaaagtgctaggattacaggtgtgagccactgcgcccggcctaatttttgtatttttaatagagacagggtttcaccatgttggccaggatggcctcaagctcctgacctcgtgatttgcctgccttggcctcccaaagtgcttgaattacaggcatgagccactgtgctcagctgttcattccttttttttttaattgttgtctgactgggttagttcaaaaggcctgtctgcaagttttgaaattctttcacctgcttagtctattctgttgttgaagctttcaactgtattttgtaactccttgaacaagtttttcatttctagaagttgtgtttcttgttcatatcctgagttgattttctgatttctttgtattggttttcagatttctcttttatcttgttgagcttctttaaaatcagtatttttaattttttacctggcatttcaaagatttctttttcgttaggatccattgctagagatgtactgtgctcctttgaggatctcatagcaccttgttttttcatactttcagtgttatgctgattccttcacatctggggtaacagtcgcttctttttatttttgaattacttttgttggagtaggacttttttttcttttgagggtgtgtctatgatgatgtttagtagggttgtctagttttgcttttgggtgcattcactgrtatagacactgtataatttccttggttataaaaagccttaatgcagcagctttctcaaatgccagttgtagtagtaatgtaccagtagggagagtaggctcaaggtctcctgagtagccgggcttgtgtgggtaatggtaatagtaaaggttgcacaaagcttgtgtccttcctgagtactgtacagttgtatcagcagatactgtaatgggctttgcatgttgacctcctggccagtaattgatacttacaggtgagagcctgctgtgatggttgcagtagtgtttatacttgacctttgttaaccaggagaagtacttggatgtcccatgcaacgggctgggctatggattagttgtaaagacttgtcttcaggttctgaagttcagcgcattatagtatctgctgacacaattgcacagtgctcgggaaggagacaaagtttgtgcaacctctgcaattaccataacctatggtctgtctctaaggcagttggggcagggcagagctgggtagagctgggccaggcaagtctgtgctcaggccctccaatggcaggtgcaaacaccagccctgataagggtcagaaggctgttttcaagcccctggagcaacactccagggagcagtaggacaaccactgccatgctagagagccagtatggggaaaaagggactgcttgagctccacagcttagcacgtggtagtgggacctgcattgctcccatggtcttgacctagcaagactttctcttgcagaccacctcttgcagcaagctgagacagccagccaagtcacaaacagttcatcctcaggttgcaaaaccaccccagtctgccaaactcccaggacaaaaactgcggcccccaggccacactcctcccagtccagtcccacaaagagggaattgggggcctaactcctgcacctgcagctggagctcacaccacattcacctcttggttctgactgtggggtgtcctccccgcttgagactagatcacaaatgccagtccagagattctccaaatcattgactgctgcctattctggttggtaggcatccatgtgtcccctaattaattaggaccagaaatgaccttctattgaccccaaggtctgggagtgtgcatggagcacttccctctgctgctccttctcacagtctctccactgctccctgacactatcagcacttgatagggtcagaaagctcccctgtgacctggattgcctggctccccagtaggaatgtgtattgtggagacactccccccactcacatactgggaattcacatcagttttctgcttgacctgcagtgcaagctgctgcccgctcttatttttcaaagtatctgaagtttctttcacttttgtgttaagctcctgtgttccttcttgtataaaagttcacagtatgaatctctacacactattttgttatttccaratggatgaggtatgctaacaaagcctctaatctgccatttttgagggaaaaaaaaagattgctgatataaaaatttcctaggttagtaaattttcagarcagctaactttgggaatcattatagtattgttaatgttttagttcactaagaaaaaaatataaaatgaactattatctattatcattttttcataaaaggaaaaacaaaaacattctaacagtaaatagtaggaattatctcagaataaaagacaggtttttaaaaatgaatagcacattactatttttctcttttttatatgcaccattgtaaacttggttggaaatcagtgtttggggattactggtatagacataaatgtatctgaaacttaggggaagataggatcataattgcccagattggccaagggtgggaaggatgctaaagaattggtgacagtttgggaaagaggtttcaggactgtgaagaagatgcattggttttataatatgctgaacatccaggttgaagtttagccagcagttggacaggtgagacttggagatcaagattttgcgacttcaggtgatagtcacaactctgaaaatgggctgtttcctgggggaaaatgtgtggtagataagaccaagggtaggtaccttgttagaggctaagggcctgtactctgaaacaactgcctgggcttgaatcctggcttcactgctaactagccagctgtgtgacttagtgaggatagtaatattatctaccttattatgttgccttgagaattaaatgagttactattacatacaatgctgggaagattgtttggcaggtggtatatgtgctagcttttgttattttttagtggattaaaagatttcttcccttggataatatgtggtagatagtgacagaccatttcctgtgtagaatatgaatacattctaaaaatcttatttttaaagctataggggagctgtggaagaaaagaggagatacactgaaagtctagagagggaagcccctttctcatgtgaactgagatggccaattggtttctcctgaggacagtttccaagtatggacatgtttctagatcaggtttggtccaggtgggggagcccacgcaggaaaagagaagtcaaatgaccttttaatagttgtatgggctggtttgacagatggaaatctaagggagcctgaaattcgcagacttatttttctccactaggtatttgctaaatgctatggcagtatgggaggctgagggccagtctagaaaagccaagttgaatctcttatagtctcatggtgcttaggagacttgctaggttctcaaactttttgatttcaagaccccattccaatcttaaaaatagttgaagacccccaaggatattttgcttttgtggcttatatctgttgatatttactgtatcagaaattcagaaattaaaagtaagaattttaaatatttattacttttaaaacaataatagacccattacatgtgaacattaataaacattttttggaaaaaggattacacttttaaaaacaaaaagatattactaaggagtaggattgttttgtattttgtaacactttactgtctggtttaataggagacagctgaattttcttatctgcttctgcttccactttgttgcaatgtgttgttttggttaaaataagttgagaaaatggagcctcccacagataagcagttgggaaaaggaggagcaatgtaaccactttttcagataattgtgaatattcttttttgatctgatccccaaatttgacaggtggtagtttcttaaaggttagttacagagtggaatctgaaaccatgtcaatgtactttttgaactttattacattaaaatgtgttattctgttttgtattttgagtgggtttttttacccgtccataattttgtaccatgcattgatcatttggaaatgttggtttactgaggtatgcttctcttccaaacattgacgttttattttatgatatttaaaaataccatatttattagtatcaccactgatctcattagaaaaagtcattaggtattgaaaagctgtcaagtttatagtggctgatacaagttttccacaattctaatttctgcctgaaagctcaaattttatttttggcaacaaatactgttatttttcttactgcatttattttagaggaaacacctattaaacattcaagttgaaagaccataatttgtctattcattgttctttcaagtaaaagtggtgtttcatggaaaacaaaaaaccagctaattcagcttgcaactcaaaagaatcacacaagctcttttccttgagacaaggactatattttggtatatggcagaaatgctttatatatacttctcattttgtaatttagattataaaaaagacatgtactcacaggtcaaaagttaataaatttcaccatttgtactggttcatcaaggacattaagtaaaattggtatttttttcttactgtgggtatatggcactgaaaactataaatgtacattgggtgccactgccttgattcatgttaagtctccaacagttttaccttccaatgcttttgtactattagtgctagtgtcaacacagaagagcaaataatatcttagtattactayattacagtttttatttcatgcttccccctcgmccaccaaaaaaaaaaaaaaatctcaggacccctggggatccacagaccatactttgagaactactaatctagaggaagawgcctacacagacaactgacagtttcacccttgagatttttgaaaatagaagtgagcagaatctaactaaagcttcattccaatctcatcctagctcagttcctttctgcgtaacagaggagagggcaaaggataggctcagtggcttacacctgtaaccccaacacttcgggagactaaggtgggaggatcacttgagcttggagttcaggaccagcctgggtaacatcttgagaccctgtctctataaaaataaaaataaaaaatcagccaggcctgttggtgtgtgctgtaatctttagctactcaggaggctgaggtgggaggattccttgagcccaggagtttgaggttgcagtgagctatgattgcaccactgcactccagcctgggtaacagagcaagaccctgtccctgtctcaaaaaaaaaaaaaaaaaaaraaagaaaaaagaagaggaaaaaaagaaagggcaaatcctctgtggcaaataacatcaaccgtagtctctacagttattttatatatagcatttgacacacaatcaratatgagaaaggactttgcttttagccatgaggaaataacaggatctagaattgccatttctctataaacaactgaataactgggcaatgtacctgaaacaactgtcttcatatatgggataacaggtaacaacactgttgattcctgagagaaaggaaacaaaagagataactctatgattgtcttggctttctgcctggaggcaacttccagatcttggtgcagggaagggaaattcaaacagcgcctgtggtattgctgaatggtgggagacatagattaaagtttgggcaggtcttggtaactaggatgtgcaaggtgatataacagacaggagggagctatggaaaaaaaaagttctagataatctgtttaggagtccctttgagtcctatatatgggtaaggtgaaattccatggagtgtgcaaaaacaacttcttagaaaaagttattgaggagctgaacaattcccagagaacakacaggaccagaaatcatttgagttcccattagagtgaaaaacactcacagaawacgtgggttctttgggggagatattagaagggtcacacctttgtagtgggaataaattagttctagaataaagactagtctaagccaccataaatgaaactccacatagatcaaatgggttcagatgtaatttaactgtctgttagaacaaagatcaatcctctttaaacaaatatagcagaatctaacactcagcaacataaaatcaactacttggcatacagtaaaaaaattactagacatgtcaagaggcagagaaacatagctcaaaaatcaaaattaaaaccaattaatagaaacagacctsaaaacagaaataatggaatcagcagacaracaagaatgttgaaatagctacaataaatatattcaatatattcaagtaattaaaacaaaaatcaacataagtagagaaatggaaaatataaagagccaaatggaacttataaagatgaaatataaagtatatttaatgaatttcacttatataaattacagacaagttagatactgcagaagaaaagatcaattatattaaaaattactatgcagaatatgaagcatagacagaagatgaaaaaatgtatagagcttcattaatgtttaggccaatatcaagtggtttaaaaaatgagtaattggaacaccagaaggtgggcacagaaaaataaagtaataatgtttcaaaaattttcatatgtgatggaaagcataaacttccagatctaagaagctcaataggccacaaacaggataatcataaagaaaaccagcaccaggatacatcataatcaaattgctgaaaataactgataaagagaaaaatcttaaattcaggtagattaaaaaataggcctattaaagaggaataaaggtatgcttatcaagacatatcagaaactataaaagtcagaagataagagaatgacatctttaaagtgttgagaggaaaaamaaagctgtcaacctagattactatatccattgaaaatatcataaatagaggtgaaatacttttttgacaaatcaaagctgaaagaagtcatcacaaacagatcaccagtatgagaaatgttaaacattgttcttcagaaagaagggaaacgatacctaatggaaactgagctacacagaagaatgaagcattttggaaatgctaaatatgtgagtaaatataacagagttcttgttcctcatttaaaaatttaaggataattaactatttaaaacaaaaaaacccagcaatatattgtgggacatataacatatgaggtagtaaaatgtatgaaaacaagataaagggtaggagaggaataatgaatgtatattgttgaaaggttagtacattttacagaaaaggttatactataatttgaaggtagaccttgataagtgacatggtttggatctgtgtccccacccaaatcccatgttgaattgtaatcctcagtgttggagatgtgacctggtaggaggtgactggatcatggggggtggtttatcttgaatggtttagtacgatgatctcggtactgtcctcatggtagtgagttcttatgagagctggttctttaaaattgtgtggcacctcctccctcccctgctcctgcttttgccatgtgatgagcaagctcctgctttgccttctgccatgattgtaagcttccagagccttctccagaagcagatgctggtgttatgcttcctgtacagtctgcagaaccgtaagccagttaaaccacttttcttataaattacccagtcccaggtattcttcatagcaatgcagggaatggactaatacagtaagtaaaatacatatactccaaatcctagaagaaccacttgaaaaataagccaaatagagaagataaaatggaatactaaaaaataatccagaagaaggcaggaaacgaggaaaaaagagagaacaaacagaaaacaaatagtaagatggtagatttaaacccagtctcatcagtaattaaattaactctaagtggtctaaatcttccagataaaaagcaaagattttcaggctrcatatgaaagcaagaaactcttggctgtctataagaaacttgctttgaatataaaaaccaaagagatagaaaaatatgtatcaaacaaatagcaagaaagctgaaatagctgtattaatctcaaagcagacttcagagcaaagaatattacaagggttaaaaaggaacatgtattatgttggtgcaaaagaaattgtggcttttgccattactttcaatcgtaaaaactgcagttacttttgcaccaccctaatataaatcataaaacagtcaattcatcaagaatatataagtattcttaatgtgcatagatgtacataataacagctttgaagtacatggagcaaaaactgacaactgaaatagacaaatccatagttatagtaggagattttaatactcctctcttaacaattaatagaacaagtatacataaaattcatagggatttagaagactgaacagcactatgaaccaacttgacctaattgacatttatggaacatgcctccaaacaagtacagagtaaacattcttttttttaagtgcacatagaacttcacttagattaaccatatgctgggtgatatttttaaagtctcaataatttaaaagttttgaaatcacagaatgtattccctgactgaaaacagagttaaattagaattcactataatagatatctggaaaattcccagatatttagaaattaaacaatagtcttctaaataactcatgggtaaaatacgaaattttatggaaaattagaaaatattgtgaatgaagatgaaaaaacaacatgtcaatttgtaggatgcaggtaaagcaatactagaggaaaattaattgctttacaataatgatctaagcttctacctgaataaacgagaaaagaagagcaaattaaacctaatgtaaaggaaggcagtaatatagagcagaatcagtgaaataaaagacaaaatatagagaaaaatgaataaaaccaaatactgttttttaaaaaatcagtagacccatcaatatcataaatgatattgagaagaataggtagagttatggacagtccccagttyggtataaaggacactgtattggatatgagacaataagagaggaatcaaaacaggctaagtttcaagaaggggagtgccaagcttgaagtctgggtataactgttctggggccaatccaaagtttgcttgtacttctgacactagagtaaattgaagggaacgttgaaggaggccaggatggaattcagggtgcccaacaagtcacctgtatcaatactgatgaactgagactaaaaggaagaggaggaaattacctaccggttagaagacagtaatgtttgctctttccttatgaaaaattatttgacatggtttatgcattaaaagttcagatgctgtgaaagccttatgtgtagtcatttttctctgtcagatttaagctaatgaatcatgctcaagttactttaaaattgtatctaataagaaaatgactgaaaacttttttttgagaattttaaagatgaacatggaactaaagatcaagaaaaatatgcaacttgttgtataccctcttttaaagaatgttttaaaaaaatttttaaagccattaccgttcactgctgcaagcagtatctgactgttttattttctatgggttaactcaaaataggcagccaattgaaatctacttcagtatactgacagagctgctgcccaattagcttctttacatacaagcaaagttacacttggccgatgttaaaacatgtatacctgtgtttattttcatctagggtccacttttaattagagaaaggttctattaggtatgttttaggtgaagccttattggcctgaattctcaggtcatttttaataatagaagagtctaggattaatattgttataaacatcaagcttaatagttgttttttttataaagaaatgtttcccattagtaaaatggctaaaatcctttttataaaatatgtattaatgtgcctggcaaagagagatgtctagattgtttttcaccaagggttaaattctgggtaggaggttgtagggtgattttttccccccttttatttttgtacttgtttgacttgcttgagtcttaaaaaaaaaatgagcatgtatcttttttttcaaaatctatgaagcattcaaaaagtgctggygcataagaaacataaagtaaatatttatttaatacatgaatgaaatggattttgtgggcaaactaagggtaataggttcagttataatatgtattgatacattagacatactacaaagtaactttggcagtaattctagtttgccaccctccacaaaggaaatataatatgggtttataccattttagtatactagaagtaccaataacttcctaaaacattggccctcctcatacagctattgaatggggtaaagcatcaagaaaaatctttgctttcaaatgatttccgtacctgctttgtaatcccccccatcccctgcttggaatagaaactatttctggcagcaggagctctctaaggatgttattagtccttatacttacagtagacagttatacaaagagttaatttaaaaataaaatctatttcttactagccaggaaagaaggaggttagtcagttttcactgcctttctttattccctcttatcattacacatggtatttttaaaaaactcttctgtttggtttctttcttatctctcatgagctgtagatacagtgttgtgggcctcctggttcaccactgatcttaagagttagatggggtttcttttccaatagccatgttattatctcttccacaagaataaaatacttaggccctaaatataaaatgtgagcaaaaaggtggttctaagtattaaaaagtcttttaatcacaaatcatcttctgcatttcctctccccaccctccccccatyagttcaaggaaccttatttgaagcattattttgtattttatggagctagaaattccaaaaaaggttaaaaaaatagctatgatagaatccagttagatttttcatttattactaaatcacacaaactcaattattctctagattgttaacactgaaaggatgttaagagcaaaagtagacttgggtcatacatcagatgagcataatgtcctagtgtttccaggatgattctggcttatatctattttcttggcacatatttaatacactttttatttggaataatgttagatttatggaaaagttgcaaagacattttagagagttcctttataccctataccctcacctagtttcctctattaacatctgatataatcatgttacatttgtcaaaactaagaaatcaacagtggtacgttactattaattaaactccagactttattcagatcttaccagcttttccactaatgacctttttctgttccaggatccaatgcagtataccacattacgtttagatgtaatatctccttattttccccattctgtgacactttgtcagtctttctttctttttcatgactttaacagttttgaggagtattggtcaactattttgtggagtgtcccttagtwtgggtttgcttatgtagactggggttatggtttttcagaatgatacagagatgaattgcccttcttttcacataatttcaggactacattttacgttatgacttatcactgttgatgttaatcttgatcatctggccaaggtagtgtctggcagatttctctactgtaatgttatccccatacctcatcctctgttctttggaagtgagtcactaaatctagcccacactcaagggggtaagttaagctcttggagggtatctgtgtaaattaattggaatttttctgtaaggaatatctctcttttctccccatttatctgtatcaatacggactcagggatatttatttatactttgagttatactccattaacatgttattttgttgctcaaattgttccagctttggccattgggagctctttccctttgacataaccccatccttttgttgaacacttccttactttctggtactacaagatactctggtttatcttgtattttcccarcctaatcatagaartagccatttctccaaggagctatggttttttttgtttgtttgtttttgtttttaattgaatagtggtatttagaaaccaatatctgggttgtggatatgatcattgcttctggacattcctattcctaggccctctccacagacagagcaaggaaatgtatgtatacttattcatgtatacacatgtttctataattatttgtgtatctacattaagttaaacatgaattcatattgataattctgtctccaatccaataccacagtattccttgtagccttcccccttagtttatctgtaactttccaacagtgagtaatctggcttctatgatgtagcatctatttacctgtttgttcgactgtagtatacatgtaaagcagtttcagaaatgttaaatcatacccctgtgagaaacagctttaccaagtaagaaacagtattcatgtacaagttcttttgcctctagccttactgtttacagtcaaaatattattttccaaagttatttaggtccactcctttttttcccccatattctcagagatattatgtcatacatttataatagttaggttctttttcacagtctacattccatcctgggaatgccaacytgttggctgattttttaaactttttatacatgaaagttcatgttttatgttgtaaagttctttgggttttgccaaatacccagtgtcatatattcactaccccagtactatacaaaatagttccatcaccctaaaagttcccttgtattcccttttgtagtaaaccattctctactctcccaacccctggcaaccactgatgttttctattccttactttagccatttccagaatattatatgaataaaatcatacagtatgagtggaatcatacagtatgtaatctgtcagatcttttttcacttagcaaaatgcatttaagatttatccatctcattgtgtgaatcagtaggttattccttgttgtcactgcataatattacattgtatggatataccacaatttgtttacccattcttcttttaaatgacatgtggttgcttccagttctttgattatgaataaagctgccataaaaattcacatatggccgagcacggtggctcacgcctgtaatcccagcactttgggaggccgaggtgggtggatcacgacgtcagaagatggagaccatcctggctaacacggtgaaaccccgtctctactaaaaatacaaaaaattagccagccgtggtggcgggcgcctgtagtcccasctactcctgtagtcccaggaggctgaggcaggagaatggcgtgaacccgggaggcggagcttgcagtgagccgagatcgcgccactgcactccagcctgggcgacagagcgagactccgtctcaaaaaaaaaaaaaaaaaaattcacatgcacatttttacatgaacgtaagttttcagttcacttgaataaatacgtaggagcatgatttttaggttgtatttgagtctatttctaattttataagaaactgccaaactgtcttccgaagtggctattaacattttacatttccatcagcaatgaatgagagttcctgttctgcatctttgcctggtataatttttaatagtgtcctttttcattttcagtagtgtcctgggctggataataaacttatgctctactaagtatacatattgttgacatattctttcttctcttcttatgcattgtggctgtcggggtgaggaaattgagtctaggattttcttttcttcgttttttgattggtagggttttccccattagcatggttttagatcatctaatttaaataatggtagtctaaggaaatagataattatactaaaataatgtaattgattgaataggattgagaatcatgtaatgcatgccaatctctttgagagtttatttattttgatgacattcttctcctagttgtctgctaactttcttcagtgacatcacaagtaattttgtacatttttgtaacatttgctccagcactcagagtgtaatttggacctttcctagcatctcaagagatggagaaaatgaaatcattgcaacttctaatacagttttctaccaggctcacagttgaagcctcwagggatggtcagtagggctggaaagccaacttagtctatgggtcttcctgcagaataactgtggatatctgttatccttcagacctttatgcttcagtattattttaatgttcatgtttattctttggatttggattacaggttaagatatttcagttatacctttgacacactgcatattagccttgggtaactgcctttacacagcaaataatgcttttctttctttaaaatttttctttccttctgtctctgtaatttctctcccttattcctacaaaaataatggtatcagcaaaaatgagagttaaaggtttgctgaggaaatttttgagcagttcattcatgtcatctgcccagggtctctagagaaagtttaaatgaaaactgctaatatttctggaaatctaagctgctgctttagtcatgcaagtgaagattctactggcaggtcagaggctacaggtgcacctgcaggcctgtcatctcatctccaagaacagtcaaccaatctttctggtctttttcacgggtggtgaggagaagctggggaacaatgaactttccagatgtcaaggtctaagtagtcagaccctccttgggaatgtgtggaccgcaatggtggagaaataccaaagcagagtgcaacaggttggtggaaaaatggacaaacccttcagacttatttgagaaggaagcagcttgtggattaagttattctgttgctctgtatgtgattttcctttccttaagtcaaatttagatgtaacattcttgtgcatcttgttgctattggagaaggatagctgggacaaccctagctttggacttctgtggtttctttaattttgcattgttttatgtactagagaaatattttgaaggtttctcatattactaaaagtgattgctaggtgatctttatattttcctccaaactctgatgaaagaacaaaattgattaagcctttggaaaatatttatttctggtcaaatgggatttagttagcttcattgataaagtagtatagcttgcagtctgctgtaccctaatcctgagatctttgggcatttggggcaaattatttaacttcgattggccctactttgttcttttatgaaatgaggagattgcactagtgagttcttggataccttccaactttgtggactctggttttatgacatgaatggtcagattagattttatccaagatgaataattaccaaataatgtcagtgatttaaatgtaagcctaatcctgctgtgagccttagaacattgttctgtgacatgttcagataacacttaaatataggatccaattgtcaatttttgttttttttttttttagaaaatgacatatacaatgtaaaactatttacatctaataaacatgaagttactttttaatatcacaaagtttgaatttttgagtccactgttcctcattgtacaaatctttgtaaattattttgattcctgtatatgggaacccagaagaaaagtggatcatttttttcagtgccagattctttgcctagtgaatatacataactattaaataattaatacaatcttagtttctttaaatgtgtttgagttgacttttaaggacaaaaatttgtagcttcctttctcaaagatgcctttttagaggacacactagagaataaagaggatgaggaaagggaggctaaacttaccttcatttaacatagttaatgaagttctaaggcagaaattctgtttacttaacagttaatttgtaagagctttacatcctacatatgatttttctatagacatgttactgtatttttctggaaattatatcccttsttccagtaagcaagcctgacacatatttaggccatgtatttttgctcatgtacaatcatgcttttttaaaggtaaactttgcaggacctggaaacagatttgaggaaagatccagacaggtgaattgcctattttatttaaaaaaaaaaagagagagaaaaaaaaagatgttcagcttttagggttgagctgtcagttctcttggttttaatgtcctgtggtaaaagttggtctgcctagtattacttcaactgaaacttccttactgagtacatgggcaaaagcagtccaacatagtaaataatgatagttgattataacaatgaccctaaggcagtgtaacatatccaaatgttttctgatttatccatgaaagattgtgatcttgttgtgattttgttcccattcatttagtaagtactaatctgtatgtagtcaattggtattaaccagcgtacctcattccctgatccaagaggataacaggatgttttttgtgttttgtattaactctgctatagaggttttctgtatgaagatttttttttttytttaagagacagggatcttgctatgtttcacaggctggattcaaactcctgggctcaaacagttctcctgcctcagccttctgagtacctgggactataggcagaaggatgtttttaatttaaaaatgcaggaaggttaattatagtatcttctatattacggtcatgttctaaagatttctcagatctctcttcctaaagaaactggccaaagactaaataaagagatgaaattcagaggtcagtattcacctggaaagccttgctataaaagtacttctttctgaacatttaagctccctaatctctttttgaagattcatttgagcagacatttattgagcacttactgtgtataaaatagtatgaagaagggaagtagaactatgatatttttgtagccttcaaggactttatattctaataattccttaaattaactttcagacctatataaattttggacagtttttgtgtttttatttgcggaaattgagaattttgcatcagtcagacggaaagcaccagggggagaatgatctattcaaaagtctacaagttgtgtgagtgtgagtgtgtgtgtgttaatattaataacaactttatttagatacaatttacataccataaaattcaccctctttaagtatacagtttagtgggttttttttgtttttttgtktttttttttggttttgagacagagtctcacttttgttggctggactggaatgcaatagcgtgatctcgactcactgcaacctctgcctcccgggttccagcaattctcctgcctcagcctcctgagtagctgagattacaggcgcccgccaccatgccctgctaatttttgtatttttaatagaaacagggtttcaccatgttggccaggctggtctcgaactcctgacttcaggtgatccaaccaccttggcctcccaaagtgctgggattacaggcgtgagccaccgcgcccagccagtttagtgggttttagtgtatttacagagttgtgcaaccattaccactatctaattttaggacatttctaccactcccctcaaaaaaacctcggtacctgttaattatcaccacctatttacccactacccctagttctgtctttatggatttgcctactctggatgtttcatatacatgaaattatggaatatttgtccatttctgcctggcttctttcactttgtgtaatatcttcagggttcgtctatgttgtacttcatttctttttataacaaaataatattctagtgtatgaatatataccacattttgtgtaacagttgattagctaatggatatttgggttggttctacttttgggctgttatgaaaatgcttctgttgcattagtttacaagttcttgtgtgaatacatgttttcatttctctttggtgtatatgtagagtagaattgctgagtcacatagtaactttgttttacctttttaaacttttcaaaactggctgtatgattttaaaatcccattaatgaatgaaggttccatttctccacatcttcatcaacaattgctattgttggtctttttcattttagccatcctaatgggtgtaaattggtgtcattgtggctttgatttgcatttctttaatggcttatgacattgaacatcttttcatgtccttgttgcccatttgtatatctttgcccattttttaactgggttatttttctttttattgttgagttgaaagtttctttatttgtatctagatacaagtcccttctcagaggcatggtttgcaaatattttctcccattctgtgggtggtttttttcaccttcttgatggtgtcctttgatacacaaaatttttaattttgatgaagtccactttatctaatttttattttgtttctcatgctgtgtctaagagcatcttaatcttatgaagatttacttttatgtagaaaatagcattttacagttttccttcttatatttagatctatgatctattttgaattgattttttttttttttttttttttttttttgagatggagtctcactctgtcacccaggctggagtacagtggtatgatctcggctcactgcagcctccgcctcctgggttcaaatgattctcctgccttggcctccttagtagctgggattacaggcgcacaycaccatgcctggctaatttttttttagtagagatgggggttttaccaggttggccaggctggtcttgaacttctggcctcaaatgatctgcctgcctcggcctcccaaagtgttgggattacagatgtgagccactgcacccagccctgttttgagttaatttttgtatatggtatgagttaagggtccaactttatttttttgcatgtggctacccagttgtccccataccatttattggaaatattattttccctgttgattgaactctgcgtctttgtcaaaaatcaactgaccataaatttaaggtttttttgttttttgttttggagacagagtcttgctgtgtcactcaggatggggtacagtggtacaatcatggctcactgtagcctcgacatcctaagctcaaatgatcctctcaccgcagcctcccaagcagtagggactacaggtgtgtgctgccatgcccagctaattttttattttttgtagagagggagtctcactatgttgtccaggctagtcttgaactcctgggctcaagtgatcctcccgttcttggtcttccaaagtgctagaattacaggcatgagccattgcacctgaccaaatataagtttttatttctggactctcaaatctattctgttgatctgtttgtctgtcccttatgccattattatactgtctttattgctgtagttttatggtaatttttgaaatactgtaaaagattcctgcttttacttttccccattgcccatatccttttggtcaccagtgtttaattcttgctctttaatattttcagagtgttctaatttgtgccctcactaacaattcttgggttcaagactttaattattatggtggtggtggtggtggttcacggccaaaaaaaaggaaagaaaaaagtattagcttttcagccatttttgtttacctcccgcacctgacattataaaaggtgtaggggatataacagtgaatacacagatatgtgctgtagtcttgtcgaccttatattctagttggagaaaacacagtaaataagttttaaaaaatagtgcagtgaagggaattaaataatctttgtgaaacataatctgggtgttttactgattgaaattcttcagaggctccccattactttcagaataaagttcaaatttctcaactagttatatttgaaattttttccacattagcttctagtaagttctctgctatcttcctttgcgaataatttgtataaactgtgcagctagtgttaaacctctgaaaaaatcacctgtagctgtaaaaaatttgcaataagctctttttatcttaacatattgacttgcacattacaaatactagcttatatattggaaaataaattaataaaatgctataattatagtgaaatatttataagtaggatgaaatatattaaaggatatgttgacatcctgatatggaagtcaaaaagttcagctgcaaaagttatttcatagtaaaagcattctagttgagtttcatgaaactggatcacagcatatctaatcaggagtctacttggtttttgactgtgccaaatgttccaaaatattaaattatgcctttgactatacttcctgtcttgtttaaacaacacctaatgaatttaatgcttcaattccttggatacagtaagtaaacataagcagcatcttaagaaaatggaacatagctatgaaygaggtttaaaaaaaatctcatttccaaaatgaccaagaggatgagccagttttctgttgccatgaagaaattctattgttagtgagtatttaatagcatttaacatatgcttataggctctttgatttaaaactattttctgtctcaattgatgatgaatgcaaaaacaagaaagatgggctggatttggctcctttccagccttattatggaggttagagtcgagaaaagcaccttattacctggttaattcatctaacacaaatatttattaaatacgtgctatgtgccgtatggtgttttatgcactggggatgcagctggccaggcaaacaaggctcccattattagggtgcttacattttagaagtagatagggtagactgataatggaaatgaggggatgacacagtctaatgatttctgctttccttcacactaaaataaaactttatagtttccttttacttctagcacattccattcttcaattcggattattaactacttttgaggaaagaaagaaatagtagaaaagtaaatctgtatcttttgtgacttccagtttctcctgtcacatgtaaaaagtttggaagctgtcactcccattcctacaacaaggaaaaaaatgaaaaactgaaaatcaataactcttaatagatttatcagataattgaggtctcaggggaaaccgctgctctgaaaactagagagaaaggtgaatacaaagaatcatagctaactgggaacataagctgcaagaactgtcaggattagttggatgataattgactagtgtctggagactgaatctggataacttgagagttaaaaactaaggaggcccccacactttcatgaaagttttactcccaggctggatactaccacctttcaaagttgaagatctgggaaaaatcccctcatgcatttggcaaggggaaaggaaaatgatccactttgaagtgctctcagagtgttctcagtaacaaaggccagccctcaaaggaaactaccaatttaccccaccatggcctttctgtctaacataaagggagggggaaaaagactgagaaactcttctgaaggtcagaacccaaggaatcacaaacactaacaatactgagatttaattataggagtatagattgcttcccttccacaataccttcctaccacgtcaacagagctccagtaaattaagagtagatgacagctgagagagctgtaagacacagaccctatttaagaaggagtttctagggaaacccaaagatarcaggggagacaaaaacagggacactagaggaaactgaagcctctgacacctacagctacaacaaactttaaacacaggccaactcctagacagttaaacgtaaatccttacattagaggtctatttacagtaaaacacaaaatcactagtacagaagaaaaaatatttctaaatataacagaaatttttaaaattcaaaaaaaactgataatagagaaagaaaatatagcagaaaaacatattatacataatatataatatgttgagaccaaatatattaatcattatcaataattatgaatagccctaactcacttcacctattaacaaaaagtattttcaatttggcagtaaaataaatttcatgctgtatagaaaatatatacctaaacaacatgaattaaaaagctaaaaacaaagacatgaataaaagaataccagaaaaatagaaaaacacatataaagcagcagttattattctgataccaaagtagaactaaagatgcattaaacatgaggaagaacacacttcaattcaaaataaagataacaagttatgtgtatttaacaccaaataacacagcaaccacatttataaagcaaaaaatacaagagctacaaagagacataagcatgctaattaataatgggagactttaactcatcactctcagtataagataagacagacaaaaatcagcaaggatagatttttgagaaggcctaaacaacatagccaaataggtaggtctgtacatatattaaactcgaagttctgataatagaaaatacatccttttctcaagtgcacatgaaatgtttacaaaacttgattgtatgtcaggtcacaaaagtaaacatcagataagtgttataatacagaaatgttatacgacctgatcaaaatgcaataaagccagatattattttataagttttaaatactcaaagcatactataaatatccatgagtccatgctgatataaatgattgaataaataataaagagaagaaaagaaacaaatcttccatgccaaagaattccaaatgatttgtatagataccctatcccaaggacaggaagcataacttccccgggactccttagtatgggttgagcatagtgacttccttccaagagtatgtgtgtggatggttggggagtaactttayggtgaagaaacttgataaacactacctcagccaacatcagcagagctaaatcatggcgattttatgtaccttcggtatgatatgatgaaagtggcacattagtgctgtgttcttccttccagaaactcataaccccagtctaatcatgagggaaaaagacaaatttcagtagaggatctttctgaacaacacatttttttattgttgagacggatactctgtcgcccaggctggagtgcggtggtgcgatatcggctcattgcaacctctgcctcccaggttcaagctattctcctgcctcagccccttcagtagctgggattacaggtgcctgccaccatgcctggctaatttttgtacttttagtaaagaacggatttcattatattggcccagctggtcttgaactcctgacctcaggtgatccacccaccttggcctcccaaagtgctgggattacaggtgtgagccaccatgcccagtcttcagtgctattttaagtgatattacatttagattttcagtttccaattgtctattgctagcatatagaaatacattagccttatgtcatacaaccttgctaaactcatttattggttttaacaggttttaatagattatttatgattttctacatagataatcatgacatttgtaaatataaagcttcattttttcattttcagcccgtgtgtcttcttttcttttattatacctgctgaaagatctagtatgatattgaatagtggtggtgtgagtggatgtttctaccttgttccaaatgttagggggaaaattcatttttttcacaattaagtatgatattggctatagggtttttgttaggttgaggaagcttccttcttttaccagtgtactgtcgttttttttaagggcctaattgtaatatatttatttatttatttttatttttatttttttattattattatactttaagttttagggtacatgtacacaatgtgcagtttagttacatatgtacacatgtgccatgctggtgtgctgcacccattaactcgtcatttagcattaggtatatctcctaatgctatccctcccccttacccctaccccacaacagtccccagagtgtgatgttccccttcctgtgtccatgtgttctcattgttcagttcccatctatgagtgagaacatgcggtgtttggttttttgtccttgcgatagtttactgagaatgatgatttccaatttcatccatgtccctacaaaggacatgaactcatcattttttatggctgcatagtattccatggtgtatatgtgccacattttcttaatccagtctatcgttgttggacatttgggttggttccaagtctttgctattgtgaatagtgccgcaataaacatatgtgtgcgtgtgtctttatagcagcatgatttatagtcctttgggtatatacccagtaatggaatggctgggtcaaatggtatttctagttctagatccctgaggaatcgccacactgtcttccacaatggttgaactagtttacagtcccaccaacagtgtaaaaatgttcctgtttctccacatcctctccagcacctgttgtttcctgactttttaatgatcgccattctaactggtgtgagatggtatgttattgtggttttgatttgcatttctctgatggccagtgatgagcattttttcatgtgtgttttggctgcataaatgtcttcttttgagaagtgtctgttcatctccttcgcccactttttgatggggttgtttgtttttttcttgtaaatttgttkgagttcattgtagattctgggtattagccctttgtcagatgagtaggttgcgaaaattttctcccattttgtaggttgcctgttcactctgatggtagtttcttttgctgtgcagaagctctttagtttaattagatcccatttgtcaattttggcttttgttgccattgcttttggtgttttagacatgaagtccttgcccatgcctatgtcctgaatggtaatgcctaggttttcttctagggtttttatggctttaggtctaacatttaagtctttaatccatcttgaattaatttttgtataaggtgtaaggaagggatccagtttcagctttctacataggaagacagggatgccctctctcaccactcctattcaacatagtgttggaagttctggccagggcaattaggcaggagaaggaaataaagggtattcaattaggaaaagaggaagtcaaattgtccctgtttgcagacgacatgattgtatatctagaaaaccccattgtctcagcccaaaatctccttaagctgataagcaacttcagcaaagtctcaggatgcaaaatcaatgcacaaaaatcacaagcattcttatacaccaataacagacagagagccaaatcatgagtgaacccccattcacaattgcttcaaagagaataaaatacttaggaatccagcttacaagggacgtgaaggacctcttcaaggagaactacaaaccactgctgaatgaaataaaagaggatacaaacaaatggaagaacattccatgctcatgggtaggaagaatcaatatcgtgaaaatggccatactgcccaaggtaatttatagattcaatgccatccccatcaagctaccaatgactttcttcacagaattggaaaaaactactttaaagttcatatggaaccaaaaaagagcccacatcgccaagtcaatcctaagccaaaagaacaaagctggaggcatcacactacctgacttcaaactatactacaaggttacagtaaccaaaacagcatggtactggtaccaaaacagaaatataaatcaatggaacagaacagagccctcagaaataacgccagatgtctacaactatctgatctttgacagacctgagaaaaacaagcaatggggaaaggattccctatttaataaatggtgctctgaaaactggctagtgtactgtcttttatcataaatggatgttgaattttgtcaaatgctttttctgtatctgttgagatgattgtatgatttttcttyatacaaatttcttcatacaaatgttaaaccaaccttctgttcttagtataactgtacttggtcatggtgtatcattctttttacatattgctggatataatttgttaatatgtttgaggatttgtgcatctgatatcataaaggatattgtttaataattttcctgtaatgtctctttctggttttagtctcagggttgtcattgtctggttttagtatcaaggtaatgctggcctcataaaatgaggtaggtagtgctttcttctgttttctgaaagagctgctggtatgagttcttccataaatatttgatagaattcaccagtgaagacatctgggctgaactgttttagtttttttacttcttcttacatgaactttcatagatagtgtttttcaaggaatttgttcatcccatctaagttattgaatgcatgggcataaagttctttgtaatatgcttttattatctttttgaagtatgtggggtctacagcagagtcctatcccttcattgcygatatttctaatttgtgtcttctttctttatttcataatcattttggctagaggtgtatctggtttatatatcttttcaaaagattttctgtttcattggttttctcttttgtttttctgttttctgttttatcaatttttgctttgatctttatttttccttctgctttttttagggtttattacgctctttttctggtttcttaaaatgaaaaattaaatctttgatttgaaatctttcttttctaatataagcatttaatactataaatttctgcattcctgaaattttgatgttttgattattatatttttatttactttcattcaatttataacattttctgatttccctctgacagcctctttgtcccatggattatgtggaaatttgtgtttaattttcaaatatttggggattttctagatatcttcctattactgatctttaattaaaaaaaataagattgccacaaagaaaataatacctagtagtgaactcaaaatcggaaattataaatatatgagaaccttacctaccataagtaaaaataagcaggaaggttagcacctcaggaacctgagatacagaaaaacatgaaagggctataacatgactgtttaaaatgattaaagagataatataaggaacattaaccaaaaataaagaaaaagatactgtgaaaagggtttacgtccagcmccgtcttccctaggaagtgtttcttggactgtttattaaagctgtgcaaatcactatcatggcactgaaaacactgttcatggcattttatgccctagcctcccctcttcttcctgcctgtgcctaaccactctaagtgttaagcacatggatttggtaacagctgggctttattctttgtacttccaaggtctagcacagtgcctggcacatagtaggtccttaggaattgaactaaataaaacctacataactacatgctaaactttaaaaagcaaaaattatatcagttcagttgatcggtttggatgagggggtaagtttttgtacctaactgagcattaactttagcaacaccacataagagtattagctgctgttagttgctttcattggtgatttttttttttttttttttttttgtgatggagtcttgctctgtcacccaggctggagtgcagtggtgcaatctcggctcactgcaacctccacctcctgggttcaagtgattctcctgcctcagcctcctgagcagctgggattacaggcgggcgccaccacggcaggttaatttttgtatttttgtagacatggggtttcaccatattgaccaggctggtcttgaactcctgacctcaagtaatctgccgtgcctcggcctcccaaagttctgagattacaggcgtgagcaccacacccagctggtgataatttttaagatgttcacaggatccttctttagaagagaaaatcttactcatttgcataagagaaaagaggtgtttccctgttgtcctaagcagtaatctagttttggaaatggagcagagggccatgctagaacctctgttgtacttcatctataatccagagtgagaaaaakyaggagatttgactgattgccagaaccgtagcttctgtgctttaaactatgggctctggcagagagaaagtgggagttaattccaatcaggtccttgtagagggacattagctagcaggtggcttaagggagaagaaaaagggttacttctttctcctgtcagctttaggtaaaagttatagatggtacttttgtagaaaaagtagataggcccagctggagaattcctggaggaatgtgtgagaatacaagcaacagtggagaacaagataagactacagtctgtctctagattcagaacaagtcctgaggtataaatttaacacgttgtttcctgtttataggtaatattaatcataatagtataaaatgagaagtaaaattattaagttaaacttattttcttaagttagctctatttatttaaacttttggaggccgatttttactctgcctcgtagactaagaagttattcagtattaacatactttaaaaaatggattattacaccgggtgcagtggctcacgcttgtaatctcagcactttgggagtccaaggcgggcggatcatgaggtcaagagatcgagaccaccatctgagccaacatggggaaaccccgtctctactaaaaatacaaaaattagctgggcatggtggcacacgcctgtagtcccagctacttgggaggctgaggcaggagcatcacttgaatccaggaggtggaggttgtggtgagccgagatcacaccactgcactccagcctggcaacagagcaaaactctgtcttaaaaaaaaaaaaaaaaaaagattattagacttgtcaggcaaaaataaaagtcaagtgtgtaggtttagttttggcactcttctataattacctgtatacattgagaaacatgaaaatttgagacctagactttgaaagtggtaatttgcattctgttttaaatttacttatttgattagaacctaatatcaacatttttaaactctctaatatagaaggattaggatttggcaagaattatgtgatactagggccgggcgcagtggctcacgcctgtaatcccagcactttgggaggccgaggcgggcagatcacaaggtcaggagatcgagaccatcctggctaatacggtgaaaccctgtctctactaaaaatccaaaacaattagccgagcgtggtggcgggcgcctgtagtcccagctactcgggaggctgaggcaggagaatggcatgaacccgggaggcggagcttgcagtgagtcgagatcgcgcaactgccctccagcttgggcgacagagcgactccgtctcaaaaaataaaaaataaaaaagaattatatgatactgatgaaacatgctttaaccccttttcctcctacttcccagactaaatgcagttcctctgaatttaccctaaatgcaatgtgcctagaaattcttagaatagctgtacttcagagtcttgtgatttacttatttttattgagcatgattttttaaactaccggtgtacaacagtgagagagaaaccaaaaaccagggtgaaaaaaaaataaagaaaactggtacctgctaaaatctttgcctgggtaccttgcttccagcccacagtttggtgactaccccccttgactgcctgctagaatagaagtccataacatcaggaaataataaatggttattactttctccttaattgaatcttttaaaagcctaaaatctctatygtgtaaaatggttacactgagatataaaagaaaaaacaagagtctagtttcttggtttgaattttgccttggttcaactataagtaagttacttaactcttctgaatatcagattctttacctgtaagttgggaaaaatatcctctttcagggtgattataaagattacatgagataatacatattcctagcacatgccagcattagaataggaactcaacagctattaggccttttcccttcttgttacagcctttgacaaattatttaatttagttaatttgtaaattaattcaaggaactggcatctaaggtgtcctagactcgacaatgctttaagacccagctaggtttttcttggtcttggagctgtctgtctgccttcattcttactaattcttactaatsttatagttgtcaattttatattccaccagagtattttcactctgaagtgacctaattcaacatgccaggaagcatttaacatttactttgaaaaatgaactacaatcattgtttagtagattgtaagggaaaatgtcagttgaaataaatgaaaacaggagaatgtaacctgcagatagtctcaagttgccacttgagactgtcctttactcttgctgtattcagtttagtcttagatttcttcttatatgggagttagaatgaaaatctaaaatattcaatttccttttcccatacacctgaatttcgagtaccccaatcctttggtgaaaagaagtttgtccacttctttgagttgaataactatggtaacttacaaacagacctttcttaatgatgttttacagtaatagctcatattttggtactttggcttccagtggttgactttttttttttttactttgagacagagttttgctcttgtcgcccaggctggagagcagtggtgtgatcttggctcactccaacctctacctcctgggttcaagcgattctcctgcctcagcctcctgagtagctgggcttacaggtgcccaccaagcccggctaatttttgtatttttagtagagacggggtttcaccatgtcggtcaggctggtcttaaacttctgacctcgtgatctgcccgcctcagcctcccaaagtgctggggttacaggcgtaagccactgctcctggccggttgacattttctggaagcattcactttatctgtattttaaaagataaaaaaggaggatagttcttattttgaactggagactggatgctcagaggtaaccagatattctgagcatcatcaagaactatcttactttctgccacttgaaaagaggtgataaaaataaattattcttgagttgttatgtgtaggtctagaattgatgtctgctaaatgggaaaagaataaaattgatacttgaatatcctgcattgtaactagagagggagaaattaaaatttcattattctttaatatgcacttccttatctttgaaatacactcgttatgcttaaatagcaggcttaaaattcagcattgtaaaccataccacactatttttgcagattctttaattttgctgatgttattgaatacaatggaaactgcagatcaagaagctttgtttggtgaaattctttgtagaagtcacaatctggtagtgtatttagattgttgcatgttctttttttcttcaaattgggatcacttttgaaggtaatcttgcgtaaatgattcaatgaagagttgctgatgctttcactgaaacatatcctaataatgactggtgaatattctctgaattactcgagaccttgcgagtagtttgtgctaaaactcctgaatgatgattcggtaaagtgttagcaaacctgccaaaactcttgagcataatccagaactctaactactagaagtgaggtgatattctcaaaggtctcttttgctcttttatcacttcatctcttttggggttccacaactcagaagttcaaggctgttgttcatttttcagagttgggaaaactgtttctcatggygaaggtcttttaggtttctttctgtagttttttttttttctttgcgaaacacatcttactctgtcatccaagctggagtgagatacaaaagaaactgcagccctgacctcctgggctcgagtgatcctctcacctcagcctcccaagtaactgggactacagacataacaccacccacatccagctaatttttttatttgtagagacagagtctcactatggtgcccaggctggtctcaaactcctgggctcaagtgattcttctgccttggcctcccaaagttctggtattacaggtggagccactgcacctggcctgagatgattttttattttcacagctgtgtatggagattggtactggcacctagtgagtaggagccagccagggatgcagttaaacgtccttttgtggataggacaatcctttacaacaaagaattctctgtaatggtgaggttgagaaaggtcatgaagatatgctcctatggttttttctagaggatttataatttcagctctaaggactatgattgatttaagttaattttttatatgatgtgagataagagtctacattgttcttttttcttttttagttttttattttattattattttttgagatggagtctcactctgttgcccaggctggagggcaatgttgcaatctcagctcactgcaaattccacctcctgggttcaagcaattcccctgcctcagcctcctgagtagctgggattacaggcgcacgccaccatgcctggctaatttttgtatttttagtagaggtggagtttcaccrtgttggccaggctagtctcgaactcctgacctcgtgatctgccaaccttggcctcccaaagtgctaggattacaggcgtgagccactttgcccggcctgttctgtgttttaaaaataaatatatgaatattcagttgccccagcaccattggttgatatgaccctttttcccattgaattgtcttggcacttttttcaaaaattaattgaccataaatgtaaggatttatttctgtactgaaaacyctgttccattgatctctatgcctatcattataccaatactacactacttcaattactgtagctttatcgtaagttcaggtagtagtacaagtcctctaattttgttctttgttttcaaggtagtgttgcctattctaggcactttgcatttttacttaaatttataatcaccttatcaatttctttttttgagagagggagagtgttgtccaggctggagttgcagtgacatggtcacatctcactgcagcctcctgggaccacaggtgtgtgcctgtgatgcctggtatgttttttgtagagaatggggtcttgctatgttgcccaggctagtcttgaactcccaagctcaaacaatcctcccgccttgccctcccaaagtggtgggattacaagtgtgagctgccgtgactggcccacattatcaatttctgttaaaagtcttctgggattttgatagggattgtgctgaatttatatatcaattgtggagaactgacatcttaacaatactgagtcttccaacctgtaaaaatgaaatgtctttcagtttatttagatcttctttatctcagtaaagttttgcggttttcagcatcgaattttacacttcttttaagtttattcctgagcattttattctttatgatgttattgtgaattgattttttgattatttgttgctgatatatagaaatacaatagtttttttttttttttttgagacgagtctcgctctgtcaccaggctggagtgcagtgtcctgatcttgtctcactgcaacttctgcctcctgggttcaagtgattctcctgcctcagcctcctgagtagctgggactataggcgcaaaccactacacccagctaatttttgtatttttagtagagacagggtttcaccatgttggccaagatggtctccatctcttgacctcatgatccgccctccttgacctcccaaagtgctgggattacgggcgtgagccaccgcgcttggcctgaaatacaatagttttttaatatatcaatcatatatcctgagatcttgctaaattcatgtattaattctagtattttttattatagatgccttagtattttccacatagatgatcaccctcaaatacagtttttctccttccttttactatctggatgtctttaatttttttttttttttttttttgagacagagttccactctattgcccaggctggagtgcagtggcaccatctcagctcactgcaacctccagctcactgcaacctccgcctcccgggttcaagcgattcttctgcttcagcctcctgagtagctgggattacacttgcccgccaccgcacctggctaatttttttgtatttttagtagagaaggggttttgccatgttggctaggctcatctagaactcctgacctgaagtgatccacctgcctcagcctcccaaagtgctgagattacaggcgtgagccactgtgcccggcctaaatttttttatttcactggctgaaactttcggtacaacattgagttgaactgacatccttaccttgttcccagtcctaagtgggaggcattcattcagtctttcattttatgttagtggtaggtttttcactgatatcttttattaggttgaggaagtttccttctgtttctcacatattgagagtttttattgtgaataggtgttgtattttattaaatgcttttctgcatctgttgagatggtcatgtgttttttgtcctttatttattaatatggatattaaatacttgatcttaaaagtcagcctacatcgtgctttgacattacttgattttgcatccctgggatgaatcccacttagtcgtggtatatgagcctctttttatattgctagattcagtttgccaatattttgttgagcacttttgtgtctgcattcatgagagatattaatctgtcattttcatttcttatgatgtctttgtctggctttggtgttagggtaagtactgacctcagagaatgaggtgggaagtttctatattttctaagtttgtgaagaatcagtatttctttctaaaatatagaatttgcaagcaaaaccatctgcgcctgggcctttccttgtggaaaggactttaattaataattcaatttatttacttataaatgtatttatttatattaaatataaatagtcctattcatattttctgtgtgttcttaagtttcggaaatgtctgactctctaggaatttgtccattttatctaagtcatctggtttgttggcatagagtaatgttcattatattccctcatagtccttttaattcctatagggtcagtaatgtgatcttttttcattcctgagtttgtttatttgtgtcttctttcttattttcttggtcaaatagtcactttatggtttcattgatttgtttctttattgtttttcttttttctgttttattgatattcactgtaaactttattattttctttttttctgcttgcttggggttagtttgctctttatctagtttcttaacatggaagcttagattatttatttgacacttttcctcagaatatgctataacttttcctctaagtactcctgtagttgtacactacaaattttgatatgttgtcttttcattttcattcaggtggaaatatttttaaaattttttaaatgatttcgtctttgacccctgggctatttagaagtatgttgtttaattcaaaatatttgggttttcccctatttctttctatttgagatctttaacttgtgttgtggtcagagaacatactttttatgatttcagtcttttaaaatgtattagacttgttttctggcccagcatatgagaatgttccacgtgtgcttgaaaagaatacatattctgcactcattgtgtggagtattctataaatgtcagttatatcaagttggttgatagtgttgttaaagtcttctatattgttgctgagtttctgtgtagttgtcctattaattattgaaagcagagtattattgaattctccarctatttttcctgaattgcctgtttcttctttcagttttttcagtttttgtttcatttggggtctctattgttaggtatatatacatttaaaacttttatatctttatgatatactgatgattatgaaaactatgataaacctttatgattatgaaatgtccttcattgtctccagtaatatttcttatctaagtgtctatttagtctgacattaatatagccattccagctctattgtggtgactgtttgcatggcatatcaccttctgaccttttacttttaacctattaccgtctttttctataaagtgtgccttttggagaaascatgtagttaggtcttgctttttaaatccagttaaaagcagggatagccctgctttttaagtgggttgttttgtccattcatatctgatctaattattgatatggtttgatgtaagtctgattttgctaattattttgtattttttctcatgttatttttgtttctctgttcctcctttactcctttcctttgtattaaatgaaaatattttagggaatgatttcaatttgtgttttttttagctgtatgattttgagttattttcctagttgttttgggggctaaaatatgcatcttaatttatcacagtctgcttcagaataatacccattttaattctagcaaaatacagaaactttgctccaatatatctctatttttcatttgtgttactattgttaaatatatttctatatattataagtccattataatttttgctttatgtaatcatatcttttataaaatttaagagaagaaatgagaaaaatgtatttacagattttttttacatttacccacctattcactattttttacactctttgtttcttcatgtagattcagattactgtctaatatcacttccattatctttatttcacttttatttttgaaggaaagttttgcagggtatacaaaggcttagctgccaagccttccccgcctcccccaggactttaagtgtatcattgatttcactgctctctggtctccatggtttctgatgagaaataaaccattaattgtattgttattcctgtgtacatgataaagtcatttttctcttgctactttcaggattttgagaggtgacagcatgctggcagtcctcagagccctcgcttgttctcggcacctcccctgcctgggctcccactttggtggcatttgaggagcccttcagcccccccactgcactgtgggagcccctttctgggctggccaaggctggagcccactccctcagcttgcagggaggtgtggagggagaggcaccagcgggaaccgggactgcgtgcagcgcttgcgggccagctggagttccgggtgggcgtgggcttggtgggccccgcactcggagcagccagccagccctgctggccccgggcaatgggggacttagcacccgggccagtggctgcggagggtgtactgagtcccccagcagtgccggcccactggcgctgtgctcgatttctcgccgggccttagctgccttcccgcggggcagggctggggacctgcagcccgccatgcctgagcctcccacccactccatgggctcctgtgcggcccgaacctccccgaccagcaccactccctactccacggcgcccagtcccatcgaccacccaagggctgaggaatgcgagcgcacggcgcaggactggcaggcagctccacctgcagccccagtgcgggatccactaggtgaagccagctgggctcctgagtctggtggggacgtggagagtctttatatctagctcagggattgtaaatacaccactcagcaccctgtgtttagctcaaggtttgtgagtgcaccagtcgacgctctgtatctagctgctctggtgaggacgtggagaacctttatgtctagctcagggattgcaaatacaccaatcggcactctgtatctagctcaaggattgtaaacacaccaatcagcaccctgtgtttagctcaaggtttgtgagtgcaccaatcgacactgtgtatctagctgctctggtggggacttggagaacctgtgtgtcaaaactctgtatcttaactaatctgatgtggacgtggagaacctttgtatctagctcagggattgtaaacgcaccaatcagcgccctgacaaaacaggccactcggctctaccaatcagcaggatgtgggtggggccagataagagaataaaagcaggctgcccgagccagtattggcaacccgctcgggtccccttccacaccgtgggagctttgttctttcgctctttgcaataactcttgctactgctcactctttgggtccacgctgcttttatgagctgtaacactcactgcgaagatgtgcagcttcactcctgaagccagcgagaccacgagcccaccgggatggaacgaacaactccagacgtgctgccttaagagctgtaacactcaccgcgaaggtctgcagcttcactcctgagccagygagaccacgaacccaccagaaggaagaaattccaaacacatctgaacatcagaagggacagactccagacgcgccaccttaagagctgtaagactcaccgcgagggtctgcggcttcattcttgaagtcagtgagaccaagaacccaccaattccgaacacaatttatccttcaacagtttgtctctgatgtgtctatgtgtatatctctgtatttgtcctgtattgagttagttgaatggctttgttctgtaaattaacagttttcatcaaatttggtaagtctttgcccattattttttcaagtattttctgtgcccctttctcacttttcctcatcttctgatactcttaatgacacctttattagtatgcttgatattgtctggtagttctctgaagctttgttcatttttcttcagttttttcccctatgttattcaggttaaataattactattgatctatctccaagttattgcttctttttctgctatttcacatcctctattgcactctctggtgatattttcatttcagttattaaacttttcatctccagaatttccatttgatttctttaaaaatattttctatctttttactgagactctgtattcactgagtcatttactaattctttaaatatggtttttagttttttgagcatatttataatagctgttttgaaccctttgcttataatatcttaaagacacttagagatagtttctaatgactgcttttgtatggatcatatgttctggtttcttgcatgactcctaactttctgttgaatactgaatattttagacaatatattgtagcaactctagtttctcacttttcccttctgttggtgaccttggttgttgttagttttattacttgcctggactaaacctttgaagtctgtatccttcacaatgtgcagttgtgacgtctcttctcactattttatcccttccttttatttgtaagtctggcttcctagttgttgtccttgtgtctgcatagcttagtgatcaaccaaagactggtcagaagttacgctgaaacaccttaagacrgtgagacttccagtctctcctgatggatctgtgtgtgagcttcggagcacattcaaacttcaggctgctctgggttttatttccttttgggacctctcatgtcccacctgcacatgcctgcaggctccatcagccagggatatatgggccctctctggtctctgtggcaatgcacacagcctggtcaaccgtaaatatgtggggtcaagctccctgtggttgctggaattccctgttaaatatttggctagtttgtctgctgcctgcccccgtcaggtttgcttattcaggcttgtgatgccacaggccatcagtacttttaactaacagtcctcaaaatcaagtgcagtcttcaaaatcaagtgagcctcctctggcaggggtgacaaagctttgaaacaaaactgcttgttttcacagcctaccctgcactgattcagctactgtgctgataaagcaaggggatggaggtgagagcagctgctggcaaggatgtcttaaactcatattgttcttctctgaagttcagcagttctaatgaagtggttggattgcagagtgctcaaattactgcttttgactattttgttcagctttatagttgcattttgagggaggatttgtcaaccacctcattccatcatgataaatggaagtctctatctgtacattttaaagcaccagtgatttggatagtgttacatgtgtgatcctatgttttatgttgagtaatgatggccttaattggtagtcttttagggcaggggtggtaggggcgtagtttaattgtgtaaaaatatggatgatttttttgcccaagtggagagaaaagacatttgtagggtcaagtagaaaatgtcaaccctgaagttttccttgaaacacaaattgaaaaatgaaatgggtcagagagcatcaattatttcagagctctcttcctctgtagtttgtggcagcacgttgcctgttataatgaaataatcctttgttaaattaaccctgtacctgtgtgaaatgtctgargtatgtacttaaaatgcagggtgctgattttataaatttagaaatttattggcatatatctggtgtttaccttcaatatttagaattcaagaaataccacaagaacctgaatttattagtaatagatttaatatcttttatcaaattggtatgtttactttttaaaaatgagaacagtctttaaaatatgagacaccattttgttaaaattctaatttttttcacaatgaaggttttccaaataggatttgggtatttatcatatatcatgaatattataatatatgtaaattatagcattaaatgcaaaatagtttggcattgcagttttttccaactaaaaataagctgtcttctatataaatcagacttctctgtatctctaacatttgcaattaaattttcatgtaccataaaatgctgttccaattagactttgttaaaggaaatactgcccagtatgtaaattcagatttagcaaattatgkccaaatttctaatgttggagatatcactatacatagagtcaaaacaaaacagtaataacagaacttttcagcctgtaggcatccctttgtgaaaacacagaccgctctcttctttcacaatgttgaagaaacaaaagtttgttgagtatgagaaattgagaccacttggtaacttttcaagtgaaggcaaaaccaaaatgagcaacactgtcctcttagtgattatgatttcgaaattcatcagttatccagactgttttttgttggtttttaatgcagagcttgtaggcttctagaagcagagaaggttctaatggcaagcctatctcataaactatgcctctggtgggcctacttctttttaaatttgatcccaagccaactcacatttggtcactaattctcaaatattcctttccatcttttctctcttagtgcctttttctagagtacttccacagactctatgcaccacatttttaatgaggtactgctattaccaagcagttgttcagtttatacttcagcaggtgtgaaggctagagaagagagaatacacaggaagatgcatgagacagaggaggtcagctcttcctcttcatatattttgtagacctaatatttgcttgccacctcaattatttgcgccttgatctaacattttagcaatctccagtataataaaccttcacaattcttgagatctttggaaagtgtgaaatttgaggtggttttatgacaattctttgcccacaaaatttatataccaagaacaaaacaaaaccatatagttttaatgctcctaggtcactggatgggtgaaacatggactgaatggctagcttctggacaccagcctggaattgtacttgattgcaatttatgtgtcaacaaaatgacatgttatattttgaaagaataggaaaggatgtactaagggtttcttgggcaagagggagagcaatttctaatttgagaaaccttaatatgaaagatccccatctctcctcaggatcaaggaccgccccccgcctccaggacttttcatatttctttggacttttcagaagttagtggcagaaaaccacaaaatcaaaaccaaagccataccttgatattgaatatgtgattttatttctatactcaggtattttaatgcttgatgccttatatctgaagttatctctctctctctctcccttttttttttttttttaaacacattcttttgctctgtcacccaggctggagtgtagtggcacaatctcaggtcactgcaacctccgcttcccgggcccaagcaattctcatgcctcagccttccaagtagctgggattacaggtgtgtgcctccatgcccagctaattttttgtatttttagtaaagatggggtttcaccatgttggcaaggctggtctcgaactcctggcctcaagtgatccacccgcctcagcttcccaaagtgctggcattacaggcatgagacactgctcctggctagatctgaagtaatctttaagagaatactggctgggtgcggcggctcatgcccgtaatcccagcactttgtgaggctgaggcaggtgaatcacctgaggtcaggagtttgagaccagcctggccaacatgatgaagccctgtctctactaaaaatacaaaaaatcagctgggcgtgatggcgtgcacctgtaatcccagctactcaggagactgaggcaggagaatcacttgaacctgggaggctgaggttgcagtgagctgatatcacgccactgcactccagcctgggcaacaggagcaaaactcatctcaaaaaaaaaaaaaaaaaaaaaagagcgagaatgctaaagctcctgatttgctttgcctctagatgatattaagcatgtatcacagtttgaaaatcaaaagatagtagtctgccttatcctgtgatttttttcaaccaaaggcagttttgccctcctggggacatttgccaatatctagagacatttttggctattacaactgggggtgctattggcatctagtgggtaaaggttagggatgctactaaatataatgcctgtaatgcgcagcccctcccaacaaagttccagttcaaaatgccattagtgccaagattgagaaaccctggccttattattttcatttaaaatgttgccatatttttaagaattatgattctatccatggctttctcctcagtctcaaatttttcatcatttctgcaatggcttttactggctacttatggatatagatcaaatgttgtaccatctttattctccatagaatgtggcacaagaagtgtagaataatcacctaacacttctggaataagtggaaaaaatatcactataagaacattatgtaagtgaataaaccaaaaattgtttttaactagacatagatgaatatagcagtttgaaataacatcaaaaataggttaccctgtttaattttcagaacatacttggaagatacgtactacaggttgagtatcccttatccaaaatgcttggcaccggacatgttttggattttggatttttttgagttttgcaatatttgcatatatataatgagatatcttgggaatgtgacccaagtctaaacatgaaattcatttgtttccttatacacctagtccgaaggtaatttcacatagtatttttaataattttatgcatgaaacaaattttttactgcattttgactgcaacctgtcacatgaggtcaggtatagaatattccacttatggcattattttagcactcaaaaatttttggattgcgaaacattttggattttgaattttcagattagggatgctcaaccagtattatactgattttatagtgtaatagtattttgacaatttatgtggttaaaatattgctatgtttaccttggctaaattacttagcctcattgtgccttattttcttgttctgtaaaaaagtgtgatggacaagattatcactactgcagttccaactctagcattttaaatatcttttaataaaatgtaaagattcctcaaatagttcaaaattttaaattctttatcattgtttatagatgaaacagtaaaaaattgccagagaataacggttgccactcagtttttcaaaataagtagtataaaatgtggtggaatgcactgaatttagagctggaggttggtatgtttgatttcctcccctactttttaaaaaatggatgcatgtttgtgtcattatttgtttacatttgaataaaaatttagttcttagtaaataaagcttgtttggtattgtcaggtcaagataaaaggtcattcatcaatttttttttacattcaaataaagtttaataggaaagcttttattttgagatttagaaaatactgtatatgaacttaagtatcctcctgtgattaggaccatagaaaaatacctttatattaaattagactctggaaatctaggcattgctttctcatgctaatagatggaatttaaatttgtatttatttttaatcagttgcctagtactaaaataaatttggataccagcagctcataatagttaatagcctgtataaatgggtcccaagacacctgttcctttattgttaatgaagccctattttatgtgcaggaagactagagttcctgtgatgctgtgtcctagcacatctccctgtctcctgtgcgcatatttaaataacattaagaaatgttgtttcctcgttttctgtcatctctagaattctgccagacacacttattctctttaataggctgtttgttccaaaatgcattagagtgatattttttcctgttttgtgtgttctgaatttttttagaattaaacctcaatcatgttatgaggattgatgtaaaattatgatgagttaatagcaccagacacacaaatagccaaataaagtttctcaaggaaagaataaatgacttgcggaaattttagtagcctgtagaaatgtaagaaaacaaaccaaaaatgtggaaaccaattttaagactctggtattgtcatggtttattttctgagattatttaactctaccctcttaatgttttatatcactgacagtttggagagtttattattttatttctctttactatttcatatcaagcaaataagtcattgatcttgcaaataatttgaaaggagaaaaccatatagataaagaactattaccacaatctaccagatagacatgtagtcaaataagaaatgtttgtggcttgaaataacatttatgatctatgacattcatttttattctttttaggagacagtatattaacaggtttttaacatttttggatgtgtgctacagaaaaaaggtggaaggtgttttccttacctctggagcttctccttctccaaacacctgaattttcattactgttggtgataggttttaaggtcatttttgtaaaagagagtatgatgtccatgaaataatgtgagaattacaatgctaattatttcagtccgttcttcagaatgtctaagtacactggaaacccagaaagcatttattttgttcaatgtggagaatacatcataaccagctcaaacactgagggcttcccaaaaggagtgaaagtaaattcactgttcacaagtctttctaataatggtaatctggccaaaagctaaatattatttggaatagttcatggggaaagttttttcatacctcagtctggtattttgttgaactcctttccaataaaatttactataccaaataatggagtataatagtgcctttttcttcagccttgtgcctctctataatgaagaggaaatctaacactgaattgtgtgtcctgtagacatcaaagtggtgacttgagatctcttcctcatcagggataaagagaaacaagtcacagtctctctggtgttttctttaaaccctggctgcacattagaatcacacgtgaagggtgttgtggccccgctcccagaaatcctgcctaaattggcatatgctgggatatgactattgttatatttaaagctcttcaagtaattctgttttgcagccaggactgagaatctctcttacacaggtacctctgaaaaaagttaagttaaactaagagctatcagtttctagatggttttccacgctgcaagtactatagaagaagacaaactgaaaaccctctgaaaagggcttctggttgtggaatcactcaggtattcttttttggggtggtgagcttgattggagactctcacctctatgagaaagactattttctaggtttaaataattttcaaaaattgtattatggtagcaatttctggtaggccagaattgacagtagtttatctaagatacataatgtagcagacattttcccatttttgagtcaaatataaatctagtacagtctttgccagttttaaaatgtttcaattgaaaatttttgtttttcaattaaaccatatatactgtacatcacccaaattcacaccttttaaaaatatgcatacccattttctgtatttccatcatggattgttacacacaatgaagtatctcacttctaattaacttactttgatgtaagaagcatagaaagggccgggcgtgatggctcacacctgtaatcccagcactttgggaggctgaggtgggcagatcacaaggtcaagagatcgagaccatggtgaaaccctgtctctactaaaaatacaaaaattagctgggcgtggtggcgcatgcctgtagtcccagctactggggaggctgaggcaggagaattgcttgaacccaggaggcggaggttgcagtgagccgaaatcatgccatcacactccatccagcctgrtgacagagtggaactgcgtctcaaaaaaaaaaatagaaaaaagtgctaaaaattagcaaatttagggatgggtgcatgaaaacaggactttataaaagggagaatgtaggacagataccatttaccaaatattattttgcaggtataataaaaatggctatttatataatttaaaatcataaatattgacccagctttttttaaggtaaggatcctcaagctagcttggaaaatagatcaaggtctctaagacgagcctgtgaaaaagactgccagttttccctggggagccccagcctactgtacagccccttctgactgactgactttcttccagatacagggtcgctgcttcacatgtgctgataatacatgcaggaattggctcttcagacttcactgccagactaatcacatttatagtttcttggcttcttttagtttttaagcaaatagtacccagcaagttaccacagttaaaacagtggaattcagagtacctgtatttctgaaagctgccgctgtgtacatggaatggagtctgatttttaaacarcaattttgccctttgctttatatcctatcatttattgtaaagaaactcttcctgtttcataatttctcatttgttctttaagaaaagatggcaaaggaatataattacagacatggtttcacttttattatttcaatctattatgttctccttgtcagattaatatttgtggttatatgccctgcatggcaagtgctgagaaaacatttgtacaaagtcttgccaaggtagactattgagtatatggagtatagtgacttcactgttcaagatcttcatgtgtttatttaaaagaaaaaaaaaattcattacatcagtctaaattagtacatcttgtggttagtatattaaattcattaaatagttcaagtgtattcaatacagtacgatagtagttttattgatatactggcagagaaacaaacatgaccactctttaccatctgtttataatgctatataaagaagaccatgttggttgccatggaaactacatttccaaaactactgagtgtttgcttaaattctccaaccttttaaaatcataagcttttccctgagaaaaagaatagaaaaatacattttaaattttccagtgattttctaaaaggcattactctgttaaaattcatttatatctaagctgatattttgcctcaggatttcatgaatttaattgagaagttcttaatttgagaatctttggcactttcgagaactgggaagaaagtgttaatgctatcatattgaggggtgccacctatctttttgtaagtaaagactttgcttcttcagaaaaactttttattgatgtaacaagcaaaagaaggctgaagaggtaacatataattacatgagatctggggagcaaaggcagttgtaatgtagttccaatggcttaccatgcttagttattgctgtcatattagctaatatgagaaaaattacagaaggagagtaattggctttaagctttaaatagaatggttatgactttttaaagcatggctattaaaaaatactttgttgtaataactgtaaataaaatcagttgctattcctgggagtgttgcctagggaagaaagaagtaaaatatatgctttattgttattcttattaatctagaataaatttttcctaatctaaaatgattgtgtacatccacatgtgttgtttatacaaacctggtgtctgtatagacattcaaaaagctttttgccatagtcttttaaaaaatctttttttttcagtgtcttaaaagttattcttgatgtatttacagtggggcagatgacataggattgcatctgttccagctttcactgaagccaaaaagcattgactatatggataacaatagtaattctgataatagtaataactagygcatattgagcacatagtttgtgacaaggagtatagttagcgttttataagctaaatgtttatatttaggctttattataatcctatggggcaagtctcataagtacacatggattctctaaatcagagtttctcaaccttggcactttgtgagggagggggaggcctatcaggtatgttataagatgttcaaaagcaaccctggcctctgccttctagatggcactagtacccctccacccccaaggtgtggcaaccaaaaatatctcttttgacattgccaaagtcccctcgtgggaaaggagaaaggtaaaatcacccgagttaagaaccacttctctatatgaaccagccagtttaattttttttctggtagaaatagtttgtacatcacctcttgctgttcacatgctgtctcccctaccaccatgtttttgaataccaactaccctctccagctttgttcagttactggtatatcaaaaggtgaacctatgtattgtgaaagccctcttatatccaggagtttgaaaactattttgcagcataatgaaacaaatggggtaattaagttgtactaaaattacatattcataaaagagaatttttaatagaattttagaatcttctactgagtttagtatataaaaaatgggaggaagtccatattctttgcatgtattcatccataaatgccaaactcagcttattctgtttttcctattgctgacttgtgtaggaatatttagcatagttaagtttgtgtgaacctttttctgttatattgaaacattagcagatagtcagtcatggtccatccttataaagttaaagaatattttaaagataaactcataatagcaatactaacttaacagttatggttaatcttctgttctttttgaaaaacatgacgtattcttgggaaattttcttatgatggtttacttcaatactaaatacayttcttagcaacattttaaaactgtgatattgtaaaattcaggtctctgaatcaataaagttaagtttctgttcatgaagtttctttatcaaaaagtcttattagctcattttcctaaaatttcacaaaaatatgagaatatttttccatcatctgatagattgtttcagaaacgtatatcaatatgtggctgtgttaatgctatttggtaggaaattactggatctcactatatgattagttaaaagaacattttggaagaatgcagatatagagaataatagcttttttggaaatatgagaatattagacctttcagatctacttaaataattgtgtaaaataattacactgaaattttaactattttttatgtaggcagtagcttgcacagtatttatatcacagtatttgaaaccagactgagtggaaaccagtgtatatagtggcgattgtgcttatatattatagagaacttttcagctcttgagtaatatgcaagttagaaccattcacaaggcattgatttaagtaaagaatatttgaagatgaggaccatattctaaatagtcaagcatcttgataggcttaaataatctgttgataatttgctagtttctacccatacacaaataataaaaacaaaataatcctgaaatattaaatattcacctgatccttaaatttagtattggtctggctactcttggggaagagcagaacttttgatatcaagatgatacaaacaatacagctgtatttgttaacaaaaccatcttagaactttataccaagagaagtcattttctacatttgggcatacaaatatctgttattcatatctgaaattcattaccttttggacagatgtgctcagagacaaaggtttcatcttttatcattgtcctcaacttcataatgtttggaactatattggcaatgtgaagagagtaattacttttttcccattacttttatcaatttttttttttacttttaatgtrgtggaaacaatttttgactttatttaaattaatttgtgtataattcctagtttctccccctttgcttaatccaagaccttatttattttgcatcatctttttaaaagccaccatttaaagcaaaatctgtatttgtggcctttattatttcactaaatgtggaactgttttgtttttttttcccccagggaaaagataatgactgtctgaaatattgaaactttccctgtttgtttacttttttttttgagacagggtcctgctctgttcacccaggctggagcacagtggtgtgatcatagctcactgcatcctggaactcctgggctcaagcagtcctcgcatctcagcctccctagtagttgggatgacaggcatgtgccaccatgcccagctaattttcacatttatttttatttttgtagagatgagatctcactattttgcccaggctagtctccaaatcctggccttctccctcagcctcccaaagtgctgrgattatagtaatgagccactaaacctggcctgaaactttcactgttgaatcatttgcttatcagctaaacttcataagttctctttatatttattcatttaagaaaatttacattgtctctacagaaatacatttttatcttctcaatttattttttgakttgtttttattgagctaatgatgccatattggatcaagagaggcaactcattgtaagtacccaccaacgtttttcctgctctggtgtgtgatgaatgagatatttatatagtttcaaagtacctcttcacaaaacattactaattataaagggggaaagtgtaactttgctgtggagaaggctggtagacatcaccttactcagacggccaaagtggaaatctgctgtcatggaacaaactgaaattgaggtgggaagaatacaacattgtttctatctatgatcttcccgcctgagatgtaaaacctcaatctaatcacagagaaacatcaaaatccacactgagagaacttctacaaaataactggcctgtaattttcgaaattgtaaaggccatgaaagtcagggaatagttaagaaacggttccagattaaaggaagcygaagaggcatggcaactaaatgcaatgtatgattctgaactggatccttttgttataaaggacattattggaataattggtgaaacttgaattggatctgaaaattagatggtagtaatgtattcccgttagtgattttgatggttgtattgtggttattaggggaatgttcttttgtttgtttgtttgtttgtttgtttgtttttgaggctgagtttcactcttgtcacccaggctggagtgcaatggcacgatctcggctcactacaacctcctcctcccgggttcaagcttttctcctgcctcagcctccctagtagctgggattacaggtgtctgccaccaggcccagctaatttttgtgtttttagcagagacagggtttcatcatgttggccaggctgatctcgaactcctgacctcaggtgatccatccgcctcggcctcccaaagtgctgggattacaggcatgagccaccatgcccagcctaggggaatgttcttatttgtaatttttttttttgagatggagtcttgctctgtcgcccaggctggagtgcagtggcgcgatctcggctcactacgagctccgcctcccaggttcacgccattctcctgcctcagcctcacgagtagctgggactacaggcgcccgccaccacgcccagctaatttttttgtatttttagtagagacggrgtttcaccgtgttagccaggatagtctcgatctcctgacctcgtgatccgcctgccttggcctcccaaagcgctggaattacaggcgtgagccactgcacccggccttatttgtaatttatataccctaaagtatcccatggttatgaggtaccaagataggaactgactcttaaatgcctcaggaaaagaagaattctttgtacttgtaacttttctataagtttgagattgtttacaaaaaggaaggatgagaatagctgaaggttctagaatcctaatccctgggttaaaatcatggctctaccacttattacttccttgtgtctcagtttccccatctgtaaaattaggataacagtagtactgtacaagcttgtgtgaagtttaagtaagttaaaaaaaaatgctaagagcactgcctgcawtagatattcgctattatgtcatttgagtttgatacttttacctttctgggataaagtggccaacattgagtcgctggtgtatccattagcagtatttagaagcttggactatttattatttgtctgttgttataatatggcctttgtactgatggaaacatttcagtttagaaacatgaagtgaacattgtgctacaggtcaacacattgaaataaatgtagatattaatttttttatttgggtttaaaactattaaccatagctgtttgatttaagtttaatattccagtgattatttaaaggctttttagcctgtaccaataataaacaaaacttaccctgtttgtttcactcctgagttccatcagccctttcacattggagtaatagcaatgactcaacattattggttcctgggaaccaaagaacttcaacaaataacttagtaactaaggtagcagctttggagtcaagttgtcctgattttgaattctgattctttcacttgcttttgacattggccaagacgctaacctgtctctaagcctcacctataagatggagatgaccacagtaccttcttcagagttgttgtgtgcatgtgaaagtgcatagctcatagtatatgctataaaaacattagcatactctctactctgccactcctgttgcccatcaccttaaccccaaaaaaagtcagtcgaaaagataggccgatagatatccagaaattccattgtcttatttggggtgtaggaggggatcgatgacttatctcctattacttttttagtgaaataaaggctatcattttcagctcatgcctggcaacttttcaggaaggaaaactgtgtggggggtgggggatggcatcctgagatgaagtccggtgatgaccataacattttcaacatttcctagtcctttatagctatagtgttgtcctttactcttttttaccttttaaaaattaattgttttaatattaattaggacaacatatagccattaagatgggaacaaaaagccagttaaaatctataggttgttaggtttcaaatacagatatcttgtcttactttagtatgttcctggaaataaaaacatataatgtatataaattatttcttttgattagccattcagtcagctatttctcatgagaaattcacattctgcccaacatcaaggraagaacccatggtgttcagaaaagaacgaagaaaagcgtaagctcctccttccctaaaagatataattttaggaggctaggtgcagtggctcacgcctgtaatctcagcactttgggaggccgaggcgagcagatcacgaggtcaggagttcagcctggccaactttgtgaaaccccatctctactgaaaagacaaaaagttagccaggcgtgatggcaggcgcctgtaatcccagctattcgggaggctgaggcttgaatcgcttgaatcgggagaatcgcttgaacccgggatgtggagagctgagaccgcgccactgcactccagcctaggcaacagagcgagactccgtctcaaaaaaaaaaaaaaaaaaaaaaaagaagatataattttagggaattgtatggaagttgactattttaaaggatcagctgccacagaccaccggaagggcacagggccatatgctgcaagctgggcccatgcaggtcctcatttccatgtaacactccttggctgtagggtagaccctggctactcctgcagtctgtgaggttttgtttttgttttaacctggacagcactttcactgtactgcagacttttcccagcctccgtgggaatgggggctactcagggcttcccttgatccctggttcatgggccaccaaccctctgttgtgtgctgcctgggagccttgttgaacatgcctataaagcaggagcctgcacacctctgctggtcgaactctatcaatacaccagacctataagcaagagaagattcaaggaaatgttcaggagaaaaataytttttaaaatgtttcacagtttttacctataaggcacttttaaaactctaattctaatttattgttcctttttacttttcatattttaattctgctgtaatcattatctttccagtttgggggaacatggccttaaagatagacacctgaattggaccccaggtctctcgcttattggatatacattaaataattttaggcaggttgtgttattaatcactaaacaagtatttattaaatgtcctgtgtgccaggcactattctaagcaccagagatataactgtagacaagtaaatatgctataacatgattattatattctaatcaaggaagaagaataatcaaaataaatgatgtgctataaatatgtagtatatcaaataatagatatggaaaaaataaattattcctatgagcctcagtatcctgatcaacaaaatggggataaccaccacctcacggacagttgtcaggttagatgagatggcaccttagaaagcttgaggataccatggtaaatgaaacagttgcccctgcagcttcctggcaatttggtaaatgagagatttcttcctgctaggatagagcaaatactgttctctgaggcttaattggctagaataacctgtatgtaatttattccaagtacatatcttttcattcactaggtgccattctattcaataagtgccatgtaagtgtaacttttaaaaatcaaattatatttttctatggacataaataatttgagagatgcgactattatagtaatcctcttygctagctctgctggtggccattttaaatatctgtaaggtcttaatgttaattgggtggcacatttgtgattatgagagctaaggtttgaacttaggcagccagtcatggaatcttttctctggtggaaatttttctgtggaaaatgaatacatgaaatgtgtgtcccgccatcactgtcacttccgatttcctcatgtcttggtctcctctaccttgaattcaatgttgattctggaaaaataaacgagattttcctaaaatttttgaacttctgaaccatcatgttgcaataatatagttttacattttgaatgtttttccattcatttttaaacatatttttcctactaaaaatctatgatgtatttcactttgctcttccccctcccccctaatttgcccttgaggtattatctgttactctataaagtatttcatcatttcccccaacttcctgatttttactggcttcatccatctgctgttgtattttttacatttggctttagcctcttcataatatgttatgagtaattgtcagttgaacaatcatctacctttatctctttccacttgttcaagtacaaatcttctaacttttgcacaattgatgtgattccattattagctaataggactgatactccatacactaaatattgattacttacattgaaacattctttttggtaaaaacaggcctacatactagatgagtaaaaccataaaaaattatagactattaaagtgagtagttctcttgcatttgaatggcagattctattgaaactggaactgcaagttgaggaaagcactgagtactaagggaatactcattcacattcggttgatttattctctgcacagacgggctgtggtagtgggaggtgtaattcacagcacattagctcttagccagtgtcattgcttgagtggtggtgtgagtcttgtgtgttgtgtagtgtaatgatgcctgtattcctacactcaatttttctacccccttgcttcaacactaaattgatttttaaaatgtgaacccaaggggcttagatgtaaaaattattgtatgagattattttgagagttttcagtgtgactaaatattactttttaaatggccctattttccattagtatttttaaatctttagttaccatttcagtggggaaatctttgttgttgtttttccagtggtatatttaattccagggtractagccacatcttgctgcaaacatgattgatcacgacattttatacttctttttaatttcagttatatttcagtatacaactrgtggtcagtaaccatttctgaaaagttcctggcttgatttagtccctgctcaacaacccctgcaccctacccccattctactttctcttctctcttccttcctttccttccaggcacctgtcttctgccacatgctcatcaaacctaattgaagctttgggagggctttggtgaggcagttcttggccctgctgtccctcgaggatttaatgcaggtgggatgtgtgtgtggccctcgagccatatcaatgactgccacagctcctgtattctaaaggcwggtcacctcaggccctaaagttgtttcaagtctgggacagtttagtcttagaatagatatggcagtaataatacattttgggtcattttttccatggaaattaacctccagttcttctgctaattttatataaaaatctgtgacatgcagactatttttagtctctctaaaattacaattctttaaaaaaataattttcatggagtgtttttttcttttataactgagtaatattgctgtcatcaaattgctaattatatttatgtttttaacatcatttcattgataccatttaaactttggtcctgtgtctaaatctcagagaaattaaaagtgaagtagtaggacccaaaagggtccctataccatagggctctggagttcattaaatgtcacttaattttttttcttcaagttagaaacacaactataatatactaagtcatttgtcttcttagaattctgttgtttttaaaatacagtgtttttttctccagtcttaaaaagatatctgtgctcttgtgtgcaacttaagaaataggtcacccttaatcaagaaatttgttggataacacttgttaccgtttggtagtatttttttcttatcctgtttttcttttcatttttaaacactatttcaagcacacagaaaaatgcaagaatactttgtgtattgaacacctatacaatgacaccaggtttaaaatgttaaccttttgacatatttatttctagtttttgtccttggcctcatttatatgtatatatgtatgcatattttgaagcataattgagatcatatgatgtatacaattttgtattcttttatttaacatttttagtattttcccatgtcattaagtaaacgttaatgttttgttgcaacactaaatttgtgctagtgtgtggacagattttctgcttttaaaaagtgatgattctattcctgtttaattttacattatgttttcagttcttttaactaatacatcatatactgtaacttaaaacactgtttttcaaaaaaactacagttgcaccttgttggtgggtcacaaatcaatttagcaggttgcagtcagcattttaaaaaggagtagaaaagattagagtattcctgtagttctttggcagaaactgtgcacattatagtcaattcttttgtttcagttgtctgtatctaaatgaaaaaaaaaatttaactaggggtcacagtcataagcattaataggaatcttaccaatcaacccacttcatgtatgttagaatttgacatccatcttttgtgcttacattttttggatagacttactggaactggatttatggaaagtggggtaataaaatagtaagacctggtgtggtggctcactttcccagcactttggaaggccaaggcgagaggatcacttaagcccaggagtttgagaccagcctgggcaacattgccatctccattaaaaaagaaataaattaaaaaaataaaaataaaatcgtaccactcactctatatctctaggttttaacattgaaaggggttccttgccctcaaggtgattctttcccactcagttttactttggggtattttgagcttactcaaggatgatggtcccttggtggtggtgaagttgtttccttaatatttgattataaatttatcaaaagattgtaatttggattgctgatagaatttagaattttgaactcttattcataaatctcaaaatttttcttttatgccccaattctgtctttccacctcaactctctgtctggaagtacacttatcttcttttcagagtgagggcagctttctttcccaagcactgatgcagcagtcaattcagtcagttctcctaaatgaagaaacaaaacacataaatatttgtattaaatatataattaatatgttgagttttctctaaaacttaaatagaccctttgatacggcatacattttatatacagtaatttttaaaatacaacgtcaaaataacaaatctcagcatgttttttagaatgtgttggggcttttcttgtgtgtgcctgtcactttcaaagaacttactacaatttaggaaaaggaactcaagaggaagaggaaccagtcagagctgaatggttggatgtggcaaattgataacaggaagagaaatgaggaaagttgagaatagtagtaggtctgttttggggagatgtgtaagatggagagttggctggcctactccttgaagctattcattctctcatctttaattttttttttttttttagaactattctgtgtcagttgctctgctgggtgcagggcatccaaagaggactgagtaccttcaagggtctcacaaccttgccagggagtcctgtgaacaaataattaaataccaaggcctcaaagcataagcaagcccgggcattggagtccaattatgtttaaattttggcacctctgttactaattgactattgtgagtagtaattattgaacttttttgagcctccatgctaattttcctcatttgtaaagggatattactagttaccttgcatggtttttgtgagaattagagcatatgcatgtaaaacagcagatgcctggcattatagtatattatagttgttgttatattgttaccatttttattactcagtgtgttaagtgccaaactagaggtttatagtaagtccatgaaagcccatggaagaagcttacaactactggccctggtttctgtgcattgtactgttgtagttctctgcctccattgtgcgtgtgtatacatacttcattatccatgtctgtggaggccttttatttgtttgtagctagaacatatttcttcatgttggttactcatctcattcctttaagtgtaggaattctccaagattcccttcccttctcttcttttcttttctctctcacctaaaagctcatctgtcagttcctacagcttcagccatcgcttctatgaagatgcttcccaactctataggcacagcatttccagctgcctgcttggcatcaccatctggaagtccttcttgcattcaaagttaacatgtccaaaactgaactcattcattcctcattagttctcctccttctttccaatctctactaacggtagcattatcacctccagcaaacaggttggaatcttacattcctttgctttctgatccctccccaatgtctccttcatccctccagttggccacactagccttttccacctccatgctactgccatcattcagcttttcttccccatccctattgccactaccctcatttaggccctcattatctcccatctggactactagaagaggctcctcctaactgatcttccttctcctttccaccgtacacaacatagcacctgccagagtaacaggattaggctcagagtaacagttttagtctttagctctaattacatttctcccttgcagacaaaccacttatgcctccagatttcctgcagaattaagtccagactctaaacctgactttcaaggcccttcactctttaggttgtctgttttcctggacttgttttaccttcacacattgcccaaatgggtagccccacagctcctgaactggttctgtgttcttccaccttcttgtcactgcttatctatttctttctcctaaaatacccttctttctattcccatgactccattccmgtcccgtctcctacttctgttccctactcagggaaatttgaccatctttcaggctcaatctgaatgctgcctctactgtgagggacacctctagcaactagttgtgcactgatagctgcttgtaacttttctttgttatctgttccttgtattattcaatttaaccatactttgaatctactattatagctcttttcttacagctcgtatttctttgtatacccttcatacgtgttgaagtggaatttaagaggataaatagaaaagtaccacagtggtggtttgaggatctaatacaggattggatgaaggaatgtaaatttgttagtagctgtggaaggatatgatgcagtgagaactgcagtcagccatctaaagtacaatggagaagacagagctgacttgcccaaagttttacctactcaatccttattcccatgaaattgtttagcttttagaatattagtgttattagtgtttactctttatctattatagatctagagaagaactttaaaggaggccaagatctccccacctaaaattcaacttacaaacatatttagaataatattatttaaaattagtgatatgcctatattagctaattttccaggactatgtagtatgcaacatctttttgagttgaatcaacattattttaggtttggtacatctctagtttgtccatcaagctaccctcttttttttttttttattgactattacaaaagtttcctaattgggttcctcatactcccttggtttcctcctctcttgtctacacaagtcattttctacactgatgataaatgattttgttttgttttgttttctgaaatatctgattatgtcactggctgcttaataaaataccacagcacctttgaattgctctttggataaagagcaaacctcttatggtctgttcatcctgggtggtgtagttcctgtctgccaccagtttcayttcatacagtgctctcagcctggcatatgcccctccttgtgctgcaaatataccccccttacctgtttccttcccactccccctttttttcctttggatatcaactcagtcatcacttcctcaaggaagactgactttcctgcaaagttactttctstattccaagctctcatggcactcttgctctttttcccttgtagcatctattaccagtgtagttttacacgtcctcatgattcgttttttattaccagtctcttccattagaccataagctctgcaagctccatgcctggttttgctcaccattgcatccatgcctagcacaatgcttgatgtatagaaggygtccagtcttattaattgaatgaatgaatgaacaaatgatgtttttgttcattagctaagaaaacccaattctgtagaactttaatgataaagattataaaatactaaatactgctttcatttatgacactttaatgacaaggctttttcaatttttgtatatattgtggagtattagataattaaatgtagtaaagtgaggccatatagaatcacagagtaagaaaacaacctcagatgtcacatattccaggcttctgtctaatgtgttatgtcagagtccgtgcagcttcttaaacatctctagtaacaagcagctcagcattaccagaggttgctctgttttttatttctttgagccagaattggcctgctatagtttgtgtccattagcatcagtctctaaagtaatacttacggcctggctcagtggttcgcccctgtaatcccagcacttagggakgccaggccagaagatcacttgaggccaagagttcaaaagtagcctggtcaatatagcaagaccctgtctctaaaagaaaaaaaaaattaatacttactagatctatctcctctacatagggaacccttttaaaagaacagacaactctcctgtgcccctccagatttatttctctcagttcttcctttacgtactgtgttcctgccacactggctctagaaacaactgtgtcctcctctctttccttcggacctccacacatactgtttctctcttcagaacactttttcgtccctgccccagatcccctggctacttccctctcrctcatcctttagatctcacggaagtctctttgacatcccctgaattgtgttagttgcttcttctacatgctgccacaacccttattcatcccctgaaacaattcctgccacattttattgtgatttttaaatccagactactatacacaagaagggaggccacatcttaacagtgctcctcatcatattctccactgtctgtttagcaccaagcctggcatgcagtgagcattcagtacactcttggctgaatacgtttgagaacaccaaccttaccattttctaagctagccttcctagatgtggtggtatgtgatttcaccattttctggttatgccacagcttgtcagtgtcccttaagagaagcactgagaaaaaattagagtgttccagatgaaatatgacctgtgctacatgaaacatattgtctctgtaagtttagaatcccatgttttttgtttgtttgtttgttttttatttgctctggagcaaaatttcatattctcttttggttgtgagctaaattttgagctgtaggcattatccacttatttcagtactgtttttttaagagtgttaacgaagtgaatttaaagaaatggtgttttggaaacagttatttaatttactcaagctgttagtctatcctccagattgttaaccactgacttatgtgaaaattaatggccagaagatgtgcttttctgaatgctctcttaatttttgtcacccagttcattacagcttcttttcctgaccttttcagtaatgcattctgaaaggggtgttttcatgattatcattgagataatgataataatgattagggggtgggaagaattccttaacttttgttatttgaggaggtagaaaactaaataacataggagattatatatgctagtagagtggggaagactttttgagagttacaaggagaaagagagtagaagaaagaaaatgttaagagttgagaaaaaaataagatcacaaaaaagtaacaaggaaagaaaatgtaatttactgattacttgatcaccaaccatgtgcttccacagtgttatgtactttgacctatgttgtctcttccatacaatgactatgaaaagtagacattgttaccctcattttatacaagaggtcatagccttagagtcacactcacagctagtaaataacagaagactttttcagacctaggcttgtctggttctaaagccaactgttctaatttgatgtagcaaatggttttgtacaaaggaagcagatggagcatcactacatagcataatgtttaaaagtgtatgtagactctagagcctgttggcctgggatcaaatcctggctctgtcatggttctgccacctaccaggtatggtaccttagacaagttacttgatttctctctgtgcctcattccccatctgtaaaatcaggataattgtagtaccctcctcttagcattgtgaattaatttagttaatatatagtaaaacatgtagaacagtttctgacatatagaaagcaatgtataaaccacaatataagtgtttgctgctgctattattattatttgtgtgtgtgtgtgtgtgtgtgtgtgtgtggtatgtgaaaggtcctatttctgagaagtttgaagatattgttaaaactgttgtcagggctgttaaatctgtgtgatttggtcagacttgtctcaaggttcacctcttagagttcttgctgaatcatatccttaatccctgaccaggcccagccccgaacacacacacacacacacacacacacacacacacacacacacacacacacacacaccacacacctctttttcttttccttttctagaattgaaagccaattcagaccttctctttattataaaagaaaggaagaataaagattcactataggtaatacataaataagaatctagtagcctaagttaaaagttgtaattcaaagcaaaaaaaaatttaaaaagctcttcttttaacatttttgtgttctgtaataggatgcctcttaaccgccgtaaaattcaggttcataggatttaagcagattgttacatgacagtaaagagtttgggacatttctgatgattatttgtttctgttgtgatgtaactgtattactttaacttccttttcctaggaaattagaatttctttttaaaaatcagtttaaacccttttatcttgatgaagattgcctacttggttaaggacagaatataagcagagaaagctatagctgttactttgcagagaacctaatgatttgtcttattttgaaactaatgaaaggtaaaaggggccccttttaaaaatttctgtttggagactggaggggcaaagattttcctttttttttttttttttttctgagacggaatctcgctctgtcacccaagctgggagtgcagtggctcgatctcaattcactgcaacctctacctcctggattcaagcgattctcctgcctcagccccctgagtagctgagattacaggtacctgccaccacgmctgggtaatttttgtatttttagtagagacggagtttcgccatgttggccgggctggtctcgaacccctgacctcaggtgatgccccaccccccaccccccccaccccgggcatgagccaccatacccaaccaagatttttcttaagtaatggactaattcattatttttggctatgttaccttaattaacttaaattgattctttgttcaaaaactcaacaaggaagccttgataattcagtcaagtattataacactaatttttgttttcttactgcattcgagagctatatttgtatattatttatatatgctgtaatctatttgattagtgctcatgagcattgttctcaatatgactttactgtaatatattgcccatagttttctaattttttaaaacaatgccatttagttcttgaatgacaaccatttgtaatactttaaaaagaaaatgtattcctgggaagtatttctagcctcaggtatagcagaaattataaaaattcagtcctcatgtcaaaagatatgccacattctaagttaaagccttgttgttgcctagaattataatgtttgtaagtaataagcaacatttttgctgatggcattcactttcatttacttatcaaatttctgcgtcttttgaatttggtttaatcctttcattctctgagctccttctctacctgtgaaaacaaatcattttttactactgtttaccaccgtcatcaccaaatagtatcacttcatccaagcaatgtgatttatatgtcagtttctttcaactgtcacaaaccggtttaaaactatgggttcttcttgttaccagagcaaatgattaagattgtgagatagggtatagacagcggggagacccagaaagaggagagagcaaatgaggaagcctcaaatgtgagattgtcactttttttttttttttttttttttggaaacagagtctcaatccgtctccccatctsgagtgcagtggcgccatcatggctcactgcagcctcagcacccccccaaccctgggctcaaatcattctccgtcgtcagcctcctgagtagctgagactacaggcacatgccaccatgcccagcttatttttctattttttgtaaggacggggtttcaccatcttgtctgggatggtctcaagctcctaggctcatctgaccaccttggccccccaaagcactgggattacagacctgagccactgccaccagcgagattgtcgcttttaaaactggccatgggctgggcatggtgggtcacgcctgtaatcccagcactttgggaggctaaggcagaaagattgcttgtgtccaggagttcaagaccagtctgggcaacatagcaagactctgactctacgttttttttttttttttttaattagctgagcatcgtggtgcatacctaaagttccagctactagggagactgaggtgggaggatcgcttaggaccgggaggttgaggctgcagtgagttgagattgtgccactgcactcagcctgggtgacagagcaaaaccctgtctcaaaaacaacaacaacaacaacaacaacaacgcagccgtagatttctctagttgtttcctgaactcatggcatcctcacattaattttcctccctgaccctgtttcttttcagtaagtctcattgtccagttttagaagtgtgggcatctttgtagcagttttctaagttatctgatgatctcgtgagggtatattaatcctcttccttctttgcttgttggcagggggcttgtacatgacagctggaatagcctccagttgaggggcttggtggtgctccttatctctaaagcagctgggcccagcagcgtgaacacttcatgtcagaactatgacatggtcagtgggatctactcatggtaagaagaatttagtcttttgacattgctctctacatcgtgtkttcttttactggacagaggtcagtggaaatcaccattctttgtcattctctgattcaaagatagattaaaatataaggttaaaaatggatttttattgttcataataagtgatagtcttggccaactctacacataactctggtaaatttcttcacacatttgtgtgaaatactttcctttctactttgggcatttaaaattttctgttcatcacttctccctccccttattatgtatygttgtgtctctgtagagacctctgtgccacttagttcaggatctatgatttttaaatctactcaaaatgacaccttgttggccgggcacagtggctcacacctgtaattctagcactttaggaggccaagcctggtggatcacttgagaccaagagtttgagaccagcctggacaacatggtgagccctcatctctacaaaaaatttaaaaattagctagttgtggtggtatgtgcctgtagtccctgttactcaggagactaaagcaggaggattgcttgaggccagggaggttaagcctgcagtaagccctaatcgtgtcactgccctccagcctgggtaacagagcaagactctatctcaaaataaaataagataaaataatacctcattgtataaagattgatgctactgtcattttaagagctgtagtctacttttttactggttattggattaaaaaatttttacatctcatgtatttagattaaaaaacaaatttgtaagtatgtattactcattttttgctgcatataaaataaacttaaaattttcagttttgtttaaaaaaatcactggatatatttttagtaacagtatgtcagcaataattttacttaattctagcaatatgcttggcactgtattaaaagcctgtatagatgtaacaatcaacaggtagactttgrcatatgaaattaaaaccagcctaacaatatgggtgataaagaaattttcctcacaaraagaagcatttctaggaactttgacttatggctaattgaccttgttgatttactttaaaaataaatctattttttttaaattttatttctagtggtcttgtccataaatgttttctgttccataatatttagggattactgttgcttgccagccagaaattcaatgatccttcctcattagcaagcaagcgaaatgattactgttgtgactacaaatgcccattcctccagccaatataattttttgtaaaccttttaccattcatccatacaaatacccttcactataagggatgtcttgtgatcacctattcactctgaaatggttcatatttgtttagtgcttttaggttactaagcatttttatgacagctattccatttggttcttataataatgccatagtaagagttgttaagcttattttactcaagaaaacagattcaaaaattttgaggctttttctggtgacacaactggtaatggggagagttgaagctctaactgtagttctcatgttccctccaaacctcattgttggttttttttttcttgattacattctacctttctaatctatttcaaaatatatatgtatttcagttatagatcagactagcattaaattagtatgttaaaaaaagtcatcttgtaagcatatctttaaaaacttttaaatggaaaactctttggcacatctttagtacatctacatcctttcccaaaacctgcttgagttagagctcaaaagtttaccttacaggccaggtgtgatggctgatgcccataatcccagcactttgggaggctgaggcagatggataatgtgagtccaggagttcaagaccagcctgggcaacatggagaaacccagtcgctacaaaaaatataaaaaattagccagacatggtggcatgtgcctgtagtcccagctattcaggaggctgaggtggaaggatcgcttgagccttggagtcagaggttgcagtgagctaagattgcgccattgcattccaacctgggcaacagaatgagaccctgtctcaaaaaaaaaaaaaaagtttaccttataaattttgtagaaaactcttggctaagtttagttgagataactagagaaaatatataaaaatttagagtgagtactaactacctgttagtccctggaaagcaaatggacctcacattgccttgtatcccatatatctctgttttcggttaggaattccattgattttcagtctgctgactttgaccctttcttattagtcatctgcttgtatatttggataaccacacatacagataatgagcacctactattttttttatctctaatcctaaaataatccttgcaaaatactacttgatacatagtaaatattcaataaatatttgttacataagtaagttattcctattttacagaagagattgctaatactcaggttgacttatctgaaatattttagctagaaagtgatagagttgggattgaaatcccatttttatctcaaagtgtatactctttctactcagcaggagctattaatctgtatgcacatggtgcactgtgatgtaaccttgtgtttctaattcttgtctagcctctaggaaacaatttcattgcttttggtccttcacataacatgttggcagatggtcattataatccaagcaatttgactaaaagaactttggaaaagagtaggggtacgttgtgaacatgaaacctttccaaataacataaatgggctttatactcaagtgtatagaatccacagttacatttagggaataatcctggcatgtaaacccaggctattttctataatcaaacttcatctagtaggtcattgggggtgtttgggtgttttacacacttgttaatgtgaaaaagtaatttggtatagtgctatgagaaaccattaatttgtttctctacccctgaagtcatttgtttagctcttgcttccttaattgttcaagtgtaacttttgctggagtcttgtatctataatgctacagtgaattatttaacatttgagggaagtactaatttgggagctttttaattcacctccaaactactgggatttaccttgttggtattttttctctcataaaacttgactttgatatcagataacgggacctgagtaaattacctgaaggaccaaatgggagttaggtgatctcttttgtttggcctaaggatataattggtgctgtggatgtctagtgaactaatcatataacagccaggagaggcagaatttaggctaaaatgtaataactacattttgaaaatcgggcaagaaagccacatttataaaaatgtactgtaaacattcgccatagccttttgccaacaagactgtgaactttaggtttattccactaaccttgacttttaaaaaattggttgcaaagccagtcaagtattactaaatttacagttatccctagctacaatcaagaaaatgtttacaacttcccattctattagtaatagcatagttttattttgtgtacaaaagayagtttattacaatatataatgcatattaaaaactatagatttttctcatgatatgattattaagtttacagaaattcacgtgaatattttggctgatggttccactttctcggttgttttatcaagaactgactcaatcttctcttctaactagtagttaaaagcagaccacagactgaacatatttgcactctactttcatttcctgaagtttcccagcaccttaactggtagaagagactgaagcaagtatgccaaacgcactttcttttcttcttgagtacccggctagactacatttctcagcttcccatgcaggtggctggccatgtgactgagatctagccaatagagtaggagtagaagtgatatttactatttcctggccataaaaatgttgcatytgtaatactccttaagcagatgatctgggaagtgacccattcaagatgaaagttgcctgtgtccctgaatcactcttgaaggaaagtcacctgcccatcaggaacatccatacagactagatgtatgagaagaaaaatctatttgttaagccacttaaattttagggtttatctgttgacagcagcaaatgttacctttttcctttttttttttttttttgagacagagtctcgctctatcacctaggctggagtgaagtgatgcagtctcggctcactgaagccactgcctcccagtttcaagcaattctcctgcctgagctacccaagtagctgggattacaggcgcccgccactgcaccctgcttctatacctcacaaagacgtggggtatagaagtacctagcagggcccagaacagtaccaacattgtaattaataggcactcagtacataactgttacatgattgtatgaatttatggaaaagagactagcttcattatgtatgcaggtattatggattgaattttaccctcccaaaattcatgtgttgaagtcctaacccctagtacctcacaatgtgaccttattaggagaaaggatctttacagagctaatcaagtcaaaatgaggtcattagaataggccctaactcaatataactggcatccttataaaaaggggaaatttggacatagatatgcatatacagggagaatgccctgtgaactgaaggcagccatctacaggccagcctcacagccctagaaactcatatatgagaagcagggaatgaagatgaggtggaaaggaaaggttgaagtcacactgtgaagggcctgaggaattagggcgatatcctggataaattgtggggagttcaagaggcagcagagtggacttggaatctggaagctgactgcaccacctrctagccgcacctcagtatgtacttcacagaatggttttcagaattaaacgagtgagtagaatactgcatggcatagtaagcattctgtaagtgtttgctcttattcttagctattatcaaaaaggtgtttaagcaaaaggggtcatgttactgtatctgtgctatggaacataattagctgaygcttagaaggtgaccctgagaggtgaggtccaagatagagagtcagccagggaattagtgaagtcgtctaggcaaaagctgagagggaaagcagagacatggagaggggttggagctgttgcccatagcaagcagttaaaaattggctgagccagacctgaacccactgggtcctttgatttcatgcctttttcttgttagcatttaccaatttttcttccagagcttaagttgtaactaggtgttcagtgggacaaaaggttctgggatcaaataagtgtggrcatgccaggttaaacagagttagagagattccttcatttgagaattcttaggagttaggtacggatttatgtatcatgactctgagatattgtttcccagtcatttgactacagaacccattggtccctgtcagtagtagtacaccttgtggaaagcggcaaaagtttggtaaatgtttctctgtatcagcatgcctaactttgaatcctaatgagaactctgtgaggcagaaataacagtttcaggctgggcacggtggctcacacctgtaaacccagcactttgggaggctgaggtgggtggatcatttgaggtcaggagttcgagaccagcctggccaacgtggtgaaaccccatctctactaaaataaaaaagaaaagaaaagaaaacagtttcaccaatgagaaaactgagactcaggtgaagtaactttcygaggtcccacattaagtagtcaagtagaggaagaaatatgtatattggttataaattgtctgggttcaaatccttgtttcatcacttactagctgtgtgaccccagacaagttagataacctctctgtgcctcatgtctattaagtggattaaataagttaatacrtcgagaacccttagaacagtgcctcatacatagaatatgcttccaaatgtggtttattattgccattccagaccccagtcatgctgcttcatggyctttattagatttcccactccttcagagtaggcacttagctttgtatacctttacaactcaccaatgccttggacatagtattcatttaaatctctatctggatgactggatcttctgtataacataagtgttttagactgacgcaaacatttgaaacacatgttttacagtgtaagtcttacagagtagtttaacatggacgatgacttaaagggatggcagtttattatgtcctttgcaacctgtagttcaggatgtgagctataaccagattctaaagcattcttcatgaaacaatcttaatttttaagctagttattatgtgaagcaatataatatatttaaagaaggaaaagaaaagtgttgactgggcaccatggctcatgcctgtaatcccagcactttgggaggccgaggcaggtggatcacaaggtcaggagttcaagaccagcctggccaaggcggtgaaaccctgtctctactaaaaatacaaaaaaattagctgggcatgatggtgggcgcctgtaatccctgctattcaggagactgaggcagagaattgcttgaacctgggaggtggaggttgcagtgagccaggttcgtgccactgcaccccagcctgcctggccctgtccagggaaattttttaagtctcatcaaaagtttattttatttttccttcatatttcaaccaattcctttttctactacactttctttgcccacctctgttatctgcagcttcaattctggtatctataagtcttgaagttttactgataggttttagactctcctgagtttgtgttacccttaactccatttcctctaagcagcagtgggtagagaatatgctgctgctggggacccagtgcaatgatgatgttcccactgcttcagaattgcagcatagggacctgctggaccacatccaactgcgagacacacctgccaatctgaggaaaaaaacactgaattgaattaaagatctgcagtgtcctgggacacacatattcatttatagaagtgtagccaccttctttttacccaccttgctctgtctctaatctgtttgctatagagatcaattcaggtacaagtagaatatgcaagaatgaaaaaacattaaatgagtaattgaatgagaagtaaagtcatcgttggcatttcttctttttagatggtctatttgccaggatacataatggatactgaccaattttaaagcataccaattctatctgtaaaacaactacttttttttttttttgagacagagccctgctctgtcacccagaatgtagtgcaatggcatgatctcggctcactgcaacctccaccacccaggttcagatgattctcctgcctcagcctcccaggtagctgagattacaggtctgcaccaccacgcctggctaatttttctatttttagtagagacagggtttcaccgtgttggccagggtggtattgaactcctagcctcaagtgatctgccctccttggcctcccaaagtgctgggattacaggcggagccactgcgcccagccaaaacaactatttttatcttattacctatgtgacttctgggtggcaggtgagttggcgaataagaagaaaatcatgaccgaacattttctgtatttatttgtaatgctgataagagaagactgtgtcctctatgtgcttttaaacatagttcagatgattggactgggtgcagtggcttacgcctgtaatcccaatactttgggaggccaagatgggcagatcacttgaggtcaggagtttgagaccagcctggccaacatggcaaaatcccgtctctactaaaatrcaagaaaaaaaaattagccaggcatggtggtacctgcctgtaagtcccagctactcgggaggctgaggcaggaaaatcacttcaacccaggagacggaggttgcagtgagccaagattgtgccactgcactccagcctgggcaacagagcaagactctgtctcaaaaaaaaaaaaaaaagaaaaaagaaaaaacatagttcagataattgtattttatccgtattacctcagcattcagcatgtttctagcatatagatagcaatgactatttgatcatggctgaataattgtcactagtagtggtagtatttatctcagagcagggaggactttatgaaaaagttccaaaacttgacactataaatgaaaagattaacacatttgcacaaaaaataactcttcagtggaaaaaattcccatgaagtcaaaagacaaagcccaaattacaaaaatgtttacaacatacatgaccaaaagccaagttgtaacctacaaatcaattgaaaatcttataaatcgggaagaagaaaattacaacacaaacatggacaaaagacatgaacaggtagttagcttagaaaccctatcctgtaattagaatgagggctttggagtccctgggctgacctgaacttttatcctttggcctctttgaccagatcaaatatcctgtgaaaatgcataaactacaaataaaaataataaastataaaaaaaattatttttgttaaaaaaagcaggaatgaagtaaaatgctatctttagattagctttttaaaatttgccatctgttcaaatggacaccatcaatttcttcgcatttgtgctaattcttcactctactcggtgtattcaattgattaaggttaaattaatgatatgcaggtagtccctggcttaccatgatgcaacttaaaattttctgacttttaaatggatttatcaggacataaccccattgtaagtcaagaaacacctgtacatactgaggtaattgttgggcttcaagaacttatcacaaaaatcatcataaacataactataagttaaatctagaaacatcttaaaatcaaattacagatcttaacattactttctcctctaagtgaaaattggttacgcttagtgtggtgttagaggaagtgatagaatatttggaggcctgtgtgaaataatcttaaggagagaagggagaatataaaaagctgtgaaagaggccgtttttttttctataaacctttacatttagggaattgcacttggtctcagctgcaaatattgtagttcataatttatcattttaatgtggtactaattagcatctgaygacttctaattatagtaacaataggctgtgactatctatccatcctcaccttcattccacacattagaattcgtctagcacttcaaaatgccaaacaaaattaacaaactgtatttcccttggggactgatcaaatcaaaaaacatcttaagaaatgaggcttaaggcagaacatgttgatcatgttatttatttagggtcaattatataaacatgaaataggtaatattcaaatatgtagcattttaaaaatcagttatggttttgttttgtttttaagataacatgtgaatgcaaacaaagagtctggaaggaaccttactcacctgctaataacagtggttgaagaaagaaggggttggagaggtttggaaacagatataagggaatggtctaaaggtgactttatttgtagtatttcagttttttaataacctattcatgttattttgtataactaaatttaaaaatgaaaaagttatatttcatacttgtaaagcaataaaagcctatttaagaaacgtatctttttgtactacaagaaccttaaaaatgaggagcgcttattgacagtgattttaaatgattatgcagaataattgaatttagtgtaggcttttggaaataatttcctaaagatatctcagctccttttcagataaatctcaagagatgaaagcatgtgcaatttgattacatattcctattgattgtattctacttacaacagtaaatgtaaactccagatacaaatctagtaatattactaattcattacaaccagtacttattttcttcattaagtttttattgttatgttcaacttgcacagcatgcacaaatgcagcaattatatgttgagaaagaaaagggaaggctctttatgtttaacatactgtacgtcagaagtcattacttcaccagagcttttggaaaaacacaaaataggatcagcttcttacaaaacagtataattaaccacaaaaagtaggtgggcttacctactaatctactcagctgagttagtttattgcatgtaaataacatgatatagattagcctgcctaatctatcacagcaaaacacaagctgcataaattgtttttgttaatagtaaaaaattttaaaatcctttccttaaagaagggctgtatgttgactggtaagtagccaaagttaaaggcactgtccagtgactaattctacattttaaacagtgcttaattttgggcattcatcatgtgatagaagttgtgcaaatcacttaaaatattaattttattggcagagtcagcttagtagcttcatgacttaatggtgatcctttgaactcatacggaaggcatctcagtggtaaacagtgtgtcataataaaggcatagatgaagggccagagatctgggttcttgtctcaattctgcaattgattagctatttgaccttaagtaagttacttaatcactctttgaaattactcatctgtacagcaggggcaatgatgggcttcaaaccaggagcttaactaacagggtacacatctagataggttcaactatcctgtggtccagaataagtcaccctgaccacctcctgtctctgcaaggcacagcactggacactgaaagacactgaatatttcttatgaataagaaatagtctttgacctcaaatgagtargtaaggaaacaatgtatgcatctagagtcttcctgacacttgctattgatgtaatttcctttctaaaactcttttgctggaacttaactactagagctatttccacagtcaccattgggttcacaatccacccatgtccactgataaaccctttgtttaactaaaggtaggtagtctttaacacccctcacataagatgataggtgagagctgacatctgtaggtggcttagtgcctaagaaatgtcttcctcactgtgctcttggactttccttctcactcctgaaagtgggtggtgttgataatagaggcaaagagggcagattctctgattggttatctctaatcctggcatcctccctctctatagttactggaatcttaagtctcccttttctgttgttaagatttccctcattccctcctcttctcaaggtttttgttttttgttttttgagacagggtctccctctgttgcccaggctggagtgcagtggaacgataatggctcactgcagcctcaatgtcccgggctcaaatgagtagctgagactacaggtgcatgtaccatgcctggctaatgtttttgtattttttgtagagaggtgtttttgccatggtgcccaggcctgtctcagactcctgggctcaagtgagccacccacctggctctccaaagtgctgggattacaggcatgagccaccacacccggcctcaagtttttttgttgttgttgttttgtttgtttgctttttcttttgagatagtctcactctgtcacccaggctggagtacagtggcccgatcacagctcactgcaacctccacctcccaggctcaagtgattctcatgcctcagcctctcaagtaactgggattacaggtgtgcgccttcatgcccggctatttttttgtatttttagtggaaacgggatttcactgttggtcaggctgggctcaaactcctggcctcaagtgatccacctgccttggcctcccaaagtgctgggattacatacatgagccaccacacctggcctggcctcaagtttttaagtggrgtaaaacatccttaactcttcaattgcattccctacaggattagatacaaattccttaacacagcaacaggcaattcctaacagccctagagtggatgtgaggaagataaaagcatgattaatgtttttctttgtcatcaagaaaagggtatgtgcaagagtgtaggttgatctaatatgattgtttaggccccatcaggtaggaagtgaggttgagggagcccaaaactagagagaaagtagtgatcaagggactggagatcatgatgaatcagtttgcaggggtggaagtggtaatgcaatgaaagagcagaaaagacagtaggttttagatggaaagttggatatccaagtggagatttcaaaagtggaacagttctgattggttatgttcagttgtgccttaaagtgggtttcacagaatacagtggaggtggttgaattgagtatattgaaaaactgtagggtgggcaattcacatgattgaagtcaaccagaacaacagaactgagacttcaataaatgtagaggcacagagaagaggagtgatggcagaagtagagctggtttcaaaggaacagtggttttcaccaaaatgaggaaataaggggagcactgagcactggtcccacctctcagctcctcagtttgtggcttgtagaagttaggcatatctgctcatgaacatataggatttggacactccgggaaaagccgtggtgtatttagagctagaacatagaagaaaggttctgtgaaatcttaaaacacttaacacattgtttgtaatgactgttttgtaaatactgatttatgtatgttttcttactaaacagtaccttctagaagtcagggtttgtgtcttaatcatcttccaacctatcacctctccctccactgaggcctctattacattttgtacctttgaggcacttctcgtctattttatagtaatctgcatatttatcttgtccctctgctagatttgttcctttgctcattcattcattcattcaacwaacatttattgaacacctgctgtgtgcaaagctaactataataaatatagaaatataattattactatagctaacacatatagagttttctataagtctgctactgttccatattctttatatatattagtgcatttatttaacatttaacattggttaagaaattgcttttcttggtaaacaggcttaaagaaatttaataacgtgctcaagtttatagtgtaagaaaatcacagagttgagtttcaaatcccatttgaccatagaattcatgctctttccattactgtagacaacctatgaagtagggtgccttacatatactttcttagtcatcttgacatcctcagtatagtggacagacatcaggttataaactttttctttgacctccaaagccccagcactatggtgggcactcaagtgctccatgtattattgttgatttattgagacaaaattttcttagggggttgaatgtggattttggtggggctctatataatttaaaaataaaaacgtttatgtttgcaggccattatctctattactgcatgtttcctttcacacatttattctttatatgttgtgaaacacagatatttatatattttctttgacacaagaacctttttttaaaatagacttgtgccctaagcagatattctgtctaatgggctttccctatagacaaagagtaaagtgtatttcatttgtcattagtcctgaaatgtcagtgctgcaaattttgttatttttggaaaccattacattcatactcattagagacaacatttcaaggaaatacttgaatgattatgcacctacaagattttctcttgtccatgagtaatttgtatcctgtaataatatggagcttctattactctattataattacttacatatttgttgcaaataatgatgtaatggatttttttgaggctgtacgtgagaaccaacaaactgcgacgcaaaacaagtttccaccccttttttccaaagctatagttaatcacttgaacactatccaatatagtagaaagctggcagacttttctttgcagcaggctatgtaaaaatgtttataatttacagcttattatgccatgcaaacgactgtgttcccaatgaaggcgagtgagaaaatatggctgttaaattacttaactcctctttgttacttgttttctggcaacagtggaaggatactttgcacttaaaatgcatttctgtatttaattttataccattcaactcagaactttaaaaaatagggatttgcttttttatctctctctatagatagaccagaccaatttaaatttaacaaaaacagtaagctgaaaaatcagaattgtcagggaatgaaaatgtaataatacaaaattattagggtttaattcaatttagggctttaactttgcaaaacctttgttactgacacgtctgcaacggtttataggcagcttgttattttcaaaggtactttatgcaaactttgttttatattgtctgcagcgctttggctgaaagttgatcttcctcaaaaacaattagaggggtaggcaaggtaacttggacctctctgttatctgttgaatatattcatccattttaggtctttccttagcattttctaattttatcaatgcccttattaaattcataaggcccctaacgtcaggtaccacgttgtcttttgtggttgccattctttctgtgcctggtatactactacaagtttatagtcaatcagaacrccccagatcatgacctctatttgcgtgggaacgtagcaaaagctggtttttaggtactgtaccttcaatgaaggaagttctgaggaaggcaagtaaaaacactacagctggtgtttaaaagtttatatagtgtgttttccttctaattcttcagctttaaatgtggggagtaggggaaactttctatttggtttacactccctgaaggtataagagaagaaacatttatatttaaatatttaaaacattcaaaaaacatgtttaatttttccactttccgattttagaattaatttagaaaccagggactctgtagtacttgaccagttcttagtaattgcacattcttttttccatagcacaaataatcagatactgagtgtgtgtgtagtgtgtgtgtgtgtgtatgtgtgtgtgtgtgtgtgtgtatatatatatattttcttttttaacatagtctcactctgtcacccaggctggagtgcaatggcacaatctcggctcactgcaacctctgtctcctgggttcaagtgattctcctgcctcagcctcccaagtagctgggattacaggcgcctgccaccaggcccagctaattttttgtgtttttagtagagatggggtttcaccatgttgcctaggctggttttgaactcctgagctcaggcaatccacccaccttggcctcccaaagtgctgagaattacaggcgtgagccaccgtgcccggccgatgaactgagtatatttaaatgggaatttttgtgcacctgcaactcatgtttttaagaaataatggattgctagctatctcagagaaaataagattatgtcactatcaaggcattatcatttttattgtcttcttcagggaactttttggtatataaggaaaattttttcattttctacttcagatcttttttttttaagctaaccattacaacagacttataggtcatctctgattgtgtcaaagtaaaaaattgaataaaacaatttgttctgttttcatagttgcttcttttttgrgtaaacagagacctgggatcttctggagctcagccctctgggtgggaggatgggtgcctagcactgctctccgctgacctcttctggtctcctgttagagctgttgttgaagtagatagctacttcctcttagactgccttggtgaaagaagcggggcggtcaaggagaagtggagggaaattagccagtatakacttcattatgataacctccccacctstttaccgctcaggattccttttgttattctcccacccctgtttaaaaaagcgtctttaccaggcactttatatataaaatcatcattatatgattttccattttattagatacacttgtaactgccaatctgagcttctgatgaccacaagataaccactgtcgcatcttattaatgagtacaaaattaaagaaaattaaaaattttgttaacagatgttactttatctggggggagggggaatacattgctttccttcgacattttggaaagggaaaattactcacctctgtgaagaacttgttacctactgtaaataacccttaaagatctgcgtaccccaaactggggaccactaatctaacagtaccatcaagcagtaaagtgctcacattattttttgctgtagaaatggtgaccattactaatttggtgccattttcaaacggtaaaaggtgatctgcatgttattgttataaattatgaatattatattgggagcktttatttttatccatagaataaggagttggagatgtaacccaaagccctgatggtgtccagtgacagaattccactttgttcctaaaactgggaggtcaggcayggttgtaatctatatgctgtctttgcagaacacatggtcatcaaacctaaaattcagacagctttacattttgagataaaataggctcatcacatacagaagaagcctttatttctgggagctacattaaagtctgtagttcatactattccctcatcactctggggctctccctggccccctcccattttgtgccctctcagtttatcayacttcatctcttgtcacacctttgtctcatgtttcctccacatctggttgtgctttttttctgttattactgaacatcatctaataatacctaaaccatttaaaccctctggaatagggcagaggtgagagcaaatgaataaactgaagatcttagagcagtggaaagaaagagacgcactgacaaaatggctgctctgacactgctgcgaggtgccgtggaggagaggttggccatactcctctgtctccactctcagcaggctcgttcttggtttgttccttgagattcataattacatgtagtattgaaatgaacgtagagcagtagtgaccagcatggggcctagttgcttttactttttctgcagttcaacaatataacttgtttttgtattatgattgacatcttatgattatctgtaccttttgtgacgtctggttaccagaagctttttctggtagaagaaaagcaaaattcaaagccaggaataatactgcaaccatttatacaaagttttatgtgcacaatatgtgcaaagctatagatgtagtrtatgttttgttttttaaaaaagctttggagtctatacattttttgttcattaaatgaaaaatgttggtaggttaaatactgctgaattaaaacactgttgaggaagggagaacggcagtcacttaaaaagctaaatcagagtagatatatagggcctgtttaaaaaggcccaatattcacgaaaaaaagaaatctgttatactaaaagaggaaaatgagtattactatcatgctgtcatgatgctactctaaatgcctcaaaaccacctaacaatccattcaggaatctgccatattgtagaccatagccatatataatagctgtactagaatataatggcatttacatttaaaaaaaaaagcaaccttttgtaagtatctgattacacctgagctatactggataccatagcaaaagaattaaaccaatcygtcctctgctgtctaaaagtttattatattttacagatgttttgagagtagacacacatactagacatataagataccagaaaaattaaagtgatgtatatatagctcatccttttgtcagtttaaggggaaagatacaaggatgcttacctcattcatgtgggggtaaagattaagaagaataaccaacagaaattcaaaatttggtcatgacaagttattaaatcagacttacagttaacattaaatggataatacattcatccactctgaaatttgaccatatgtggacctgacaaaggaattttttctataacatactttttatttttttaacatgatccaaactgttctagaactttcttgctgactttatttcattaagtccatcaatccaacttcaagatgttttcttctaattaggaagagcatttttaaaggatttctaaaactgtatattgtgataatctgaggtaaatgatcccrccccagcctcctctcacttgttcgcccaccttcccagtgtatttctcccctacagttctcactgggtagaattctcactttagctgttacttccctgggtaatccttaccttacttcatcaagatttcaattaggtcctcttcatctgggctcccttggcaagctgtattttcttctgggacagcaattattgcccaagattcaaatcatttggtttcctgtccaaatgcttcactgacctggccatgagcttctcaagtacagagatatgctttctttctttctttcttttttctttttaatgaattctcagactcttatcacagggtctgacatgacagcactcaataagtgttcattaaatgaaaggaaaggatccttgaataatcactacaactgaggtctgttaataaaatgtggggaaagtacattcagaatattatccttctaactgtaatgaattttgatattttattaacagtccaatcaggactttagaaatctcttcaaaagatctctttgctacaaatgtttatcctgccagtaattcagatgctgttaaccagttatctgctgatttggcaaaatccattaagtatctattattttgcaatatttatttaaatctttgtaacttattccaagatctgccttcttgatcacatctttctggttataatagttatatctgcaaattctattttattaaatattgataaatgtgggtttgctataaaaatttaaaaatgggttatccttttaagaaaataagtatttagagtaattggtaaatttatttaaaaattatatataatgacagtattaaaatgtttaaaaataagttaatgtaaacaagacattttaaagtacaggttggtacttcattaactttaattttgtgacttttgtcagttgatgtcacaaccttagtgttattttaaaaatagtttttatagggctacttaattaagtaacatggtatttgcttatttcaaacagtctgcctttgttcctgtccaagccatgctggcagggcattgcttttcttttcccttttgttaataygctgtgttagataatggttctgtaaataatagattccaaggacctttgatccaccgttactgtaaaataaaatgcaacttaattttttcagggcataatggttttaaccttgcgtactaatttgactgtgcttgtgggggcagatccttaaatgagacgcaaatgaaggaaaaattgctaatgctgccactgtatatctaatgagcactgtgtaataaaccataacctctttgacatttctctggaaagcagcatgattattttggatagctagccctttgtggatggctcattaccgtctggcataatatgtattgatagagactgtaattgtcaactcctatttgacatgctgcctctaataaatatggcttgcatcgctggagcccactgatggttatatgggaaactgtaattaaagaaaaaaatatatttttaggttaaataagtatatatgtatataaaatgtctctatagaagattatctgcttccttactgccaccacccccagcttcttgtcatagagtatttggagcttccctgaaggattggtgctgttttatcagtataaggkccaacatgtgacaagatgtgtgtgtgtgtgtgtgaatcatctccattggcaaagaattgacaatatgaaaaagctcgttctacatatataacatccataatactatagtattattttattttcttttgtttttagagacaggatctctctctgtcacccaggctagagaacagtggagcaatcatagttcactgcaaccttggactcttagatcctcctaccccagcctccctagtagctgggactacaagtgctaccttcatgcgcagaacaggatcttgctatgttgcccaggctggtcttgaacgcctgtcctccaggaatccttcagcctcagcctcccaaagtgctagaattgcaaacatgagccaccacacctgacctcatggttttctttaactttattttcattttgttataagaatattatgttatttcatacgaaacaaaagaggataccctactcaaattactaggaaatatgaaccattttaaagatattaaaagcccacaaaatatgttacataatatttaggctggaagaaatgtaaattaaagattaaattgggccctgcttcatattataaaacaaatgtagggccgggcgtggtggctcatgcctgtaatctctggcactttgggaggctgaggcaggtggatcacttgaggtcaggagttcgagaccagcctggccgacayggtgaaatcccatctctactaaaaatacaaaagttagctgggtgtggtggctcatgcctgtagtcccagctactcaggaggctgaggcaggagaattgcttgaatctaggaggcagaggttgcagtgagccgagatcatgccactgcactccagcctggacaacagagcaagactctgtctcaataaataaataaataaagtaaaacaaaacaaatttaagcctagtcaatttataatttctgaaaacatagaattggagttctaaaaaatatttttattgtcaatgtgtaattgtaatatattctgaacttctgaacaaggaagtatactcttagtttatatgctacaattcattatttttattaaattctcagcataggatataaaattagaatgtaagcacatgtttatatttcctggagtaggcctagagaatcatttaaaaaattaggcagctcctagatttcttcttagcaatgtgaagtctgatatagttttcaaactaagagaatggagccccggggaggtgaagagaagtagcagttggaagagcatgactctgctactcgcctacccatagctttcaattctgatcctatttgtctaggcaaattttgtaaactctctgaggaccaggatactcatgtataaaattggggacaataccatctatttaccacagctgttgtaaggatcaggtgaaaaacatatatgaagcacttaatgcaatacttttggcccctagtaggtaatcagtaaatattagttttcctctctttcctcttttatcctcccttcttccttctaccctccacaggtggccacatttctaatctgaggcattctttattttctcaagtatgtcctgtccatgaagcatagatttttaatcttgttaggtaatgctagctaatagctattaacagccaggccctgtttcagttttcttacatgtgtcagctcactgaatcatcacaacaacctcataataagagataagtgctgttaccatccccatttaacagatggggaaaactgaagcacacagaggtgaagtaatttgctcaaagtgacatagtagtggggccagggtttgaactcaggaagtttaactccagagcccatactcttagcttagctatactacctctgcaggtcatctctcctcatgttcataagacagagggaaagaataggttctggtagggttctagagaggcctggtccacctacaaaggattgaattgtccttaaaggacaaatccaacatagccatcaggggtagcaagggtatttctggggaggatggatggcaaaccagtgaagggagtgaagggagatgcaatagtgctgtaggataccaaggaagggagaaagtgaggaataactattcttgcactagacctgccagcaaatgccaaatactggcaatacgctgcatgcactgtgctatttcctctgcatgggatattgttcctacctttcttcatctgactcttacctcacttaagatacagttctgctctccttttctccaggaaacattccctaatccccaggccaacctaagtactcttttctgggctcccttagcacactctgcataagtgtgtacaaacattagtggtgatagtagtaataattactgtgtactgagcacagactatgtgttaaggcattgtgctgaaaacactttacacatgttatctcatttatgtctcaaaacaatcctaaaaggtcaatagtcacagcctctttatatggtaaggacagtcaagcttagaaatgttaaatcatttagccaagatctacagagccataaagtagcagatctaagatttcaaccaggtctttcttactgcaaattcatattctcaataactacatttaccatactttattgatattatctgcttttatttttctcataatcagattatagactcttcaaggactacactgtatcttcatcttttaccccacatcctatcaaaattgtcctttagaggagaaaaaaacaaaatattaaaatgtgctgattgaaggctgggtgtcatggctcatgcctataattgcagcactttaggaggctgaatcaggaggagcacttgagcccaggagttcaagactagcctgggcaacataatgaaacccccatctgtacaaaaaaataaaaaattaaccaggagtgatggcacatacttgtagtcccagctactcgggaggctgaggtgggagaattacttaaggattacttaagcctgggagatcaaggctgcagtgagccatgattgcaccactgcactccaccctgagtgacagarcaagaccctgtctcaaaaaaaaaaaaaaaaaaagctggttgtggtggcattttgggagcccaaggcaggtggatcacaaagtcaggagatcaagaccatcctggccaacatgatgaaaccctatctctactaaaaatacaaaaattagctgggcgtggtggtgtgcacctgttgtctcagctactcaggaggctgaggcaggagaatcacttgaacccargaggcggaggttgcagtgaactgagatcacaacactgtactccaacctgggcaacagaatgagacttcatttcaaaaaaaaaaaaaaaagtttatttttgctaaatatacttgaattttaaatgtattttataatggactgagtttaatgtgtaggagctaagagagtttctccttcccctctgaaggttcaagcctgcatagataaactgacaatagacagattaacagggaaaatttagcacacaaatgtattaatgagcacatggacctgacagtcctgcagatatgagactcagggccagatggttgagacttaaatactctcttcatagaaaggaaggtagttggaggtctgtaggcaattttaaagyggtagtaaatgatttttaggggaatgaatgggctcaaagacaagacagtggtttgtaaatgattctctttggacgctgaatgggatggaaggacaaaccagttatgggaaagtgaggggcagaaattcacagtgaactaaggttgtcttaatatgcagataaagcgtcctaggtaatctctcagagctgccctcagaagaatagatgaaaagtctctctgggcatggtgattacttttagtcttttctcttttttggcagtgaatctttcctggttgtttttttagattctcagggagagggagtcttaagacaattgcatttctttctctcttttttttttttttttttgggatggagtcttgctctgtcgcccatgctggagtgcagtagcgtgatctctgctcactgtaagctccgcctcccaggttcaagtgattctcctgcctcagcctcccgagtagctgagactacaggcgcctgccaccacacccagctaattttttgtattttcagtagagatggggtttcaccgtgttagccaggatggtctcgatctcctgacctcrtgatccacttgcctcagcctcctgaagtgctgggattacaggtgtgaaccaccacacccagcctgaatttgctgacacttttatcttggacttctagcctccagatctgtgagaaaataaatgtctgtttaagccacccagcctgtggtattttgttatggcaatccaagcagacaaatatagtacgttattctagattttcttgctttaggacttaagtaaaatattatatgaagaaatgtttgtaattcataatttaacatgataaatatccaactatgggtagtgccatgtaacagcttaagatatgccattaataatataattagaataatcatgtaaggactttgtagaaacacagagaaatggaattgcatgtgttatcaaggattcgcaatgacagccacctaccataagccacctgtggcacaccccagcatccttccgttcctgcattgtgggcaccagggcttcaccagcactccttgccctcaggactcctggctcagtctttttcatagagaaggcttaaggtaggccaagacctgtgcaatggaaggagagttcaattaggagccatctaaattattacttaaagagaagccaaatgggtacatttttatcttttgaaacagcttgccagagtgttgtctgtatcacctcttgttagaaatcttgacttcattcttttcttcagaatgagaatgaagacagaggtctaagttagcttctctgctctcttcaaactgagttaactctgttacggccactctgattaatatgtaggcctctgttttagaccacagcagggcattgtgctcagatgaaaatgtgcaggtgaaattaggaagtataatgacttgacattctgataattaactggcagtaaatattcttcagtgatatctaagaccaactgttaactcatatttctttggtagcctaatttaagtaaaactttcttttgtctctgtgaaaatgactttttcacaattcatttatttttttctccttaatttatccaaatcatttggggctgtggctagaagatgaaggatgttcctggacttttctccttttctgtattgttctcatttctttttccctcaagcactgtctagaggagacacccaagcctttgtgctaaatctgtgctccacccatattccagtttcagtcagctggctgcagccatttttataccactccatggcagctgtcgactctgttcatcgtctggcaggggcagtgagccctgttgggatcagcagcagcagcagcaagctgactggagccccccagcacattatggtggcagccatgcatggcatggagagtagggtgggtgtgtagcagcaacgtccttgcattcagtaatctaaagtgctcatcatctaagagaagtacaactttgctgtcacctcttctttggagtcttcccattcctccccccaaatcctcagtgatcataactgtgtacccctacagcagttatagattgtggcattcagtttacacttatgtactatataattttcttgttaaatcttttcatttcattgtattgtatctccaactaaactatgagccctcaggacacagaccatgtcttaaactaccttaagagaaagaatacatactcacaccttgatacatagtcgtcgataaaagaaaaatgctttttatactttatatttctagggtctaacacatagtagatattccataaataattttgttgataataattataatcagataatctaggttaacagttctttccatttttacctgttctcttttaagttacaaataatcaaaatatttagttttttaaagtttgttttttcattaattaactcaggagtaggctatttcatgtagtcatgaaatatatagatagattaaggtgaacaagttttagcttgttgtaatggcgcttatatgtaatctgaattgagtgcctgttaaattattctttctcctttcttagtacgttgtgctcatctttgacttctaaattggtttgtgaaccatttggtattatcaactatcaggaaggcctctaaarggggaaattggtggcttctactcagatatttcacatttatcttattccttatagccttactatcttcaaagcttacttacaaatacactcatttgtaaagagaggagtcatcagtatttgtaaaataattactgttggcttatattactctttaagtgattgaacttcattggaagaaagtctaagaatgcagagtggtaaaaggaagctggtttcctttttaaaaaagaaccctactgtggacacaggaattaactagaccagtgaatagggaagacaataatggtagcaacatgccaagatgattaaatgtggaaatatataaagacgtgaaaggtaatataatacccacaagaaatgggaaaaggtcaggttacttggaaaagtataaagacattgcacagtttggtcagaataagtacaataatatagacagccaccctctcaactgcctgtttaaaaaaaaaaaaaaggcttaaaaagtagaagtgccccatctgtgagttggaggtatatcagatgagcttcaagtaccctgatttgaatgcgtactctgatttgaatgcgtagtttcaatcaagtagtttgaatcaagtacgctgatttgaatgcgtagttctatccctttgtgaaaaagttcatgtattctctgagatgaacaggggacattttcagatatctctgtttctgattattattatttttatccatgccaggctttaaggtccttgagaaggattgtgattgtgtttatggtgtaaaggcatcaccaagcacatcacaggtgctcagaaaatatgaggttgtagaaccatgtgcacatttggacatccttctaaagtacattttattagttatttgttaaaaatgcatgttcacagaatgtgtgcctacttcaataagccatattatctgccttttccaaaagtggatatatccagaatgccagaatgagaagtcatgggcagacacaggaaaagagaaagataagtgtgggagagaagaaggtacaaccaaaagtaatgtggtcttagaggtctctgtgaaaatcagatccttatgcttataactatttgagacctgaaacaaagatttgcaaacttaacgtcttttgcaaacaacacattttctgaggtgaaaggggcattttcagatgtcactgtttctgtttattgtgcagaaaaaggcagacttagtaatttgattataaaattcatctctgataacctttgttttgtaccttatagtcagtgttaattgacttttaaaattgcttgtcagatattagttcaattttttaaaaaccttgtataataatacatctgcatactatatctgaaggaccaccaataaattataatttctggaacatatgcattccagcatcataaaaggatctgattattcagtactacctggttttattttgtcattaaacaatttttttgagcaatttactgtattagtccgttttcatgctgctgataaagacatacccaagtctgggcaatttacaaaggaaagaggtttgattggacttacagttccacgtggctggggaagcctcacaatcatggcagaaggcaaggaggagcaagtcacatcttacattgatggcagcaggcaaagagagagtttgtgcagagagactcccatttttcaaaaccatcagatctcatgagacttattcactatcacgagaacagcacgggaaagacctgcccccatgattcagttacttcccaccaggtccctcccacaacacatgggaattcaagatgaatttgggtggggacacagccaaaccatatcacttacaaacagaaaacttatgcttaagttgtttagtcagtttctgtgggcgggcatcaggaattagaaaaaagattcaaagataaggattgtacttctgtcacccatatggccttggggtacttgtcctctttgggtaactatctgtatgacattgaacaaagtacttagaatttccaggcattgatttctacgactgtaaaatgaggtaccaggttagatgatgggtatcctcaatattcttctattctgaaaagagtcttaaatttggatctagcttaggaaggtctaaatataatgttaaggcccctccgcactagactgtaagtttctggaaccaacttttaatctactctgtattcccaatgttctggggtaccttccacataagaggtacttaaccttttcttgaatgaataaataaagctggagaattaggcccacttgtccagaaaagcaaaaaaaagaagacattagttatctgtccacacctctaaataattggtgtaattaggaatagaccatgtctgctgcccagtagatacttgacattacatgaatccctgttgcttgcataatgaatggaatttcctccttacaacagtcctatgaaataactgttgttaatcccatttggaaatgaggaaaccaaggctttggaggatgaaataacttgtaagattctacatgtgatagaaaatgaagccaggattcaaaatcagagctttcttataacaaaatttttcatttagatgaacttaaactcaccctaaagcgtaaatgacttacggttcttcccagagaaaggttctgatgtgaggaggcatggtaagagcaagagggccatagatacctgaagtggaaaatgaccaagtgctggagggggaccgggactcagaagccacacttgccacccctctagagttgtccttgatccaaacattgacattacttgaaatatttagcaattttcttttcaagaaggtatggtgttaatatgaaaaaaaaagtatttgctgatgaaaaaaatttattgattgtagaagcattgtctgggagttggggcacctggataatagttctaatatctaaaacctatgagactttaagttattcagtagacctttctgctctgctgaaagtctaaatcagtgatttttcacaggtttatgaaagggatttcaatgactggtcagggctgggggataaagaggggactggaggagcaggaaagtattgcccaccaccgagaggagcatccagaagtccagaggactctgtggtctgtgccaagcccaggatttccccacaggagtgcctgtggtcgtataatggatgactccctgtcaccacaggttcaggtattgctgctttgtgggtgactcacttttgagcgatacttaccagatagttggtatgtcaacttttctctaaagatttatttaaatggaaagatgagttggtttaaaatcagtaataggtaatatttagtaagcacttactattgaagttattgttctaaggactagatatacagtaatttaacccccatgacactttgacacatgtgctattgttaccaccattttacagatgaaacgactgggcactgagagtagctgagcacattgatccagctcacgcagctattaagtggaatagctgggatgtgaatctaggcaacctggctctagaatctgctcttttaagttctatgctatgtggtgtctctatacatagataaaaatcctaagaaaggacttaaaggtaaaatctaaagaaaagcgttacgtatataagagtacatgcggaatatgcagaaatgacaaaaagtgataagtaaataactgaagtttgtaaatgtagctctggagcattgcctctggcaactcccagataaccctgaatttcagattccctggagaaagaagctaagggcctttgattgggcctgttgctcagctctgggtcactcaaccagggttggggagactgagggtcacatagaacagacatggcagctactacccactgtataatctcagtggggaagggagaggaagcatttcaagaaaaaagggaatcattatcagggtccctcaagaaggtgcccaccataatagtcaatggctaagtctgggctgatgtcagggcataagttagaattgtttttcttttctgaatcctggacatgaagtttatgtccttgttatttcagagacttatggagaagttatagatggtcaaaaaacaaatggtttctctttttgctttgaaagtaaaataactcatttaggagttatctaacacagttttaaatgtcatactctttgatcctgtaatttcacttgtacagatatgtcctacagaaataccctacatatgcacatggatatatgtatgaagatgttcggtgcagcagtgtttacaataatagagaataggacatgacctaaataktttttagtggggtctggagaatattgtggtacatccatactataaataaataaccatcattaaaaagaattaggtggttccatattttgtgacatagaaaagtcttcaaactaagtgaataaagcaagttgtagtaccatatgtatagtatgaacacatttttatggaaaaatgcatagcatttgttccatggttgtaaatgcatagcatttgctatatgtttataaacatatgttaaaaacatatagcaaaaatctgaaagaaaatrtgctaagctataaaagagataacttctggggaaggaagtagagtggaaggatgatgaacctagtggggacccagaggagacactgtatctctgtccaaagaaattgctatgattacacgtttgtcccctccaaaactcatgctgaaacttggtccccagtgtagcagtgttaggagatgggctgatgagaggtgattgaatcatggagctctcatgaatgttttattgtcattattgagggagtgggatgttgtaaagggagccaagcccattgtgctttccctctttagtactcactcccttgctcttctgcgatggartgacacagcacaaaggtcctcaccatatgccaacccctcaaccttggatttcccagcatccagaaccatgaactattctttataaattactcagtctgtgatactcaatttagtaacagaaaatggacttagacagaaatataattttaatctsctagtagccacactaaaaatgtaaaaggaaacaaatgaaattgattgtaatatttttaaactaaaatatcattttaacatgtaatcagtgtaaagcacttattattgagatattttaaattcttttttttttttttggtagtaagtttttacagcacatctgaattcagaccagctacaatgttttaagggcttagtagctacatgcagttgacggctatcatattgatatacttttatattattttaatttttttacaggaagagcatactctcatatgacttatatgatattttttaaagtaggccattmaataattgtgatgttttttaaagactccctaagtctttataggaaatattatccaagagagggaaagacatacaatctgaatgttaaatagaggaaagatttaakycaggcactgtggcttatgcctgtaatctcagcgtttagaaaggccgaggcaggaggatggtttgacaccaggagtttgaaaccagcctcggcaacatagtgagacctcatctctataaaaaaaattagccaggcatgatggcatgcacccgtggtcccagctattcaggaggctgaggtgggaggatcctttgagcccaggaatttgaggctgcagtaggctatgatcacactactgtaccactccagcctgggtaacagtgtaagactctgtctcaaaaaaaaaaaaagagggaaagtttaaaatgagatggcatttccaaatatctttttaaacaatcggatcctacaaaatactcttactaccgtgcatgataaattattttcagacttcagatctgcctataaaaattgtgaatagtctcattgaaggctaacttttctaaagaacagttttattgagaaatcatttacatatcacccatttttaagaatacaagtcaataatttttaatatatttacagagtcgtgcaactatcattactatctaattttagaacttttttattacctaaaaaataaaccttaagcccatatagagtcattacctacttgaacttttttttttttttttttttttttgagatagagtctcactgtcacccaggctggagtgcagtggcgtgatctcggctcactgcaacctccacctcccgagttcagtgcttcagcccagaccatgcctggctaatttttgtaattttagtagagatgaggtttcaccatgttggtcaagctggtctcaaactcttgacctcgtgatctgcctgcstcagcctcaaaaagtgctgggcttacaggtgtgagccaccaaacccagcctggactatttttttaaattttcattttaccttttcaagtgtttggaatttttaatgaaactaattataaatagcaacaatataaaataaaaatgtcaacatacttttactgaaaaaatattacagtctgtgataagatacccaccaacatatgtgttctccaaggtatataaatgacagctacagtaggtgtctgaaagtaatgcttgttttttgtttttgcaaatgaactgtaaattatttcaaaaaatggtaaagtgtttttagcactttaggtatccatatattaatataactttcaagcaagttactttgaatgggaaatacatagtttattcaccagaaaacaaactttattactctaaaatcacactgcacacaccgggcaattcttaatttcacaattcttctttagtgtgtgtttttgtttaggtccacaaaaactatagaaatgtttaaaaggctgccactgcttttcaaggaaaggagtaatatatacacacaaagtaatgaaaaagtccgcgaatcacaatttatatactataaaaagctatcttcatacattctttcaaatttcatcacttcacttaattgtaatgtggacttaatgtgtgttcactcggatgaaaatccatgagtgcttatttcaaatgaaacaagtgtgccatctacaaatttctctttcataggaaagtggtgcgggaagattaaaagatgattaaaagactcagggagtctttataggactccctgctgtgaatagtaaatgtcagtagttttctgttgggggggttaatgaataaatgatatgcctatgcccacctcaaattgctgtaaaacacatacatgtatgtatgtgtacatatgtgtgaatatgtgtttatgcacgtgtgtgtgtgtatacatacrctgcaaaccagtgttttttgttttttgttttkcaattgcaagatttgatagagtgaaaacagagctcccatacaacgggaagtgacccaaagggggttacccatccggctcaaatgcctaggtttatatcccgatcattgtccctccccctgtgctctcaggcaatagatgatctgactatttctttacctcctctttttagtctaattggtattttagtgagccctttttaccacctgatgggttgggtgtgagctgagttacaagccccgtgtttagaggtgggtgcggtctccttccccagctaggcttaggaattcttagttggcctaggaaatccagcttgtcctgtctctcagtccccctctcaacaggaaaacccaagtgctgttggagaggttggccgacgacctcttaactacttcctgctgaattggggcgtagtaggggtcgtgcagttgagatttcctcaggaggggtgccttcaatgtcatcaacatcasagcatgaactagcaggctggtccaggggtccacagtagatcttagtcatggactgcatctggggcttcatttgaagaacgatttgtagttttacagcttcgattctggaagagataaacttaacaaggaggttaaagatacagggattgaaatgtaggcctgaagtgcagggggaggcacatccaacagttagtagggttttgggccgagacttcatggagcccagtgagggtggtattaaataggcttaccaggtgagtatgggtatggagggtttcatgtagttttgagaggtctagtcctttgtaggggctaggggtgctatgtacctgagtcaattgggagattacttcctttacatgtttttctcttgcctgatcttgaactccacccccatcagacatactggtatgggtgaagtaaggtccaacagacagtggctccaagcccccaggacaactgggagtaattattttccctgtccaataatgagtatttgcttgcatgcaaagagtggcagagttatagcagttgcggggcatatggatgtgggggtgaaagtggggtttcatttagaaaaactcctatacaatggggcattaatatattcgggaagccgcattcttcatagaagctcttggtaaggggagctactggtagtacagcagcatggaggaggtgcagtgagtgtgaaagggggtaagagaacagtaaagagaaaaattatgacaagggagggccatggggatctacaattctagttactttcctcatggttgttgcttgaagagcaggtgcagatcctctagaggttcacaggaatagctagcgttgtctcctggattttcgggttcctttggaaaccagtgtatttttaaaaacattttttaacttttagtatcctgctaatctagcaaaataaagatagtgagatgcctgggttggatacaaagaccactgtggctctctgctttgaatgagataatgctcatctgtgagtgtatttaaaaaaagacacaactggaatttgaatttgggatctcaaaaaatgttctgagagggttttttttcttttaattctttatttggtatatgtttgtttctttttttttttttttttttttttttgagacagggtctcactttgtcacccagactggagtgtagtgatacgatctcagctcactgcagcttcaacctcccaggctcaggcgatcctcccacctcagccccataagtattaatagctgggactaccggcctgtgccatcacaccagctaatttttgtatttttagtagaaatggggttttgctatgttgcccaggctggtctcaaactcctgagctcaggcgattcgcctgcctcagcctcccaaagtgctaggattacagatgtgagccaccatgcctggtcctatttggtatatgtttcttgttaacttcatttgctatggaagagtgctcatttctttttactgcaattcagatcccatgggagatcaggccacctcttaggatgagaacatttaggtcttatggatttcaaactctttactaaaacctagccaactatgtatgtatgtatgcatctgtacaaacacatatgcctatatatacacacacatatatgcatacatacacatgcatatctatgcacacatgtatgtatataaagctacactatgtatataggtatatatacagttgccctcaatattcatggatcttggtcccaggatctcacttggataccaaaatccttggatgctcaagtccctgatataaaatggtatagtctctgatataaaatggttatatttgcatataaccactgtgcatcctcttgtatgcttcataycatcttcagattacttataatacctagtaaaatgtagatgctatgtaaatagttgttatactagattatttagggaataatgaccaggaaaaaagtctgctcgtgttcagtacaagtattttctgtcagtggttggttgaatccaggaatgtagaacccaccaataccaatggccaactatatgtgtttgtgtgtttcttttcattccttacctttctctcactttctgctacttcttctcaataggggattcatataatttgtagtgtgctttggaataataactgaatgcactatcccagttttccttctcatatctttttcacatcatactgattttatttatgatttgttttttaaaattttgtttctggctggggcagtggctcacacctgtaatctcaggactttgggaggccaaggcagaggatcacttgaggccaggagttcgagaccagcctggccaacatggcgaaaccctgtctctactaaaaatacaaaaattagctgggagtggtggcacacgcctataatcccagctactcgggtgtccgaggtacaagagttgctagaacctgggaggtggaggttgcagtgagcggagattgcgccattgcactccagcctgggcaacagagtgagactctgtcaaataaataaataaataaataaaattttgtttccaatataatcttcatctcaccttcatcctttcatgagccttaaattcattcccagccaggcacaggggctcatgcctgtaatcccaacactttgggaggccgaggcgggtggatcatgaggccaggagttcgagaccagcctggccaacatggtgaaacccagtctctactaaaatacaaaaattagccgggcatggtgacggacgcctgtaaccccagctactcgggaggctgaggcaggagaatggtgtgaacttgggaggcggaggttgcagggagccgagatcgcaccactgcactccagcctgggtggcaggagcaagactccgtctcaaaaaaaaaaaaaaattcactcccacctccaaaaatactgtttacatgttttccagatacttctgggagtattttttctaggaaaggagggatattgtatatgtaccctaagagcacttttaatagaggattatgaaaaagcaattcatatttactgaggcataaacattaaatctgagactgactgagatttgggaagcctttctgggaaacactggtcttttaattgtcactacccccatgtcatccactggttaggatggggtgtattcctttgtctatgcccatgtgagaggcccctgctgcagtgcccatctgatgttctgttaattcccttcccagatctagaccattgtaattgtttactctctatgcagtgctttgtggatggtggcagtcaagcactgaggggaaaataatttttcttgggatttccacttctcttacaacaccattaaatgtttcattttcgtatttttctctagtttcaaatttgtgatgaggtataaacatagtgttgaataacctttttttaaaccaggcattcttcaataacaatgcaaaaagtatttatggaatgtttactaagtatgcagtactctattttgggtaaaggatgaattgagttcagtgttttatttttttattttgttttattttatttatttttttgagatggagttttactcttgttgcccaggctggagtgcaatggcacaatcttggctcactgcaacctccgcctcctggattcaagtgattctcctgcctcagcctcctgagtagctgggattacaggctcctgccaccacgcccagctaattttttatatttttagtagagacgaggtttcactatattggccaggctggtctcaaactcctgacctcaggtgatccacccacctcagcctcccaaagtgctgggattacgggcgtgagccaccatgccccattgagtccagtgttttcaatcattatatacaaaaataaagagatataaggctgtgagaaaaataaatatttcatttttgacatctttcatactcatgcttcaaaggcatcatataaatgccttactcccttagtacgtaatgccagctctgtcatacacgtagtacacatgatctttcatactagacaaaggaaaggctcaggactattctcaccatgtgttagggtaggctaggttatgctgcagtgcaaatggccctgaagtctcaatgactcacaaaataaaggtccacttgttattcaggtgtcatatccatatcatccttactcctagactaaggctgatggagcagccctccatttggaacattactggtctcatgtcagaaaagagaccaggtgaaccacgamccagctttgcttagaaatgacatttttaactcacttctcattgacaaaagcaattcacatacccttacttgagtttaagagcatggagatgcataatcttcccacaggatgatggtggtggtggtattgaacatcagactatttaccaaaaagatatataatctgttatgtacctgttgtcattttttttctctaaaaaaaattattctagggtcactcccttctggcttttcataaggtcaaggaataaaagaccatttattgctgtagcgtgatgccaatcaaactttttccttctccccacccccatgttcttcccatcccaacatttacctggcaatttggtaaaatggaaggagcatggattcacaggtcacactggctgtgctggtcactcttggagtgacattaggcaaataacttgacctctctaaatctaagttatctccatataaaatcttaatgattctctctttatcaggttgttggaggtattacatgaaacagtctatataaagcacttagccaacgcgggggacacttcatccccacatcccctcctatttcctcacaagagtacttacctggttttcacagatacccacaagggaatatgtgggttgaattcagcgatcaatgaacttggatggaaaaatgattacatttttattttcaacataattggcatccttcataatcttatttatgttatgtgtttaaaaccatttttcttagtagaatccttaggtttcaccagattgccaaaggagtccacagtataacagatgttaagaacagaactggccaggcgcggtggctcacgcctgtaatcccagcactttgggaggctgaggcaggtggatcacctaaggtcaggagttcaagaccagcctggccaacatggcaaaaccccatctctactaaaaatacaaaaaaattagctgggcttggtggcgtgcgcctgtaatcccagctactcaggaggctggggcaggagaatcgcttgaaccccagtggggcagaggttgcagtgagccaagatcacgccacttcactccagcctgggtgaccaagcgagactccatctcaaaaaaaagaaaaaaagaacagaacccctgtgtctagtgacagactgtaaatgctacccacaattattccattatacaaaaaaaaattgtttctttagggaggcaatgaggtttgttagcagatgaattatattttacctcagcaaaagtattttagtccaaatctagccccattgcttattagtcataaggccctgggcaaatcagttaatatatctgaatttccattttcttatctgtaaaatagggctaataactatacttggtgaagattaaatgagatactatattttaaaaatcagaatatctgggacatagtatgttatgagttacgcattaagctgtacacttagtacctgccaatggcacctattgtctatggtttaaacatgcaggagaagcctagtacagagtgccatgagcctgcagtcctagctactcacgaggctgaggcaggaggatcacttgaggccagcagtttaagaccagcctggacaatatagaaagaccctgtctctaaaaaaaattttttttaattaaaaaaaaaattctgaggaatttctcaacttttatacatgaaaatacttggtgaagtatttggggggacatttaggatttgttcttgtgtctctagatacctaggttgattaggtagcagagcatgcaatctaattttaagcttctcactgtatagactatgccctgacactctttttcattggaaacagatctttgcccctttattcccaccttaccttcacatttcccagcctcagacacatttgatggcctaagtgaagcctgccaaggttccctctttggtccatcactgcctcttgttatttagctggagaggtctttgcagaatgacatttccctcctacagtgcttactgtgccccatttagcatgcagccttcacatttttcctaacccctgcttgctctctaaaggagagaaaacccaaacctcagcctcttgtgaagcaattcagaactcaatgcctggcagttggcgttggtcctgtcactaaactttaataatgattgagatcccccttattttgatccagtctccagtattcataggtaaaagcctgcttgtcttcttcatctgctatcacacatcttttcttctaccccttctaaaatcaaagtatgtatgcccactccagttcaccaaatatttttagctttctcatatgctgattttgctcagcagcattttctagtttactctctgggttgtcagtggactgtcatttctcccagtccagttgtgcctgaagcagttttcatagctaaatgacaaacccttgaagaaaggggtttgtaatgaaaatggaaactccagtgtgctctttgtaatcagttctttaatcctccacctgccagaccatggatacaattcgtaattatcagagcagagaactgaactcccgtaccgcggcagaaagcatgagcactatgggagggcaagtgataraatctgctctccagtggggagggggacagatattttggaaaactttgacacagaatgtgatgtatttgtataaccttttcatgtaaaactgtgctgcagtcagagagggggtctgggttttcttcattaaaagcttattaaagaaagaaataggacagtcgttttgcttcggtagatgggggtcagagaggcaggtctgatctcctcaggatattaatgtctgccttcagccaggggaaatgagccgtcacttgagttagaggcagctttatgtgctcatcactagggattcccatatgtccagggagctgcaacagtgaaaaatggcagagctcagtggtagagtacggagggctttcattggaattcatgtcaggaagctcagctcagtctgcccagagcaagtctgtttaatgttgatcagctgtccatctgataaaccgaattgatacgggtattccctccaagggctgccctgacagtgacagccgccgcacccagatgtcttgttaggcttttttggtagtctcaagtatttttaaccccttttgtgacatgcaaaccccaaagtacttttagaaacctagataaggatgcctagctaggctttctctctgctcctctggcagataagagccccacataactgtttctagaaaccagagattattattagttagctgcccctcctcctcctcataagcatctggttgacctgcaggataattatgtgttgacagtatcaagtgtatgtctcagttattcaaaacagcatttagaaaaatgttcttaaatatagtaagtcacctggcttggttattctttattaaagtactctcataggtgtgttcattgatcactaagcagagctttattatgttcatgcataaagagaccatgcaatacaaatttctttttggttggctaatttctagtgataaatatggtgactccttgctgagtcccaacatccctctgctctttcaagtatgactaccaccaccaaaggcatcttacttctttgtagattggctggcaggtatggagggagttaattacagaacacatcaatactgagttttcttttttggaaataaatcaagaggggaggaaatgaatgcaagtctttgtgttaagctgtgattattttaaaattatatttctgcaaaagtaccagtagttctaaattacagcactgaatatgggagaatttttgttttaaaggttttttttttttttaattgaagtactacttaaaagatttttgtctttatatttgtttttcttcacttttggaccttgtgttttcatggcatgcaagattctaacatagactgaagtatctaatctctttgaactgagaccagctgcagagactttttattttctgcttcttttctgtatactataacttagaatggtgggtgagcttttctaaaagagacacagagctctcagtaccctcagcaattgcttagtgtgtgtgctcagagctggaagtaaggcctggtcattttttccaacccttgaacctgtaacttgatcactacttggaggtcatctttattacggcctacagccttggcatttttcttttttcttttcttttttaaatagaaatgaggtctctctatgttgcccaggctggtctcaaaactcctgggctcaaacagtcctcccaccttggcctcccaaagtgttgggattacaggcatgagccaccgtgcccagctggcacttggcctctcatggttgagatttttcattttcctaccctatttttaaaaacagaattctaggctgtgcatggtgactcatacctgtaattccagcactctggaaggccaaggtgggaggatcacttgaggctaggagttcaagaccagcctgggcaacatagtgagaccccccccgtctctacttaaaaaaaaaaaaaaactaactaaaaattagctgggtatggtggcgygcacctgtaatcccagctactgaggaggttgaagtggaaggcttccttgagcccaggagtttgaggtcatattgaactacaataacactactgtactccagcctgggtgatagagtgagaccctgtctcaaaaaaaaaaaaaaattataaaataaaatcagaattctcatttcaaaatttaagaatgaaataagatgaattttgaatgatatactcatggccaaccccaaatacaaagttccattttaatttaagttatcaacatgaataaatgacaaaataggaaaatccttatgtttatctaattatcacaacttaaattgaatgactcttaggactttaagtctacttataaaaaattaatatttggcacttataattagttaaaggttatcatcacgaaagattcttttacccggcacaggtttacaaaagtatgtatgcttttccttttcattagcgctcacatgctttttttttttttaacggtttgagcttgatattattgaagcatgttttagaaatttttttgcttttctctgtttctccgtctgctcccaccctgattatttgccctgttctttgggactttggggagagataaaacacaaacaagtggggggaaaaaagctagtatgtcacatggcaataagagctatggaggggaaaaaaagcaggaagtagggatcgagaatgctgatgaggatgacagggttgctattgtaaatggcttgcccagggaaggccttatgtagagagaggtgcacttttgcagagacctcaagagggtgaatggctaagccttgtagatacataagccgagtgcagtccagatagaggaaagggcaaaggccctgaggcaagaataggcttggcatgtttaaggaataacaaagaagctagtgtcacagaagagagtgaatgagggggaaaagcaaagggaatgaagtcagagaggcggggggtggagaaattgtggcagattgtattagacttggagtccattatagggactggcttttaccaaagtaagtgagatagggaccactggagggttttgagcagaagagcaayggacctggtggtttcattttcctgcttgcctcgtttctgctaccgttttaccactccagcctcacatctaaaaagtatctttcatttatcctccatatttagtcacacagcaatactgcagttcttccatgagattattttgtatcactccccgtgtacctctgttgtcaccttagagttcacattctaatcatttcactcctaaattattagaaaagtagaaacaactttgtgatagttacagtttggcaaatcgtggtgtaaagaaataaacttcttacaaaactgttttaacagaataggtgtcctcattaagtcatcagctccttgtcactggaaatactaaaataggaccaggcatggtgcctcacacctgtaatcacgggccgaggcttaaggccaggagtttgagcctggactgggcaacaaagtgaaaccctgtctctacaaaaaacatttttwaaaaaaaaattagccaggcttagtggtgtgcacctatagtcccagctactcaggaggctgaggcgggaggattgcttgagcccaggagaagttgagtgactttccctaatgagcttgcactacttggcctcatgggctctttacaactagagttctctgaaattatgctgtggtagcctgatcttcttgacagtcatagtcatctctccccatgctccacatcctggattatactggcatattccatttctttttgtttttgagacagggtttcattctgtctcccaggctggagtgcagtggcatgatcttggctgactgcagcctcgacatcctaggctcaagtgatcctcccacctcaagcctcctgagtagctaggacaagggcacaccaccacgtccagctaatttttatattttttctagggatagtttcgccgtgttgcccaggctggtctcagattcctgggctcgagcaatccacccaccttgtcctcccacagtgcttggattataggcatgataggcatgagccactgcacctggcctccatttctttttctttctttctttttttttttttttgagacagagtctcgctctgttacccaggctggagtgcagtggcacgatatcggctcactacaacctctgcctcccgggttcaagcaattctcctgcctcagcctcctgagtagctgggattgcaggtgcctgctaccatgcccttctaatttttgtatttttagtagagatggggtttcaccatgttggccagactggtctcgaactgctgacctcaggtgatacgcccatcttggcctcccaaaatgctggtattacaggtgtgagccaccacgcccggcctccatttcttaaaatatcaatttcggccaggcgcggtgactcacgcctgtaatcccagcactttgggaggccgaggtgggcggatcacctgagaggtgaggtgagcagttcgagaccagcctggctaacatggtgaaaccccgtctctactaaaaatacaaaaaattagctgggcttggtggcggacacgtgtaatcccagctactcgggaggctgaggcagagaatcgcttgaatccggtaggcggaggttgcagtgagccgagatcgtaccactgcactccagcctgggcgacaaagcaagactctgtctcaaaaaaaaaaaaaaaaaaaaaaaacaatttcgtcccggcatcttcatattgtccagcccctccttaatgaccccatactgctctagaaaaacctaaactcgttgcttgctcttttcaaggccctcttcagtcacaagtccaatctcatctgtgctcctgtctgtattagatgggcttgtctgctactgtccaatgactatcccctacttccctccaaatctaaatctgtttaaacgtccaaaaataaaaaagtctattaaaaagttcataatctcagcatctgcatttcctgctccctgcctgtcctcttttcttccttctcattgtttttcctttttctccgaaaatcaacttgtgctcctcattcattcattcatataacaaagacttgagggcctaccaggcactgaactacacaatggagatagaataatggaaaaaacagacaaatattccagccctcatattttttttgcacttaccaacttttgaaggcgtagatttggccgtaccacattctttttactttctacttagtattgtactacattaatggacatttagcttgtttctaattatttgttgttaccaaactatgtaatgtacactattaaaaacaaacatgttggacggacatgttgtggctcatgcctgtaatcccagcactttgggaaaccgaggtgggaggattgcttcaggccaggagttggagaccagcctgctgacataggaaaaccccatctctaatttttattcttatttcactgtttttttgttctttagaggacaggatctcactctgtcgctcaggctggaatgcagtagtgcaatgctagctccctgcaaccttgaactcctgggttcaagctatcctcccacctcaggctccctaatagctgggactataggcacacgccacctcacccatctctaattttaaaatacaataaaaatttgggccaggcacagtggctcacgcctgtgatcccagcactttgggaggctgattcggtggatcacctgaggtcaggagttcaagaccagtctggtcaacatggtgaaaacctgtctctactaaaaatacaaaaattagccaggtgtggtggtrtatgcctgtaatcccagctacttgggaggctgaggcaggagaattgcttgaacccaggaagcaaaggttgcagtgagccgagattgcaccactgcactccagcctgggtgatagagtaagactccatctcaaaaaaaataaaatgaaaatttttaattaaaaaaatgtttatgtgggtatataaaattatgctgtttcagtagagtatcataggtcaagaggtatgcatatttttaatttttttagataccatacttttctaagtgattgtaccaacttaaggtccaatacagtagtatattcagggaaatttccctgtgagtggctaccttcaagggtcaggctgttcaagcgaatgtgaaaggtaaaggaagtggtggagactgtggcaagctgaagagcttggctccaaaggctttccaattcaatttagttttggaaatgctatttgccaaattgtatgtctgtgggctttatttggctcttggggcatcagtgtgagaccccaatttctaccttcaccaaaactgtatcttcttgatctttttcatttttgcaaagtcaatgaactaaaaatgttatttcattgttattgtaatactttcctttttttgttttgttttgttttttgagacggagtcttgctctgtcaccaggctggagtgcagtggcacaatctcggctcactgcaacctccacctcccgggttcaagccatcctcctgcctcagcctcccgggtagctgggactacaggcgcgtgccaccatgctcagctaattttttctatttttagtagaaccggggtttcaccatgttggccaggatggtctcgatcttttgacctcgtgatccaccttggcctctcaaagtgctgggattacaggtgtgagccaccgcacctggccactcctttctaaattattagtgaggttgagcatcattttacatactttttggccacttgtatttcttctggaattacctctttgtaccttttcccatgttgctattgtttctttaacttacttatttgggtaagcttcacatatattttaaatataaatcttttgtttattgtatttattgcaagtacttcaagtctgtatttgcctcattatttttatggtatattttattttattattttattatttttttgagatggagtctcactctgtcaaccaggctggagtgcagtggtgcaatctcagctcactgcaacctctgcctctcaggttcaagcaattctccagcctcagcctcccgagtagctgggattacaggcacccgccaccacaatcagcaaatttctgtatttttttagtagaggtggggtttcaccatgttggccaggctggtctcaaactcctgacctcaagtgatccacccacctcagcctcccaaagtgctgggattacaggtgttagccactgcgcccagcctatggtatattttagtattaaacttttttgtttattttaactcctcaaatttatcctttgttttcttttctttcctttttttttttttttttttattttattttgcgacgaagttttgctccttgactaggctccagcctagatcttggctcactgcaacctctgcctcctgggttcaagcaattttcccacctcagcctcctgagtagctgggattacaggcacccgccaccaagcccagctaattttcgtatttttagtagggacggggttttgccatgttggtcagggtagtctcgaattcctgacctcaggtgatccactcgccttggcctcccaaagtactgggattacaggcatgagccagtgcgcccagccccctatcctttgttttctttgtagcttcctgagttcctattctgttttgcaaaactatctcaccccatgtccataaggatgttttcctaaatttatagtgttgcttttcacagttagatggttaatccatttaaatatgtttttatctatggtgtaagatagggatctaacatttttttctcataaatgatagccaattgccccaatatcatttgtaagaataatccatcttttccctaatgatttgaattgttatttttatcgtaaataattattcatttgcatttgaatctctctctggattccatttcactaatctattagtctattcttgtgatatcatacttttttttccttcttcttcttcttcctcttcttcaaaatggggtcttattatgttccccaggcttgtcgcaaactcctgggctgaagcaatcctcctgcctcagcctcccaaagttctgagattacagatgtgagcctccacgcccagccatactatactttttaaaactgcagtaactttatagtaagatttaaaatctagaacggcagccctcttattttttttccaaagttttgtttttttgtaattttcaaatttattcttcccatatgaacataaaaatcagtttttcaattttaaaaacaaattttaggattcaagtaaaatgactttaaatggatgactcttgcctatcattttaatatttttagaaagaccctgaatttgcacatgttgtgtttgggatatttattagttttctattgatatgcaaagagcccaggctttagaaccagagtcctgggcttgaatccagctttgcagttaactagctgtgtgaacttgggcaagttacttagcctgtcagcctagctgccttctgtacggaagagataataaagcttacctcagagagctgttgtgagttgtatattattttgtttattaacctgttaattgagttatttttgcaaaaatatttttacatagtgttcagcatacagtaattgtctcagagtaatttagtaagtagttgccataatcactattaggcactttttaaaatagtgttttcgaagaatattcagatgaagtgacatatctggcatttacttcaaagtctgaaagaggaatgaagggtgtagctaaaacaaggttaactatggttaacaactcttttttttttttttttggagacgaagtctttctcttgtcctccaggctggagtgtgatggcgccatctcggctcactgtaacctcctcctcccgggttcaagtgattctcctgcctcagcctcctgagtagctgggattacaggcgcctgccaccacgccaggctaatttttgtatttttagtagagacggggtttcaccatgtttgccaggctggtctcgaactcctgacttcaggtgatccgcctgtgttggcctcccgaagtgctgggattacaggtgtgagccaccgcgcccagccagttaacaaattttaaagctggatgttgggtccacagatgttcttgatgcaatattttctacttttatatgtttgaaaattcccaaaattttaaaaaagcatatttaaaagctgttaaaaatgacaaagtgtaaatatttattatttctaagtggaagattatgtaaatattattctctgtacttttctgtatttttttaacctctcaaaaagaagagaggtaaggaagctagtgagagagaaagaaggctccattgtctttttatctcccttgtccgtatagcgaaacacaattcttctcctattttatttttatttatttatttatttttattttattattattatttttgaaacagagttttgctcttgttgcccaggctggagtgcaatggcaccatctaggctcatggcaacctccacctcctggattgaagctattctcctgcctcagtaactgagatcagaggcatgagccaccatgcctggctaatttttttgtatttttagtagagatggagtttctccctgttggtcaggctggtctcaaactcctgacctcaggtgattcgcctgccttggcctcccaaagtgctgggattacaggcgtgagccaccacacccgtcctatttttatttatttatttatttattttttgagatggagtttcactcttgttgcccaggctggagtgccatggcgcgatctcagctcaccacaacctctgcctcctgggttcaagtgattcttctgcctcagcctcccaagtagctggaatcacagatgtgcaacaccacgcccagctaattttgtatttttagtagagacagggtttctccaagttggtcaggctggtgtcgaactcccaacctccagtgatctgcccacctcagcctcccaaagtactggaattacaggcgtgagccaccgcgcccagacaattcttctcctattttaacatcaacttaaatgcagaacatttgaagagatttcaggttattataaggaacgattctggtgggtttttttctttttttcttttttctttttaagagacagggtctcactctgtcgcccaggctggagtgcggtgttgcaaacacagcccaccgtagcctcaacttcctgggctcaagcaaccctcctgcctcagcctcccaagtagcttagaatcacaggcacacaccaccatacctggctaatttttttcttttcatttttcattgagatgaggtctccctatgttgcccaggctggtcttgaactcctgggcgaagcaatcctccccgccttggcctcctaaagtgttgggattacaagtgtgagccaccacacccagccaaactgtttatcagtctgggtacggtggctcacagctgtttccctagcactttgggaggctgagatggaaggattgcttcagcttagaagttcgagaccagcctgggcaacatagggagacccctgtctctacaaaaaaaaaaaattcttctttttttttttttttttgagacggagtcttgttctgttgcccaggcagaagtgcaatggcacgaactcagctcactgcaagctccgcctcccaggttcacgccattctcctgcctcagcctcctgagtagctgggactacaggcacctgccaccctgcctggtaaatgttttgtatttttttttagtagagtcggggtttcaccctgttagccaggatggcctcaatctcctgacttcgtgatccacccgcctcggcctcccaaagtgctgggattacaggcatgaaccacggcgcccggccccaaaaaataattaaaaaaaaaaagcagccaggtatggtggtatgtgcctgtagtcctagccactcaggaggctgagacaggaggatcacttgagcccaggaatttgaggttacagtgagccatggtcacgccactgtactccagcctgggctacagagtgagaccctgtttctaaaaataaaaactgttcatcagctgacatggctcctgtgaagtagttaccactaatccctgtatggggatacatagagactaactgacctctggggtcacttccaactctgattctataaaccctactttttagtttatgtcattccttcccttttgaaactaagaatgatagtgatgccctatagcctttatamattaatggtggctgggtgcagtggctcacacctctaatcccagcactttaggaggccaaggckggtggatcacctgaggtcagcggttcgagaccagcctggccaacatggcgaaaccccatctctactaaaaatacaaaaattagccaggtattgtggcacatgcctgtaatcccaaatactagggaggctgaggcagaaaaattgcttgaacccagggggtggaggtttcagtgagctgaggtcacaccactgcactccagcctgggtgacggagcaagactctgtctcaaaaaaataaataaataaataaataaattgctaagtaaagagttgttcatttaacagatatttataggcagcctagggaagtaggatagtataatttacagtgtcgtgagggaagggggtggcagggagagagatagctaaagaaataattacagtcaagtcaatacaagactgagccatattcaaaggctttcatgcacagaagaaagagttctaactctgggaaagttaaagaagttacacatggtctgattattaaaaagtctttagacaaaaaataatattgatcacaaaccctttagccccaaaagttgtatggtactttcatacagtggacctcagtagcgatgttaaatagaaaaaggagatcctctacttctaaatgatacaggactgtctctgagagataatgttaggtgaataaaaccagagtgcagaattatgaacatgagatgtctattatttttgtcacaatttttattgactataacttctcagaatgtatttggctgcatataacaagactctaacaagacttacaacaagactctaacaaacagtgacttgaaagagtgcagtgtttatctcagataacaagaagtctagaggtggacacatcagagctgatgcagccctcaagtcagcaggggctcaaaattctttttgctctaccaggcttaaagagggttaaacctctttaggagggcccccaaccctctttaggaggtttagagggttgggagccctctttaggatccttaagtctctactgtgcctccaggcagctgggccatattccagtcagggaacatgggtaagcccaaaatatcaaaggtatacaccaactgaatctgttcccttatatcaggaactcagtaaatttctcagaaaccccacctggtagactagtgcttacatttcattggccagactgtgtcacatgatcacatctagctgaaggggatcatgaggaggtaaggtttttaagtgaggaccattgccactccaaatgtagtcaagagtatgtacttttctgtatatttttaacctctcaaaaagaataaagggaaggaaagaagatagagagaaagcaggctccgttgtcttttatctcccttgtctgcgtggcaaaacacaattaactctgctattttaacatcaacttaaaygcaaaacatttgaagagatttcaagttattataagtaacaatttgggttgtttgtttgtttgtttgtttgttgagacagggtctctgttgcccaggctggagtgcagtggcgcaaacacaggaatgaatggataggcaaatattaatagcaatgtctgccaccctgatttctgaagcttaggatgctaaaaaaatttgagaagctttggaggaaaatggacagatcaaaagcagatgaaattttttaacatataatggaaagaaagtgatttggtgaaaaatcttgtaaaaacatttattaatctttcaatatggtaattactttcttactctgattacttaacataagttgtatttatttgtgactgttttctaatcaagagttagcatgagggcccagcatagtggcttaggcctgtaatcccagcactttgggaggccgaggtgggtggatcagttgaggtcaggagtttaagaccagcctggccaacatggtgaaaccctgtctctactaaaaatacaaaaaacttagctggacatcatggcgcatgcctgtaatcctagctactcgggaggctgacgcatgagaattgcttgaacctgggaggcagaggttgcagtgagccgagatcacgttactgcactccagcctgggtgacagagcaagactccatctcaaaaaaaagagttagcatgagaaatattcaagagtactaaaatatatgtacataaatcggcatgaagacttttatttaagataattttttaaaaatccagtgcattgaaagtttaatagattgctttgggtagctaaaataggaataagatcaccagaagaaatttttctcaaattttttcatactgtcaatgcttctctgacatatactaaattgtactcttacaaaatatgatccagagttacttatctggtgataaaatcttagaatctgagagcacagtactagagagtgaaattacaggatagatttaaagacgaccagtcatttcactcctatttcctatagaaaaataggtaccaataatagtaatcatttttttaaatctttttaactattaactgccagtttagataactctttttttaaaaaaatccctgaatcttataatttggggactggaagggatgtgttgctccagtccccctcctttcagggacaagaagaccacgggtctgatttaagggatttgcccatgaattgtcttatgtaataagcagaagtagaactgttatccagattcctgattaggctaaaactattgatttcatcctggtgaattcaaacaacttgaccttccccagttactgtaaacaaaaagaattaagcctgttcttaatatacttttttcctagcaacattcccttccctgttgcttcaaaactagggataaaaattggacaaatttgtggcatatatcagtgatggtaacattgataactttggcttattccccctccccaacgatctactattccttaggtaaataaacatttatttttatttttatttttattttgagacagagtttcactctgttgcccaggctggagtgcagtggtgtgatctcggctcactgcaacctccgcctcccgggttgaagcgattctcctgcctcagtctccaaatagctgggattacagacatgcgccaccatgtccagccaatttttgtatttttagtagagatggggtttcaccatgttggccaggctgctcttgaactcccgacctcaagtggtccacctgcctcagcctcccaaagtgctgggattacaggcgtgagcccagctagatgttttaaattgtcatttgttactatgacaaggtggctctgagttccagctttgccttgtataaactcagtgttcttgatcaagtatttaacctctgcagacctctgtaattagaatcacaagtagataatataaatgaaaggtttttttaaatggcagaccctgtaaaaatgatgggctttcacttttattattgcataccattgtttttgttgtttctggtcatgtggcatttaaaagtttctatttatttaatgaatgctgttttatgactatagatgtcaaaatcactcattttcatcctttgagtaattcaaaacaccacaactttttgcttacctggttattactttctttcataaactgaactgcatgaaaaacttgtccaaatgcttaacgctttttacttttatacttgcccataatctcattatgtgatttttgtgaaatgtgataatgcggacttttttcagtgaatggttttgtaaactagaaatcattcgcaggatagtaataaaatacaattttattcctttcttttagtcactttttaaacggtaattttaaatgttctactttaaaaaaatgtcttctgttaacttttcaactgtcttataagtctccattcttagtgattttctttgggatataatgagattttaatctaaaccatgaatttactcttagatactatttgactcactggttcatttcctttctctactccccaaatttgtaatcaagtacaatatgtctactgggtcatctttacatattctcttaatttttttaacaaaggaaatcaattagacatgagattttccttggcatttgataatgccaatttgttcttttaattgtatctttatgtgattattatagatgttaaaccattctgttttttttaagaggagtctcatatattatttgatgattttatatttatttatttatttatttattttatttattcatttatttttgagacagagtcttgctctgtcatccaggctagagtgcagtggtgcaatctcagctaactgcaacctctgccttccgggttcaagtgattctccttgcctctgcctcccaagtagctcccaaaaattagtcaggcacccgccaacacgcctggctaatttttgtatttttagtagagacggggtttcaccatgttggccaggttggtttcgaactccttacctcaggtgatccacccgccttggcctcccatagtgcagggattacaggcctgagccaccgcgcctggcctgattattctatatttatttctctccatgtctaaggcggtgtcctaggtcaagcccttttgttgcatcttccttggacctttgtaatagctcccccaccccatatccctactttccctacatactttttaagatttttctatgtatcacctttggaatcttcttcctaaattattaaaaaatatatatcatcctttcatctcaaaatattgcatgtgtaaaatatagaccatttcacctgctataaccaagctccaaaattcttatctctcacttatccacacagtccctttactgtagccaaactgatcttttcaacctttggtcacgttttctactcttgccttctctgtgtcatgatgtgtagtctttcttattctggggttcccaagccctactcttgttttgtcctttttctccagctatggaaatcttacttgcctttccaggccccgctcaaatttagcttcttcaaggaaacttttttaaagcttttgtgacacagatgaggtctacagaaaaaaaggaaagatagaagctttcaatgggcacatgtggaaggcagcctaatctagtagaaatagattggggattggagtctctgttagttatctattgtgtaacaaactactccaaaccttggtggcttaaaacaataaccaacttatttctcataattctgttgtttggctggactgttcctttgctggtttctcctgtatttatttatgtgtctgtgtttacctggtaaatgtgcagggggctgggcttgactgggacagctggacctttctccatgttgcctttcattctctaagaggctagattaggtttcttaacttgtagtctcaggttagcattcaaagagtgtaagccccaatgcaaaaacatttatcaagcctgtttgtccctcatttgccgatgtcccattgaccaaacaagtcatatggtcaaactcagcatcaatcaaggagatcatacatggcttggatatcagagggtgtgactgataagtgtaacttggtgtaacactctgccacagtttgccctctggccccaatatttcacattccttccatatgcaaaacagaccacctcccaagaccccagtctcatccattttatgacatcaagctcagagtccctgatctcatgatttctgttaggtctcgatatggatgtggctccatgggtgcagcccctcttcagtcagggacctaggaactaaaaggacaagttatccaccctccccccaaccacacaccaccgtctatccaacatgcaacagtgaatcagaaagaagataaccacagttgtcacttccattaaaaagagggagaaatgggaggtacatagcagtcactagtctgtagcaattctgaaatccagctgggcatatatctgggccacctactgtatcttggagcaaggaatgtttcttgattagggctcagttctattccctggaaatggttctcgaatccactcttctccattgttcttggctctaccttctgagcttccttttcttttcttttcttttctttccttttttttttttttttttttgagatagggtctcactctgtgctaggctagagtgcaatagtgcagtcagttcactataactttgaactcctgagctcaggtgatgtcccacctcagcctcccaagtaactgggactacaggcgtgcaccctctcaccaagctaatttttattttttaattttttgtagagatagggtctcactatgttgcctgaactgatgttgaactcctggcctcaagcagtcctgccacctgggcctcccaaagttctgagattacaggcatgagccactgcacctggcctattttcccttttcagtaagatacagtttatacttgcagctgagtagctttccagcttccactaagagtttgccattccttcagcctttgcctcctagcctcatttttctgactcaaagcaaacactccacttatagatataccatttctgtatcagatatctgttgctacatagcaaatcacccatatagtttagtgacttgaaacaacttaccattctgtggattgacgtgagtgttcttctgcttggggtcatgcaacrcctgtgactgtgaaaagcttatcagttgcataggcacttatcaggctttccttgtgtactgtttgttgatgtcctattggccaaagcaagtcacatggccaggcatggaaggggatcatgcaggagcttggaaaccaaaagacatgactcacatggggccatttgtagcagataccaacagattttcaggtctacattactgtgtactcttgggaaaatcattttacttgtgtgcacaattttttcacctattaaaagacgttaataatacctatcatgaagttgtgataatgtttaaatttttagtaattacctgttgattttttctgactataaaagtaatacttttgtcattgtacaaaatagacaaactacagaaaagtataaaaaaggaacaaacatctgctgaaattcccgtgtaataaatatagttctatactacaagctcctcaggggccttctctatattatttgctactataggtttctctcttcattcttattctgaaagttaaaaagtccttgaaggaagaaaccatattgtattcatctctgtaaaccccatagctttgcatttatgattaaaagagataatgtagctaggagcagtggctcacacctgttattccagcactttgggtgtccgaggcaggtagatcacctgagctcaggagttcaagaccagcctgggtaacatggcaaaaccccatctctaccaaaaatacaaaagttagccaggcttggtgtcgcacacctgtagtcccagctactcgggaggctgaagtgggaagattatttgagcctgggaggtggaggttgcagtgggctgagattgcacccctgcactcaaacctgggtgacagagtgagaccccatctaaacaaaaaaaaaaaaaaaaaaagagagagagataatgtatgtaatgcccttagactagtatctggcacagattatattctcacttaaattggaattccattagacactactaaggagtcttagaaattttgaagttatgagcgtgaggaaagtataccaagagcacagtatctaaatggagctgtggaaggtggccctccactggtcaacttctgtctgggatatcctagtgacttgtggggaagagtgaggagtattacagagaaggaaggtgtcaacatcttacagatcccaaactgctcagtagagagacctctatttaaagattcattagaaagatataatccaaaaaaaaaagtggggggcaacctatggaatattttattgttgaaaactgaaatcagacattagtgatawaatggtgttcttgatattctaacaaatcttacctttatgttttagtcaaagaagtttggcagagatcacggagctaattcatattgctctccttgtacatcgtgggatagtaaatttaaatgagttgcaatcatctgatggtccactgaaagacatgcaatttggmaataaaattgctatcctgagtggagactttcttctagcaaatgcctgcaatggactagctctgctacagaacaccaaggtaaaattgggcagggttttgttgtacctgaatggcttcaggtagcaattagttggctgctggagctgcaggtctgtgtgcccggctgccccaactcccctcatgtacatgctcagtaaacagtaaaactgtgatgaacataatgatggcagtgttagtaccaggcaaagtgtaaatgctaggaaagagttttgagagtaattttttttctgattatggatgaaattattaattataggatagggttaaatcttcaaaacaaagaaaatgtaagtaaatattacctataatcccactatccagagataatcactgctggttaatatcttgatgtatttccttgtagtctttttttgttgttcattaatgcctttatatatgtaattttttgtaatatatatgagaacttgctatgtataaggttttttaatcctgcctattttttcttacataatattatgrtgcgagcatcttcccatggttataactttttctataatatccagtcacttagatataataccacttgtttatcagattcctcattgttggacatttaggttgcttcttatttttactatcataagtagatcttcagtaaagatctttgcatatcaattttccctattccagattatttctttaagataaagacctagaagtggttcaaagggttaaacatttttagtgttttttttttccttttgttatagagacatggtctcactgtatcacccaggttaaaggccaggtgtggtggctcactcctgtaatcccagcactttgggaggccgaggcaggtggatcacctgaggtcaggagttcgagaccagtctagccaacatggtgaaaccccgtctctactaaaaataaaaaattaactgggcgtggtggcgcgtgcctataatcccagctacttgggaagctgaggcaggagaatcgcttgaacccgggaggcagaggttgcagtgagccaagatcatgccactgcactccagcctggtaggttgaagtgagctgagattgtgccaccgcactccagcctgggcgacagagtgatactccatctcaaaaataaaaataaaaataaaaaaaataaataaagtgcagtagcataatcatagcttactgcagcctcaaactcctgggctcaagcgatctcttacctcagcctcctgagtagctggctggctaatttttaaattttttatagagacagagtctcactgtgttgcccaggctagtcttgaactcctggcctcaaacgatcctcccacctcaacctcccaaagtgctgggattaaggcatgagccaccacgcctggccacatttttagtattcttgatacatattgccaatctgctttctggaaaggttataaaggtatttcttgttatatcagttaggattaggtttgattataagataacagtgccctataagataggaatgtattttttctctcatgtaaaatcatctaggagtaggcagtcaaaagttggtatagtgagtctgcaaagtcagggatccaggctccttctgtcttactgttttgccatccttatcttaccacatcatggcccgaggcatttgccattatggcttccctccagtcaatagaacgaggaaggacaaaaaaagggcagatctccttcctttgaaggttggatcagtgtacatcctagtttgctaaaggagagtctcagtgtaagccagctatcctgggatcccatctgatttagcatttatcctgaatttttcattttttaacagagaattattactaataattatattagaataagctgggatgaatttggtagatccccacttagtacttccagcctctgtttttgtttttgtgtaatgtaatgtaatagtattctgagacccttacacagtggagagagttctcattatcagttgtccttttttttttttttgtttctttttttttaatgtttcttttttgagacagggtcttactctgtaacctaggctggagtgcagtggcgtgatcactgcagcctcaacctccctggttgaagcaatcctcctacctcagtgtcccaagtagctgggaccacaggtgcatacagccatacctggctaattttttgtatttttttttagagacgggcttttgcctttcgccatgttgcccaggctggtcttgaactcctgggctcacgaaatcctcctgtgttggcctcccaaagtgctgggattacaggcatgagccactgtgcccagcttcattttaagttgttaggaaatctgaaagataccagaaataacttacctcttttcccagccctttcagacacaactaacacttcccaatcaaggacagaatgcagggcaattgctaatacagtaaagtgcactcagacacaaatgtctaggggcagctaactctttcctgtatcaggtggtgggagaagctggctgtgtagtgtgtcacccaattgtactgtagcccatgcatggcctgcaagagtcacaaagctgccagataccagttgataagttcagtgggaaacagtaaattataggtttgggtgtctgtaaaatatatatgggaaatcaaggctgatcagctctgctagggagcaagtagagtgtagaatgagcacacttgcttgtacagtgtaaatctataactattttattgcttggcaatactttgtttttgcaataaatccttttggcagcagtaaactgaaaaaactagaagtatgtgtttcatttttttaagtattgattttttttcttaagaaagttaataaggaatgtatattaataacttgaacaaaatgtttgttgacatttaccaaccactgtggaggccatagtggtatctatcaytgaccacatgaaaacaagaagagtaaagtctgctgaagaagtgtcaggatctactttatgcagttgcagaaggtatatatgcatacgactctgcaacataacttatatttagagaaatgactatgctaagtgattgcactgattatcaactacaagtgtttatgtgtatataggaaaagggaagcaatagttcttttgcatcattgtcagtagaagaactttgaaagcagttaaataattccagttttagttcagtgtcatcaggtatttcaagtaagtaaatcatttaagttaattctacaaatggtttggtttttttctttccattcattcatgggattaaggtaaagtttttggaagtatattctattaaacataaagcctttgtgagtgagattggaaattcagtttaaaagttcaatatagaaaataaaattattagtttatagtaacaatagaagtacaaattttggtgaagcacagtgttgtggtaaaaacaatgtttttactacgttaagcaacctgtggagtagttgacattggttgtggcacacacacaattgatcattacatctaaacaagcaccaaaagtcttctattttaatagaagctattgttacatcaaaatttacaaatatctgaatagtcacagtcactgaactatatgatttgggagttgtaactgatgtcagataaaaaatacacttcaggccaggcacggtggatgtcagatgaaaaatacacttcaggccaggcacggtggctcatgcctgtaatcccagcactttcggaggctgaggcgagtgaatcacctgaggtcaggagttcgagaccagcctgaccaagatggtgaaatcccgtctctactaaaaatgcaaagaacattagccgagtgtggtggcacatgcctgtaatcccagctacttgggaggctgaggcacgagaatcgctcgaacctgggtggtggaggttgcagtgagccaagatcacgccattgcactccggcctgggcaacaagagcgaatctcggtctcaaaaaaaaaataataataatacacttcagcagagcagtatgtgccttttctctttgttgtctgtcgttgatcagattttagaaatctttataaatcaatctgtgcccccaacagtggtattgaactttattctaaatgggtcatcaaaagtttggtggcatttgggcacggtggctcacgcctgtatttccagcactttgggaggctaaggcaggcggatcacttgaggtcaggagtctgagaccagcctggcaaacatagtgaaaccccgtctctactgaaaatacaaaaattagccagaggtggtggtgcatgcctgtgattccagctactcaggagtctgaggcacaagaatcacttgaacccaggaggtggaggtttcagttcagtgagcccagatcacgccactgtactccagcctgggtgacagggtgaaactctgtgtcaaaaaatactactactactactactaataataattggcagcatttcgttcaacatcacttgagaatcttaaatcaagtattcaataaacagaacactacatgagacttttagggaattacaattaatgaaaacaaaacaaaacttccattagaatttttcctgacaaaagcaaagaaggaatgatataaacagtaacaactcaaacgatatacaagattaaaattttcagttctgtagttgcgatttgaaatgtctcaccttgcaggaagaatcttggtggtgctcctactttgaataaattgcacacacacacacacacacacacacacacacacacacacacagacacacgaaatgagattgagaaggcctagattttgcaccatctaaatttggcaaaacattgaaaagaatcatagagacaacttatttgacaagttttgtcttataaaaatatttgttaggccaggtgcagtggctcacgcttataatcccagcactttgggaggttgaggcaggcagatcacctgaggtcgggagttcgagaccagcctgaccaacatgatgaaaccctgaaattatcagggcatggtggtgcatgcctgtaatcccagctacttgggaggctgaggcaggagaatcgcttgaacccaggaggctgaggtcacagtgagccgagatcgcaccactgcactccagcctgggcaacaagagcgaaactccgtatggaaaaaaaaaaaaaatactatttgttaaagtaagatactctgatggaagcaaaaagagagtgcctctaaaaatatttgggctgaaatatttatactgttcaacatttttaaaattagaattatgtcctccatttagcaaatttactctgaacttatcaggtaacttagaacctgtagaaagagaattttctccataattgaaagtatcagtaatttcaaactaaccataaactgcaactgtgaagaatattgcgggcagttttatttttaaatactgtattttaatgaacacattcttcagaaaaatgccagtgacacaatattagagacagatatgtctaagaaatggattaaactatgtagatatacatcaataataattctcattatttttaaatattcagataatcagtataaagaagttattgttctattgtatgtacatgtatgttatttttatttcttttgaaattttatttttgaaaacagtttttgaatagaacctgttgagtccaccaatataataaaatcagctgtttgtttttgaaataaatacatatttatttcaatataataaaatcagctgtttgtttttgaaataaatacatatttcaaaaagtataaaattttagttgtttcagcgcttctttttactcttgtgtcccagtttgcatgataaattatatagtattcacactttaaagacatttctcataagttatatgagatttttctgcttacatcctgttgaccagaatttaattatatagccatacctagctgtaagggaagctagaaaatgtaatttttattgtaggtcatcatggatccagccaaaaatctggaagatacagataaaagatactaggagacaagtaacattctgccctaccttctcatcatgtgtttgcatttttggctagcacatatactcatgaggtagacctgcggaatttaagggagaaagtagtatggtacctttaatatctaatttatattcatatttttttaaaagctaaagtaaaaaatgaattgatcctattaagcagactattagagaatcttggtcaggcatggtggctcatgcctatcatcccagtactttgggagatggaggtgggaggatagcttgagcccaggagttggagaccagcctgggcaacatagcaagaccctgtctctacagaaaaaaaaaacaaaaaacaaaaaacaggcatggtggtgcatgctgttagtcctagctactcagcaggctgaggtggtaggatttcttgagcttaggagttggagactgcattgagctatgaatgcaccactgtttctctagcctgggcaatagagcccctgtctcaaaaaaaaaaaaaaaaaagaaagagaatctgatgtctctctccaattctattttatttcatctcaaatgtctctctcctttatgcatatagtatactttgacgggtcccactaaattctctccttcactggaattcacatgttaacagaaggtgagtggttctttgcccctgggactcacaaactgtatcatccatctctccttttcaccatatttgcagtggtctgtgataaaacttagcccttgtttagagaagaaagaggcctcagaaagtgcagatctgacatagtgtctggacaccttgagctgcacatgaccagctctagcttcacaggctggccgttcatggattagacctacaaagctgaggggaggagatattctggaccttgatagtacctaggtccacattttggtaatttgcctcggtatagttgccaccttagaaaaccaagactcgttgcctttggacaaatttctatttgttttctgtaatcatttgttttaactttgaactattctgatgaaatcttacataaggttcaaacggtggtattgtatacaaacataatcatgttaaatgatacaaacaaataatcacttgtttaaactgcttccctttatgggactaatatttaacatgttcctttttcttaactagcttgtgtcagtcacacatgctttttttcaatgtggttcaagtacagtgaaaatggaagctttactcccatcaaaatcaaatcagattcacagcctgtgaaatccactcttggtgttttgcattcagaagcatcactataaatgttccagagtctaagacctccaccatctgctccattaggcactggatttcagtagcactacttgatttagaaaaagaaaaagaaaaacttagcatatccaagcaactattcagcctgaagcttcttgaaataagaatgatctggcatttccttccccttcagtgagcctcataacttcatggtctctgcacaggtttacacctttaaatttgcattttatcaacctttctctggtgaggaattttttcctttttaggctatgatatgtttttttctgaatttgatagttgtatgttgaattgaaggctttattctgtgcagccctcctgttaatctcaaacgtgaatcttttgcaccttgttcttcaaagggtcattgaaggctctaccaggtcaatttcagaaaaaaaaaaaaaaatgcctcaggggttcactttttgtgaaagaccttaagaaccatgcccagggtctgtaattgatcttctccaaatcaaggcttttagtagctctcttttaatcgtaatagatgatttccaaatcaggtgaacagtattttaaactgaggagattgtgaattactaaagttcttgaaagtcaggaattccctctgataaagcaaatctcccatattcagagccagtttctttcatttaaatacttggcaatattttcatcagaataatttaaggaaagtgaagttatatctcagaagaggacttattttatcaaatgagctcccagaagcttaagttgattaagtataatagtaactatggtttttttagaaggaggaggtggcgataaatatttctttgaagtagtagtgtagtaagttttttgcgttttgtttgtttgtttgtttgtttgagacagttttgctcttgttgcccaggctggagtgcagtggcacgatcttggctcactgcaacctccgcctctcgggttcaagtgattctcctgccacagcctctcaagtagctgggattacaggtgcccaccaccacatctggctaatttttgtatttttagtagatgtgtttttgccatgttgggcagcctggtcttgaactcctaacctcaggtgatccacctgcctcagcctcccaaggtgctaggattacaggcgtgagccacygcacctggccaagttttcttatctctacatatgcttaatgtcttggtaaagttagattctatttaatgatgttttagttttcttttataagaaagaaaatttgtcaacaatagcaacataaatagataccacagcaagaggaaacaggcaaaacttaatacagaatttctgtttataatatgtcactgttttttcacagtgacagcctgctttttctttgaggatgtatattggtaattaaagttggcatatttgtaacaactttaattttttatgacttattcattctaccaatttctcattttcttgtgctactggattcttgtctgaatttctatatgatgtgtttatctctgtacttctcatggggcaggccattagatgaagggttctgcagtcaaatgaaattcagagctgttttataattgccaagggtaaaattagcagagtcaattattttccctttggcttttccctgaagatattaggggtcttcaaggtaattgccttaggtaacacttagatttttaaatatcttcaagtatagaaattgtttattaatcctctggtaattgtcttcttaccattatagctgtagtcacataaatgcaaattaacaagattttgaattcaagagggaatttaaaaattaatgcttgggttttcattcattttcaattatggaacataagggcaagtttttattttagtacttcactgtacaaagacctggactaaaagacctcagaatgcctctttttaaatcataaatttcctgattccattgggataagttgctctatattgtgtccatgtagaacatcactggatgctgtagtgatgtggtcatgccagaatctaaaattttagtgtttgagcagcaagctatcagtgagacatgctaactaattggaagggaaatcatgaagtggagaagtactataatttcgaaatctagctggccattaacaggcttcctctggtctttgtatttatttagactgggtttgtatttaggattaagccacagtgcaaataagactgtgtggattactacctgtcatcttgtttttgaaaagtcttttactttacatatataatgataagcctagtatttaaagaatggaatttatcacgttatttttttttctttgtagtcattttcatttaatggacctattgctatatatcagatgggagactgtgagtcagcctggatcttgtctaaacacccaagagcattgtcatgatgtcactcctggaggttgttctattaagcattagtgatttatacttccggataaccagtggcacagatgtactctttacatagctgatgtatttccttatgttaactttgttttcctaaaggcgtaaatatgttgtttaaaatgaagtattttgtttgtacaaatatgctcaatttatgcatataaatctccctttacaccatctatatagtttaataaagatgctattgtctatttgtgtttgtcttatctgttatagtaattttacttccaaattcatgttaaattgaaacctaaaaacatgtattaagtttttccctgtcttatgcatttaaaataggcattattatgatagtgtttatagttttgcttgcactattttacttgtggaaattatttaatatcttttaggctctttagtttgacacccaaggttaatattttttatacatgtaacccactcaagtgtagatttgcatgactagggtaaagggatgcagaaggtggtaagtggggtgtcatatagtataacagtaaaagagactatctccatatcaattaattagaaaagtcaaaatgccatcataaaattatttcagaatcccaaaattagcttcttcagtttttttctgatttgctaatatagtcacatattaaacagagactgtatccattttctggtcatgcttccttgatctttaaagtgaaagtaataaatgattagtgtgtgcaaattatactagaaataagacgaattttaaataatattaaaacctggaactttgcccattttgaagccacaagacaatggaatgtagtagctttttggcayaggaaggttaaatgccatcaggtgaaattgacatttctctgagtatcaaaccagaaacctaacaacaaggaaaaagagcaagagcagcttacatgtttcttccatatgcctggcattcaaagacaccctttttttttttttcagtcttgctctgtcacccaggctggagtgcagtggctcagtctcggctcactgcaaactctgccccctgggctcaagcgattcttctgcctcagcctcctgagtagctgggattacaggcgcctgccaccatgcctggctaatttttgtatttttaatagagatgggttttcgccatgttggcaagactggtcttgaactccagacctcaggtgatttacccacctcggcctcccaaagtgctgagattacaggcgtaagccaccgcgcctggccaaggacaccctttttaaaaagaaaaaaaaaaatctgcattctacaatacctgcaaataaataaaataggaaaacaaactgaacaagaaatatttgttaaattatttttaaatgttgacatataaagggaaatttggtttaataagaggatgagggtaggcactggttttttaatgcatatttcatttctaatattaccttttttatttttttaattatttttatttctttattttttgtaatagagacaaggtctcactaccttgcccaggccggactatctagcccaggccagtgttgaactcctgggctcaaatgatccttggcctccccaagtgttgagatgacaggcgtaagccactgtgcccagccaagtttcctttttttttcttttttttttgagacagagtctcattctgtcacccaggctgaagtgcagtggcacgatcctggctcactgcaacctctgcctcccaggttcaagtgattctcctacctcagcctctcaaatagctgggactacaggcacgtgccaccatgcccagctaattttttgtatttttaatagaggtggggtttcaccgtgttagccaggatggtcttgatctcctgacctcgtgatctgcccgcctcaagcctcccaaaatgctgggattacaggtgtgagccaccttgcctggcccaattttcctttttcttagcacgagagaaatcttgctttcctctgatgtttctcaacttgaagatccttggtttatgtcttcttgaaaggagaaagtagaagtcaagaaggtgagtggcaatttttctgaaataataaggaaaaggagaaagaatagaaaactggaggatgaagattgaagaggatgtatatacactttagagattacgtgaggtgaaattaaccgagttgtgaacagtgtgttaggctgttcttgcattgcgataaagaaatacctgaggcaggccaggcacagtggctcacacctgtaatcccagcactttgggaggccgcgcgggcagatcacgaggtcaggagatcgaggccatcctggctaacacagtgaaaccccgtctctacaaaaatacaaaaaaattagccgggcgtggtggcgggcgcctgtagtcccagctactcaggaggctgaggcgggagaatggcgtgaaccagggaggcggagcttggagtgagccaagatcgcaccactgcactccagcctgggcaacagagccagactccatctcaaaaaaaaaaaaaraaaagaaaagaaagaaaagaaagaaatacctgagacgggccaggcacggtggctcacacttgtaattctagcacattgggaggcccaggcaggktgatcacctgaggtcaggagttcgagaccagcctggccaacatgccaaaaccccatctctactaaaaatacaaaaaattagccgggcatggtggcgggcacctataatcccagctactcgggaggcggaggcaggagaattgcttgaacccaaaagcggaggttgcagtgaactgagattgcgccactgcattccagcctaggggaaagagtgaaactccatctcaaaaaaaaaaaaaaagaaagaaagaaaagaaatacctgagactgggtaattttgtaaagaaaagaggtttaattggcttatggttcttcaggctttacaggaagcatggtgcttgcacctgctcagcttctaggaaggccttaggaagcttacaatcatggcagaaggcaaagtgggagcagggacgtcacatggtgaaagcaggagcaacgggaaggaggtgccacacacttttaaactaccagatctcccaagacctcactcactattgtgaagacagcaccaagccataagggatctgccccyatgatccaaacacatcccaccagccccacctcctgcattggggtttacaattcaacatgagatttgggaagggacagaaagagacacagtatacaagcctgctggagtgaagaaaggatagatggagaagagataggcagctgcagatgcgaaggcaggaatcagctgtctatccacccagtacttagtaaactcctaactcagaaagttcctcaggtgagaccattagaaagggaaaagaagagtactgaatcactcaaacttgaaaatagattttttttctcgctctggctttggagatctagcaaatgtccatgaaaatggagggggggccaggcgcgatggctcaagcctgtaatcccagcactttgggtgtctgaggtgggcagatcacaaggtcaggagatcgagaccatcctggctaacacggtgaaaccccatctctactaaaaatacaaaaattagccgggcatagtggcgggcgcctgtagtcccagctactcgggaggctgaggcaggagaatggcttgaacacgggaggtggagcttgcagtgagccgagattgcgccactgcactccagcctgggcgtcagagccagactccgtctcaaaaaaaaaaaaaaaaaaaaatgaagggggaagactgatttaattaattttacttctggaaggtaggaaatgggatttacaaagatcaaggttgctaaatgtattatatataatattgccatagtcaatatatttctatttctcatggccaaccatgatgtgaggttcaactgaatttgaataccataagcaaaagaaaatttaagctcatccaagagtctatgtgactactttcctcattgatagccacatatagctcagtcatgttaatgtaattttggttttagcatttccatcattttcttaaattcttaaagttgtaaatacgcaacaaaaaatttacttagtctaagccaaagttggtttatagggtcttagcccaggagcaaattttatttatttagccatagtgattgggaagagcccttttctggcagctaatgacctactggaggacttatgtgcctaaggcaaagctgaaggccattagcccaacaggtcattaactgacaaatgcctgaccctgaggtcatttctgatattgtaaactgtgaaaactttaaagtgggtttgttggaaagtatggctgtgccaagcaagtttctttttaagcattctggaaatttcattaaattgtttgttgtcattcctatggcttaattgtcattgttctgggaccattttcagggtgtaaagtcaggcagaaatckggaaacaccaaaactatattgcaaatcaagtctttggtttttaaaggatagtttccctgtttagaatatcagagtaactgtttactaataacagttttagctacactcttggggatcacttatattttcataatgtgttgagctacatagcacttatgtattttacattcctagagatgacatgtaaagctacaaagagaagtggaaagaaccataaagtagaagtctgtggaccgaattcctagccttggctttttttctctttcattttttcttttttctattttttttttttgagacagagtcttgttctgtcgcccaggctggaatgcagtggtgcgatctcagctcactgcaacctccgcctcctgggttcaagagattcttctgcctcagcctcccaagtagcggggattacaagcatgtgccaccacgcccggctaattttttcctttttttttgtatttttagtagaagtggggtttcaccatgttggccaggctggtcttgaactcctgacctcaggtgatccgcccaccttggcctcccaaaatgctgggatttctgatgtgagccaccacgcctggcctcattttttcttttgtttctttttatcccccaataagccatttaacattgaactcttcattttacctctcagaattccaaattcagatcattcattcatccatctattatttcagtctatctgatatcttaattccccatttttatcactgaaattagaaactttatagttgtagaaaatttaatcattaaaattaccatcaaatattttagaaataacaatttatatttttgagggcttactatacggtaggcactgttttaagtgctttatctatattaacccatttaatgtctcctgaggtacagggaaaggataagtaatttccctcaaggtaacactgctaataaatggtagagttgctgtctaaatccaggcaatctgactgcaaaatcctcatgctttactaaagtagaaarctgacagaccaacaaagaaccatgatacatttttgccaacaattttgcagttatcaatcctggaatttatggtatcttaaacggttattagtttctaaatattggaatacatatttcaatacaaacattgataggggcttcatgaaactttttttttttctgagacggagtctcactgttgcccaggctggagtgcagtggcacaatctcagctcactgcaacctccgcctccaaggttcaagtgattctcctgcctcagcctcccaagtagctgggattataggcacccaccaccacatccagctaatttttgtatttttagtagagatggggttttgccatgttggctatggctggtcttgaactcctgacctcaggtgatctgcctgcctcggcctcccaaagtgctgggattacaggcgtgagccactgtgcccggtgaaacattttaaattagcaacttataagcaaaagcaactttttttttttttttttagktttctaaaaaaataaaggcagcatcatgtccatctcttagatccttgctggttccaatattctatggttcaaatgttgtagatgttgtaggaaagagtctaaacttgcatcttataaccagatcctgaaaatggcatgacacatgaagaaaaacaaaatgattataatcaaggaaattgttaataaagtcaggaaagtaacagagaagccaatatcttatataaaatcagagagctaaagatttttgtgcatatttcagcaatctaaagcagtaccccaaattggtaaactcatctttatggcggatttgtgttgaaaattttatatatggcttaatttgttcaagtactttaaaggctataaggtaatgtacaaatgtaaatttctgataatattgattgagcaaagtgataattcacatttatattgaaacagttgtgatttacacaagtaagtcacatactaaaacagtattgttaattcaaaaaaaatttttgtgtgtgcattgcatgaagcatgagaaataccagtttaaaacccaactgggwcaggagtggtggctcacacccctaatcccagcactttgggaggccgaggtgggcagatcacttgaggccaggagtttaataccactgaccaatatagcaaaactctgtatctactaaaaatacaaaaattatctgggtgtggtggggcatacctgtaatcccagctacttgggaggtcaaggcacaagaattgctaaacctggcaggtggaggctgcagtgagccaagattgcaccactgcactccagcctgtgtgatagagatcctgtctcaggggaagaaaaaaaaaagccaattgtatgtatatctttatagattggagtatttctaacccaagtatgtccattattattatttatttgtattattattttaatgagacagagtctcactctgtaccccaggctggagtgcagtggggctattgtcactcactgtaacctcgaactcacaggctcaggtaatcctccacctcagcctcctgagtagctgggactacagcgcaagacaccatgccttgttaattttttgaagtttttgtagacacagagtctctctatggtgcccaggctggtctcaaactcctgacctgaagccatcctcccacctcagcccccaaagtgttgggattacaggcatgagccactgtgcctggcccagggtatccattatttgatccaagggtacaatgtggccaatcccagatttattttatttcattttattttatttgtgagacagagtctcgctctgtcacccaggctggagtgtagtggcatgatcttggctcactccaacctccacttccaaggttctagagattctcctgcctcagcctcctgagtagctgggactacagtcgcccaccaccacacccagctaatttttgtatttttaatagagatggggttttgccatgttaaccaggctggtctccaactcctgtcctcaagtgattcacctgcctcggtctcccaaagtgctgattacaggtgtgagccaccacgcctggcctcttctattattgttaattaattaatttatttatttctgggacaggatctccctatgttgcccaggctggtctcaaactcttgggctcagaggcttctcctacctcagcctcccaagtgctggaattacaggcatgagtcactgtgcccggcccccaaatttctacctgataatttgaaggaaggaaaaaaaagattacttaattttttagaacacagtactagtagcatcagttatttttagaattccattgatttgtggattttgaagagcttcagagttatttggaagaaatacaattacagctttagtcaaattgcatggattttaaggcacacgaatcatgattttatttctgtgcctgcctttagagtacaaaccttgggatgtctctgaattacaaacacctgccttttagtgtggcccaatttgaagaggaactgcttgagctggaaagtgaactgtgttacccaaaagacatggcagcactggaatttgcaagatgtatctgtgactcctaggaaattactgaaatttttagctctttggccaaatgttatctaagccaatttgttttcaggaatctaacaggatccaagctaagcatcaggcagggcaccgtggctcacacctgtaatcccagcactttgggaggccgaggtgggtggatcacctgaggtcaggagttcgagaccagcctgggcaacacggtgaaaacctgtctctactaaaaatacgaaaattagccgggcatggtggcatgcacctgtagccccagctactcgggaggctgaaacaggagaattgcttgaacctgggacggggaggttacagtgagccaagatggcaccactgcactccagcctgggcgacagagtgagactctgtctcagaaaacaaaaacaaaaaaaatgaagctaagcatcagcattattgatacaagcctacaagattgaaatgcaccctaatagaatatactccatagtacccaagaatgattctgttttatcttgcctctctgtttaccttcacttcatttacatgtttttggtaaaaagtgataaagaaataaatacctctaaaaatatattttagagtaacaatgtttaaactgcatcaaaaatttggaagaccttgtgtgtaattacaaggactaacaaggtatgaactatacataacatttttcagcatgatattgaataatgtttcaaaccacagatcacatccttttcattggggagtggtgaaatcaatttagtgaatcactatcaatactttttgtttgtttttttttttttttgagatggagtttcactcttgttgcccaagctggagtgcaatggcacgatctcggctcaccgcaacctccgcctcctgggttcaagcgattcccgggttcaagccataggacctggcgtggtagctcacgcctgtaatcccagcactttgggaggctgaggccagtggatcacctgaggctaggagtttgagaccagcctggacaacatggcaaaacyccatctctactaaaaatgcaaaattagccaggygtggtagcagacgcctgtaatcccagctacttgggaggctgaggcaggagaattgtttgaacccgggaggtcgaggttggggtgagccaagatcacaccactgcacttcagcctgggcaacagagactccatctcaaaaaaaaaaaaaaaatagaatgcaatagaaaattacataatgaaacttttaatttaattttggccaggcgtggtagctcacggctgtattcccagcactttgggaatacaaagtcaggagttcgagaccagcctggccaacatggtgaaaccccgtctctagtaaaaatacaaaagtcaaaagttagctgggcatggtaatgggcacctgtaatcccagctactcgggaggctgaggcaggagaatcgcttgaacctgggaggtggcagttggagtgagccgagatcacaccactacactccagcctgggtgacacagcgagactccatctaaaaaaaaaaaaatgtagttttatatatgcacatgtatttatactgtgtcacaatgtgtattgaaagccactaatagaaggcagtgtgctagccaacaacagtctttcagtttacatcactgagagggtctccagatgaagaagcagtgaaagcaaaatggagctcatcagccacattgaataaaaatgggcccaacactaaaatggcaaggataattctctcagaattctgtcagaacaacatgcggcagtgtcgctaggtaaagaacatactgagaatggtatatcctgagtacaacagacttcatattcagcaattcccatactgggggaaggtggaaaataaagcaactaactgctatatgataatcagttttacgttgcttgtttgtttcatgaccaagtattcaattctcagcaactatttattatagtttttatagtaatgcaaaatacttgacacaaccaactttttaaaaaatctgctggaaaacgtctcctttttctttatttcttatgaaaatttttatctttaaaaaaaattatttttcggccaggcgcagtggctcacgtctgtaatcccaccactttgggaagccaaggtgggcagatcacgaggtcaggtgttcaagaccagcctgaccaacatggtgaaaccccatctctactaaaaatacaaaaattagccaggtatggtggtggacgcctgtaatcccagctactcaggaggctgaggcaggagaatcacttgaacccgggaggcagaggttgcagtgagccgagatcgtcccactgcattccagtctgggagacagagtgagactctgtctcaaaaaaaaaaaaaaaagaaagaaagaaagaaaaagaaaagaaaattgcttcatagagatgggatctcagtgttttgcccaggctagtctcaaaacttctggcctcaagtgatcctcccaccttggcctcacaaagtgttgggattacaggcacgagctaccacacctcactgaaaattttcatcttaagcgctttaaattgtctgctactttttcaggaacctaattgttgtttaaacaaataaatgagtcagtgatcaataaatgactatttggcattgcttcagtagtccaagaccatgcacctttattcaaaagtaaaatcagtttttttattactcttttattgtagctaaaaaaactattttttactgtatctcacaattgtgaattaaaaatgtatatagctgcacatttaaatatttctaatcataggacttattgttgataaaacacagaaacctcttatctagataagcaaactgaggggcaaagaagtgacatggttggcccaaggtcttgcaacttacgtattaaccttctgagtgatcaaaaaccaataaatggcctttatctttatgaagttatttatctagacaatgtatcctttaaaaagaacaactataatttaaaaacactgcaaaaaaagtaaatgtaaaagttatttattagacttgtttagacatggtcccttagtgatacttaaaccacaaacatggccgggtgcagtggctcacgcctgtaatcccagcacttgggaggccgaggcgggcggatcatgagatcaggagttcgagaccagcctggccagtgtggtgaaaccccgtctctactaaaaaaaatacaaaaattagccaggcgtggtggcgcacgcctgtaatcccagctactcaggaggctgaggcaggagaattgctgaaacccgggaggtggaggttgcaatgtgccaagatcaagccaccgcactccagcctgggtgacagagcgagactctatctcaaaaaataataaaataaaccacaaacatttttatatgtattaattgaataaaggaattttgatttagatctttttggtagtgtctcatgtataactgtggcctaacgagactagtttcattagtacagtaccaggcacatagtaggatatcaaactgttcatgaaatgaatccaccagccaatataaaattaaacttcatatttaagccatcttcctgaatttgtggcctatttctttcaagttgtatcagttgcgattttaaaaatagaactttcattcattttttgttgagatgggtatctcactatattgcccaggctggtctcgaactcctgggctcaagtgatcctcccacctcggcctctcaaagtgctgagattacaggcgtaagccactgcatctagcctcagttgcaattttatacttttgtttagttcactgaattttcctgaaacctttttgacaaatgttaccagtagttagtttatgaaccaatgtatcagctgttctaaattaaaaattaagattatcaatttgcttagtttttgctgcacctgtcctgttggtagtgccatttctctctcttcgctacccccttagccagaaagaacttccagctcactagaacagattgccatccctcccacaaataagcaaagccttacacatttggcagtactgaaaagkctcccttcaaaaaactgagttagaagcttcctccagaactcctatgagttggtgtgcttattgcaacagccctttcatcattgtctacattaaacccagtcctagtttgataggaagaagtggagagagccatcctttcagagactttagcgatggctttatcaaagccctcatttattttaatcagcatgcagagtagggctcatctgggtagttcgtgcccaggtggtgggtgagtagattcacccctcatttggccactgctgctgtgccctgtgttcttcagaagtcgtttctccactgaggctgccagcctggaagctctggctgagcactggggactgaatctacctggaatkagatggtttgcttaaatccaattgtaaatgataaagtgctttacaaatgttagacattattattggtctctatgggagggtgccactctttagtccctctataccttatcttggcaatataaatctttccatctttatatgcgtctcacaaatagtttgtgcttcatttttatgaagtaaagagtgacaccacctgctctggttacctttatcggcctattcagcaccctctcagtatttttctgtaagatattttcactgataagagtttttgtggctcaaaaagaaattttgacaatatcccttcaaattccaaagctctttcaaaagagactaaatccatcttttgttcctcccaagatgtatatgaaaattcattcttccccaagagtgttttacctttgctactacttcatgcattgctgtttgttcctgggggtggaggaaagagcgcagtaaagttgtgcatagttaatgccatcagcactgcagatgtacatgcacacacatgaacacacatgactgttttctttgctagcagctcaaagcagtaaaggctgaggggtgccgtgttattcacctccaaatagagtgatggacatgtttttcattccacactgtagtaaatccatcattaaaatcacctgaggacaaatttttgcaagaagattacaaatctgtaatggccttcacagtttttatataccaagcaaattaagttataaagcaacctttttcaagtgaattaaaatgcaaccatactaccttattacatcaatcatattatgctgacttgagctttaattgagccatgttaccttatagtttacattttttctaaagatttccttgtggccgggtgcggtggctcacgcctgtaatcccagcactttgggaggccgaggcaggcagatcacaaggtcaggggtccgagaccagtctggccaacatggtgaaatcctgtctctactaaaaatacaaaaattagctgggtgtggtggcgggcacctgtagtcccagctgctcgggagactgaggcaggagaatcacttgaacccgggagatggaagttgcagtgagctgagattgtgccactgcacttcagcctgggtaacagagcgagactccgtctccaaaaaaaaaaaaatttacttgtattttaatttaggataggcactcctttgctcaaattagagtggtctgctgtactagtcaaacatctacgactctgttgagtctattcagcctgtcaagtgctaactgacagtactcctgaatcccatttattgagaaaggcacaacttgtctatccagaatgcttactgccacttactgatcctattttttctagtccaaaaactattgagtgatatattccataaatcaatttgtgaacatagcttaacttgaggtctctctgagactataaacaaggtatgcttccccccccaacaccctccccaaggaaataggtttattgttttatttaattataaaagcaatacaataaaaagagggaaatagtgtaatgcattatatatgtaagctgttataaacttagcaattataaatttaagcagaaagattgaagaaaacaattttttaaattaaaaatcatccagaatctatcatttgtacattattattattttgttgtctctcctttcagactttttctcttgtgtatataaacacatagattgacctcatttttgtttttaaaatacctttcatactacttctattttgtaaatagctttttttccttaagaatatgttacagacatctttggatagcaatgcgaggatttttttgcgggggggggtcagtatttttgtcttaccatcccctactcctctcaatttctgttttttatgatgagaatttattatagctcagggcatagtcatcacaatatcctttgtgagggtattcatcatcttggtttttcagtgtaaaaaatcattgaattgtagttacccttgccaaaagataaagaatgaagcaattatatattcccctgagattgctgaaatttgtcctgtaaattaaccatttaagaaattcatcacaaaggttaattatgtcagatctataattttgttaaggttcagatacacctggatactatctcttcctaacttgggtgagacggtggttattgaaatgggagtgatcaacaatttgcttgagaatagcaactagacatgcactgtccatttactgtcctatgctgcagcattctccccagcagccaaaacaagggaggtggcaggagaagccagctcatgacacttacattaggagtggttgccacttcaggttcactggaaattgaaggatagtgtatggctttgctgtagagtcgtatttcaacatatgacccaaactgaagagaagagcattttttttttatttgcatgtgtaggtaagcaatgctgctattctcgcagtcaccagaaatgcagaaagttatgtcctgtttaattgctctccagatggctaaactatttaacattgatgctgactgttgtrtaatctaaaacaatatttcaggatgcagcaagtcagtgtttcagaggtccctgattttggttaaaatggtctttgcatgtgttctgggttgggttttgttgttgaactaaaactcactttcttccaaaatatttaggcacacaattttaaaaataccataatcttggtttccatactctgctgttcatctacgcaaggcttgtactgaatatagcacggtaatagggcagtatggaagaagaataagttaacactcactgaaacttatgttccagattctcttctaaatgctctacgtatttactgtttagagatactcacgatatggccaacttagtaccattatttgtttgatgcaacttggcagttaagcctgatgtcattcagaatccagtatatataaatcatttccaagcattagagcccttcaagaatcagagctcagcagtgttgcctttaattgactcaagtaggactttgccagttgatggggtgctctaccagtcataatggttttgaaaaatggaaagtgttttattataattctaggtattgaaaccaaaggggatttggtacaaaaagtttcacaaagaaattagccagtagaattcagatagagggaaaggttcatgtgaagacaacagataaaaatgaattacatgagcaaagatgttccatcaaaatttgcagaaaaggagttttcaagtttacatgcctaattataaataataagacttgcatttgtaaaagcttagaattatagggctggaagaggccttaaggaatcatcttttccaattccctttattgcaattcattgcattgagttgaagaaaatcaaagctcagaaaaattgatttgcccaaatctcacaatcaaattattagtagaccttggaatagaatctagattctgtggctgctagtattctgctttttttttttttttttttttaacagttccctaatctgttgagcttccaagggtaactcacattgaggctctttgaaccttcttttttttttttttcttcccctagtagaaagtgtttgcttgccccatgggcctgaraaacaaaagtcctggaatctttctcaaggttgcacttatctatagcaacaggacttcagctctcagccccaagaggtctggcttttaggcctctggattctcctttggctgccattattcctgccagcactttgagttgcctgaacatgtcactcctcaagaatctgaggggggaatatgttattaaccaagtgttttcttaaatgtaagtatagcagtatctaaacaggtgaatgtctggggtaatatgcaaaaaaaagtcagattattaaatgagcttactaaattgtgagtggctgctagccttgtggtctctctagaaatatttgcagttttaaggaagggtgatacttaaacacatctttctttttttttttgagatggagtttcgctcttgtcgcccaaactggagtgcagtggcgctgcgatcttggctcactgcaaactccacctcctgggttcaagcrattctcctgcctcagcctccggagtaattgggattacaggcatgccccaccatgcccagctaatttttgtctttttttttttttttttttttttagtagagacagggtttcaccatgttggccaggctggtctcgaactcctgacctcaggtgatccacccacctctgcctcccaaactgctggtattacaggcgtgagccactgcacccgaccaaacacatctttctttggtataattttaaaaataaacatttcaggcaatgtaaagagattgatatgtgcactgggtaagtcacccttatctggaacagtttcaacttcttaggctactcttgctttttataatctctttccttcctcgacttgttaactcaaagaaatctaaagctttttccttaatgggttgtcattggctatggaggtggaggtgtgttctgttcaagtaagtatagccatttgtaagtacaggtcatttataaattatgaacttgtaaggacaggtttacgcaatgagaaaaagagtcagagaacaaaatgttcttgttgcttctgcctggtctggaatttcagggaagtaaaggaacactctggttatccagagccagatccactgttaaaagttcatgccatcattttgacatttagcgtcagactttctctttgtaaatccctcttcacgttaccaatgctggtctcagagctcaaactgtttcaaaaccataacatttcttagtgagtgattgatctgtattatgtgtccagccatcagggggatcttgggatgttgcttgtgtaaactgtaatccaatctgatgctgtgcgtttagttacagtctttcatagacctattggcgatactcagtcctcctggatttaggaatagggcttatctgataccttcagggggaaaaaaatccattcatttttctctcttccccacttaaataactcaactcatgtggtaacactgtaggatcattgtccttccagttcctctgcagctcatattgctacaatatttcttaagtatttggttacctgaaggacaatgtgatttaaaaaaaataaaaaagactttgtatatgtcttacaaattaaaccatccttaaagagctaggaaaaaaatatgcctttaatcagcaaaaatttcatatcagcagttctgtgtatgttatgtagtataaacgtaaatatataaatttggagataagtgctcatgtgttaaaatgttaaagcaaatctttctacaaattaatgtcatttgcctctaagaaaatgtttattaaacccagggtacctgagattgaagtatcttgttgtttgggtctgtattctttggcttaataatgtcttcaattacaagaatgataaaagctgaaacaaaatcctttaattcaatcagaatggagctgaattttcggaagcaaagagtggaaatctgatacaggactgcataacataggaagttaaatatacaagatattaagacttgtaagaagcggatggggttgccttgaggaattcttatttgaaatggctacattgaacattatcataaataccactattttatcctctcaaattaagatgctttatgcaaactactctaaattgtacagtagttccaaagagaccatttactgttttctgcttgttttacatcctggaacaagttcaaagcttttgatctcacttgatttaacaaaaaaaaaaagtctcagccttgaaaaataatacaggtttgatgaatatgatttcagtattacagttctgtaaaaattttcagtgtttatggtacatttgacccagggaccccacagtaaatatatccacagtgcattttaagtgtaacagaatgaacatatttgaaagattatccattcttttgcttttgcttttttttctgtaataagtatgaaaattaacattgtaattgctcccagaatgggagtactgaaaaagtatccacctgacagaaataaacatgcagaaaataaattgagttaagatttcattagttatctgaaatgtaagtttatgttcaaaatggctattactcgattttcatgtatattagttaaatgctatgcttataagattttttttggcttgaattatgactgaaaaaatttggatcacagctttaatatccaggtgggcaatgccatttgctgagatcttggtgcatagccccattttttctgtcaagcacagaaaaattctgccttgccactgagccttctgaaacattctgaggtaacaatagagatatatttaaatttttttatttttatttttcttcttgctttttaggttgtggaacttttagcaagtgctcttatggacttgrtacaaggagtatatcatgaaaattctacttcaaaggtaaaggatttcagagtcataaaatgttatgttataaaccgtcgtggtacaactagaataacgaaaatgtcattcttgttttgtgtttaaattgtacatggcttttttttttttttttttttttttttgattagtgttttggctacaaattcatggccatacgcttactacatagcagatttagccaattaaaacaacctcttatcctctggctggattcacagtctgttcaatctgcagcagcycagtagacactgggatgcttctggctagcaggtagcagtgtcacaggcaggcaggctggaggagcagctcgtgctgaggcagctgagcccatcctttccccagaggaagggtccttccgtgtcacagaggagtggaccttgagcctaagaagatgactgttggggaggtgggatgggggtatcttttatatacaagatgcataatttactgcattattagattctttattataagaagtgggatgattgcacagttggattattttgattaattttataggtctagaattaagatttttttgactcatttagcaggacatctcaagaaaggttaggtttcatttccttaaaatgcagttatttcatttcggtaggatgttagatgtgaagtaattgcttcattgaccatcaccatcatttaacatggtagatactattataaggggctcctatcttagtgtttcattattctaacttctttagcttctgtattagcaagatttcactcacttcaaattagaaaaggtatgcacatatgcacatcttaagctttttgacattttcatttgaaaaaaggaagataaattttattagaagtgaaacatagggcatgagtaacttggataagaaatttaaaatttaaaagtataacccagggactctgggtggttcagagactggttagaatatgaagaattgcactttggacatctgccaacgtttggttcaagtaaccacagttcctagtaggcacatctggcctcacctaagcagcatattggtatgcagagacctcacaggatggatgaccacagtggacctttcaaagacatgcaagttcactactatggatggaggttaatatctgattgtaaaatgggtgactactggtctagttccacttgtaaaaagttacgttgtatagatagtatgatgaagatgacaacagctaagcaaataaccctgtagtaagtgatttgcctgtgtttcttcatttaatcctcacagaaatcctgagagataggtactactgctatccccattttacagatgtgaacactggggttgagaaaaggttaagtaattttcccaaggtcacacaacttgttagctctcagggatttgaagtcaagagcccagactctttttttgttttgttttgtttgtttttttgagatggagtttcgctcttgttgcccaggctggagtgcaatggcacgatctcggctcaccacaacctcagcctcctgggttcaagcgattatcctgcctcggcctcccaagtagctgggattacaggcatgcaccaccacacctggctaattttgtatttttagtagagacagggtttctccatgttggtcaggctggtcttgacctcctgacctcaggtgatctgcccacctcagcctcccaaagtgctgggattacaggtgtgagccaccrtgcccagcccaggatgggggcatggcagaccacagtggtcttggaaaatgcaacagttaggcacaaaagcaggagtgcctgtcctcacctaggtctgtaggagtggagccccagccaggacctgcctttctctacccagcacttccccgtacccgctcccatatcttctgtactttagtgaaacctgatttgatagcatctgtctgccatacctgagatcccactctatgataattatagtgaccagttctggctgttgagacactgttttcccttgggatatttccagagtgttcaacttagttccatataagatatctatatttcacaattaaatatgttaatttttacatgaaagcrttattgttggttttaaggttcttaatttatctactcttaccatttgtccactataataagctcagttcattaataattgtgtgaccatgttttaagtattttttatgtcagggaaacctgacagctacgacagttaatacttagatagccctttacagtttgcttatactttctttgtacacaatcacctatgaaaagggtgacatttgttggtattcccatttatagaggaaaagcctgaaattcaaacataacaaatggcaggaaagcatagtgtctgaaaattatttgttaatatattaacatgtttcacagttcataatgaacccaggtttttcttgactctcagtcccatgctttttctaatatttttaatgtgtttcttcctgaaaaagagaaaagaagaagcaacaaagtctttgaagggctgttgattgtacttgaaccaccacttagcaagcaccaattgctgactttatttaaatacagagattcagaggaatgctaaccttcattagctacattttattaaagagactttatagcactgcttcattcatctgtcctctttccctgccacctcctcatagcccttttttaagcagttaaatttctgaaaatagccaaaccatttaaagggccattcttttttaataatggaaacagaatggtgtggtggctcaagcctataatcccagcactttaggaggccgaggtaggaggatctcttggggccaggagttcaagaccagcctggacaacatgggaagaccccatctttacaaaaaataaaataactgggcatggtagcccatgcctgctcaggatgctgaggcgaggcaggaggatcactggaacccaggagtttgacgttacaataagctgtgatcacaccactgtactccagcctgggtgacagcaagaccttgtctcttaaaaaataataatttttggccaggcgtggtggctcacgcctgtaatcctagcactttgggaggccaaggcaggcggatcacgaggtcgggagatcgagaccatctcatctctactaaaaatataaaaaaattaggcgggcrcagtggcgggcgcctgtggtcccagctactcaggaggctgaggcaggagaatggcgtgaacccaggaggcggagcttgcagtgagccaagatcgcgccactgcactccagcctgggcgacagagcaagactccgtctcaaaataataataataataataattttttcaaaaagaatggaaacaaaaatgcatagttgaactgtagtagtgggagtgcttcttgatgcctccatttgtgcctcaggtccaatttaggttaaccacatttcccttcctaaccagaaaaattctggctttttttcctgagtgtgcttaccattgcaatggctcttcagaatttgttttttctaacagcgcaagaagtacttcagatgccagagagagcactgcccccacatggagtgctttcaaggttttcatgttctggcaggactgggaagcagccacaagtggaggtcatgtgggaagagaggctcctctgtggatctctgttgcacaacctccgtagccttgggccaatttagtacacaaaagaatttttttgtgatttaaaagaagctgcaaaccatttcatctttctaggggtaagaggatacaatagcagtctgttttctatrtggcagcttaatgcagtggtgaagatcctgggtagtaggaaaatagctttctgttaaatagcatatatgtgactaaggtagatgcatagcaamaaatgcaagggaattggaactggatacattagaagtcaccttctccaaaagaagtttgtagagcagccgggtgcggtggcttacgcctgtaatcccagcacttcgggaggttgaggcgggcagatcacgaggtcaggagatcgaggccgtcctggctaacacggtgaaaccctgtctctactaaaaatacaaaaaattagctgggcgtggtggtgggcgcctgtagtcccagctactcgggaggctgaggcagaagaatggtgtgaacccgggaggcagagcttgcagtgagccgatatctcgccactgcactccagcctggggacagagcgaggctccgtctcaaaaaaaaaaaaaaaaaaaaagaagaagaagaggtttgtagagcaattacctaattctccttaaagctgtgaaaatgtacatgacttatattactaatacttttttttttttttttttttaccgagtctcgctctgttgcccaggctagagtgcagtggcgcgatctcagctcactgtaacctctgcctacccggttcaaacgattcctgtgcctcagccttgcaagtagttgggactacaggcacacaccaccacgtctcactaatttttgtattttcagtagagacgaggttttgccatgttggccaggctggtcttgaactcctggcctcaagcgacccatcctcctcagcctcccaaagtgctattacttactcatacttactgtactaagtaagttgaattacagctatataaacatacaaaatagcttaggaaattcatcctttgttctatccattgaaatatattttcatttttgcattggctagtttgtgaaccatttgctcattataataaaaattagccattctgctttctttagtgtttataagaaaatatctcccctctctgctttttaaatgttagctcattgaagaaagaagcatttgaaatagaaaaattgcttttttttttttaaatttttattttttacaggtagggtctcagccaggtgcggtggctcacgcctgtaatcccagcactttgggaggtggaggcaggctgatcacctgaggtcaggagtttgagaccaggctggccaacatggcgaaactccatctgtactaaaaatacaaaaaaagctgggcttggtggtgcgcgcctgtaatcccagctactcgggaggccgaggcaggaggatcgcttgaacctgggaggtggagtttgcagtgagctgagattgagccactgcactccagcctggacagagtgagactgcagtttcaaaaaaaaaaaaaaaaaaaaggtagggtctcactctatcatccagactggagggcagtggtgtcatcctagctcactgaaaccttgaactcctgggctcaagcagtccttgccttccgaatagctgggaccacagtagcctaccaccacacctgtctaattttttaaaacttttgtagagacaaggtctcaccatactgcccaaattagtcttgaactcctggcttcaagctaccctccctcctcagcctcccaaagtgttgggattacagatataagccaccatgctcagctggaaaattgcattttaaatggtcaagagttccccagttaagctgttttatatattacgctcatgttacttactgtactcactaaatattttacatttttacaaaattgactttggattcacagacctgtatatctaaattctaattgtcttatcattttaacttattttctgattagaaaaataggccaggcacggtggctcacgcctgtaatcccaacactttgggaggctgaggtgggcagatcacttgaggttaggagttcgagaccagcctggccaacatggtgaaaccgtgtctctgctaaaaatacaaaaattagctgggcatagtggcgcacacctgtaatcccagctayttgggaggctgaggcaggagaatcgcttgaacctggaaggcggaggttgcagtgagccgaaatcataccactgcactccagcctgggcaacagagcgagactctgtctcaaaaaaaaaaaaaaaaaaaaaaaaaggtagagtacatgtttattaaataataattgaaaacagaaaaaggtcaagaggaaaataaaaattattttataaaaccattccccagaaatgaatcatgattatgttttagtatatttctttctagattttattctgtatttctcccaattttgagttgttactgtatataacactttgcatattgatttacttcccagcataatcatttttgtcattaaaagtcttcaaaaatataattttaatgattgtttaatatttcttcacattgttatactgtaatttactgaacaatttcacattttgggggcatttactttgtttccaattttgtttttgtttggtttttggttttttttgagacggagtctctctctgtcatccaggctggagtgcagtggcacaatctcagctcactgcaacttttgcctcctggattcaagagattctcctgcctcagcctcccaagtagctgggattacaggtgtgtaccaccatgcccggctaatttttgtatttttagtagagatggggtttcaccatgttggccaggctggtctcgaacccctaacctcaagtgatcctcccacctcagcctcccaagtgctgggattacaggcgtgagccacagtgcctggcctgtttccagttttctttactaaattaaacaatattgtgataacatcttactgtatataactttgctcaatttcatactatttgcttaaaaaaaaaaatcctgaaagtgagattcttaaatcaagaagagtattttcagtatacctctgtgcagaaaaggattactgtcctgagaaaaacctgcttataaggttgatccttggctagcatcggagaagctggattttaggagtgttcctaccatcctccaaatgataagaatggctcgcagtgcctaaactgtttacagacaatatggtttatactgaatacctgctttccttataggagtctggaattttgctacatgctaggcagaaaatgcctacatgaccagccctaataaaaaccctcaccactaagtcagtctccagtaaatctccgtggtagacaatgtttcatacatgttatcacagctcattcttggaggaattaagcacactctgcgtgactccactgagaggggattcttagaagtttacacctggtttcttccagacttcaccctatggggctgtctctttttagtggttttgcattgtatcctttcactgtaaaaaagtcattacgatgaatttgactatatgctgagtaacatctgtcatcctaacaaatcatcaaacctgggggtgatttggagatcccgaacacactcattttctgattttttattgtttattttccacccactcctgatccttcctggggaatttaatcaaggtcctctgcaaaggcagtgtctctgactcatgttggtgttgagatggggaacaagacacctctttcctgtctccagaggttcagctcttattggcttggcctcagtctcaggaaagtgagagggttttaaaagagaatccagttctcttgggaaagaactggttttagcaagtgacttaagttgcaaagatcccatctatttttttcaagcacggattatattaatactttcagtatcagtcagtggattataatgatgaatatcattatgtttttgtggggcaagataacttctgtccttctgtccatttattttcttttcttttttttttttttttttcagagacggagtcttgctctgtagcccaggctggagtacagtggtgcgatcttggctcaatgcaacctccacctcccggcttcaagcgattcacctgccgcagcttcccaagtagctggaactacaggcatgcaccacagcgccttgtattttttttattagaggtggggttttagtgtatgttggccaggctggtctcaaactcctgacctcaggtgacctgcccgcctcgacctcccaaagtgctgggattacaagtgtaagccactgtgcctggcccatttgtttttctttatgcttatgttcctttcgctctcaggcagctttcaagtaaagtataaaaataagaggccagggccaggtacggtgactcatgcctgtaatcccagcactttgggaggccaaggcaggaggatcacctgaggtcaggagttcgaaaccatcctgaccaacatggtgaaaccccgtctctactaaaaatacaaaattagctgggtgtgggggtgggtgcctgtaatcccagttacttgggaggctgaggcaggagaatcgcttgtacctgggagatggaggttgcactgagccaagatcatgccattgcactccagtctggacaacaaaagcaaaactccatctcataaataaataaataaataaataaaagaggccaggagtgatggctgatatctgtaatcctagcaatttgggagaccaaggcagggcaatcacttgagccaaggagtttgagaccagcttacgcaacatggcaagaacccatctctacaaaaattaaaacattaaccagacatggtggtatgcctgtagtcccaactacttgggaggctgtaaggcagaaggattgcttaagcccaggaggttgaggctgcagtgagtatatgccactatacttcagcctgggtaacagaacgagaccctgtctcaaaaaaaaaaaaaagataattcagtccactaggaagttaaggactgtcttctacctgcaaagccctgtgctgccatctaaaacatagtaaaaagagccaaatgatttttttcccattaagaaaaataacaggagggtaatgtgaacaagaactcacatctagttggggaaatcagaaaaggcatcaaaaagaatgttacatttgagatggacattaaagattgggaagatgtctatagatggagatgtatggcattccaagtagaggaaatagcatgatgaatggaaagaaagcatatttgagatcagggcttccttcacatagaagtaaaggaacagtgaaaagtaatattgcaaaagtaggtgtttataacgcatggtagaagatctgtaatgccagaatgtattattttccttcttcctaaaagatttcttttaaccttgcttataagacaggtctgctagtaatgaactctttttttttttttttgagacagagtctcgccctgttgcccaggctggagtccaatggcacaatctcagctcacggcaacctccacctcccaggttcaaacaattctcctgcctcagcctcctgagtagctgggatttcaggtgtcagccactgcgtccagccagtaatgaactcttttagcttttgtgtgtctgaaatatatgttcactggatatagagttctaggttgacaatttagttttccttccatatttttaaagatgttgcttcattgtcttcttgcttttattattttcaacaggaaagctactgccatctttatctttgttcctgtagtcataaatagattatcatgtgctttcatgttctttttttcatgtttcttttgcttgggattcactgggcttcttggttctgtgagttggttttcataaaacggggaaaagattattatttcttcaatttttttttctgactttccttttatcctcttttatagggacctcaattacatagtaggctgctttaacttgtcccagagtcactgattcttcttcttttttagtatttgtgattcattttggatcatttcagttggtgtgcattcaagcagaccagtttacatgttctgtgtttctacttaatatgctcagtgtttcttctagctccttggccatatggaatatagttatgaaaactgttttaatatccctgtctactaattatatcatctgtgtcatttcctgggttggtttcaattgactgatttttttctccctcattatgggttgtatttccctatttttttgcaacttggttatttttggttgggtgccagacattgtgaaatttattttgttggatgctagatagttttgtatcactataaatattcttgaactttcttcttgaatgtagttaagttactgaaaacagtttgattctttcaggtgtcacttttaagctttattaggcaggactggaatagcatttagtctaaggccaatttttttcactattaaagcgagacctttctgagttctttactgatgccctatgaattttgaaattttttactctgacttgtggaacaggaattattcccagccctgtgtgatctctagggattgtttctgctgttccttctgggtgattctttccctggactttagtagtttctttgtacctatgcattggcaatactcagccgaagactttagggaggatctgtgtttaccttcagagctctctctgcagctctctcttcttgtgtactctgccctatgaaccctagcccctaattaaccccttcggcttctctagacatccaggttcaccttttcaactcaaaggtagtttcctctgcatcctggcattctctccaggcagaagctagaacaattatgaaactcatctcatttatttcccatttcttgggtgtcactgtcttttgttgcctgatttcaaatggcttataacttttgtttcatatattttcttcagtttttagctctttcaagcaagaaagaaaacctcacctcttttgctccatcttggctggaagtgctgattttcaggacttttaaaaatttatgttataatgacttttataaaaataacaaataaaacatttccctcctataaattttatggtgctattgcattgctggtaccctaagtgcatgtttagtgtgtctattgggtacattggccatgggaataagaaatcaaaaatgacaccaatgttttgcatctaattgaccagaaaacatgattatatagttgccagccaaagactggttttagagagaagcagataagtttagttgaggttgaattaatgttgaggtgctggcagactctccagatgaaagagtaaagagctccagaaagatgatttgggaattcatctttgtagactgataggcaaatatttttaggtagacaaaaaaaaaaaaatctagtaagataaaaatagagccaggcgtggtggcttacacctgtaatcccagcactttgggaggcagaggtgggtggatcacctaaggtcaggagtttgagaccagcctggccaacatggtgaaacgccgtcgctactaaaaatacaaaattagccgggcatagtggcacgcgcctatagtcccagctacccgggaggctgaggcaggagaatcgctggaacctaggaggtagaggttgcagtgagccgagatggcaccattgcactccagcctgggcaacaaagtgagactccgtctyaaagaaaaaaagaaaaaaaaaaagataaaaatagaatggagaattggagaatatggaaaggaagttggagtgattatctaccaggctttactgtaattggactttgaatttgacacagtttcttcccaagtaacaccaaaagagaaaatatattatgttctgagtttttcattatataattactaatgatacagataacttatttttatttttatgttttttagagacagaatctccctatgttgcccaggctggtcttgggctcctagcctcaagcaatcctcttgcctcagcctcccaagtagctgggactacaggcatgtgccactacactaggctctggaaattctagattaattgtttctcattggagtctttatttttttttttacatttatatttattaattcagagacagggtctcactctgtcacccaggctagagtgcagtgatgcaatcatagctcactacagcctcagactcctgggcttaagggatcctcccacctcagtctcccaagaagctaggactacagttgtacaccaccacgcctgcctaattttttttaatttttgtaaaggcaaggtctcccttcgttgcccgggctggtctggaactcctggcctcaggtgatcctcccatctcagcctcccaaagcactgagattacaggtatgagccaccactcctggcctctcactggattctaattaaattgtttgttatcatgaatcctatagtacccatagagctatattaggcagttttggtaaagtgtatattagtaatcttgtattgaatttctgctgtgtgaagagtagcatattgagtactcctggaacattcaaaacaaagcaataaagaacacaggccagccctcaagaatctgatgatgcttacaggtcataggaaatacatgcacatgaagccacaggagagcaattttcccataagaccacatgtaaaattgtaaggaacagactatatatgtaggagaaagtgcagcattaagaattcaaaatgtttcagagggagcttcttggaagrtgtaattttaaagctgagtccttagaagatacagtagaaatgaatcaatagaaactattggacccagcgcagtggctcacatctgtaatcccagcactttaggaggccaaggcaggaagattgcttgagcccaggagtttgagaccagtctgggcaacatgttgagactctgtctgaacaaagaaaatttttaattagctagatatggtggtacatgcctgtggctccttgggaggctgagcccagggggtcgatgctgcagtgaatagagatcgcgccactgcactccagcctgggtgacagagcaagaccctgtctcaaaaaaaaaaaagaaagaaagaaactattgaagtttgttgggatcaggaaatagtcattgagcattagctgggaagtcagatttgtttattcatttaatgtgtcttttgagcatctgctgtgtggcaggcactggaaatacaagtgctcagtgaatgagacatctttgcccccatggagctcacatctcagtggagaggccaactataaacaagaaatcacatgaatagatgaacaagagaaataactggaagcaataactgtataggagagaactaaatagggagaaatgatagtgaaggattgaaggagttactttagattggatgttcatggaaggcctgttttaggaaataacatttaagttgagatctgaatgacaaaaagcagctaactatgttggggggaaaaaacattccaggaagaggaagcaactccagcaaaggcctgaggaaggaattgccttaatctgtccaaggaatagaaagaaggcccacccagatggagcatggtgggtgaatagaagagtttctggggaggccaaggtaggagaatcacttgagccaggagttcgaggctgcagtagttcaatttcagaggggcagacaggtgttatgaaaatatatgtagtataaacatgaaggtgctttggacacaggttcaagtaaatctaactaaggaaaggaatctatcattctgttttagttattactctgttttagttattactctaggactgctcactcaacaratgttgagtacctattacgtgctagcaactgtgctagacaaatcaggtacccgtgtcttgagagctgagatagagacaaaggtacaataggagctggagctggggctttactagggaagggtgataatttttttttttttttttgagacagagtttcactcttgttgcccaggctggagtgcaatggcaccatctcggctcactgcaacctccacctcccgggttcaagcgatgctcatacctcagcctcctgaatagctgggattacaggtgcgcaccaccacacccagctaatttgtgtatttttagtagagatggggtttcaccatgttggtcagcctggtctgtaactcctgacctcagctgatccatccacctctgcctcccaaagtgctgcgcccagccaggtgataatttttgaagggagaaataactcagtggatagatcttgaacatttgtattgaggaatttggatttaaaatagtaagcagtagcaaataaccatagggtcttatacagtaagatctttgataaagattatgtagaagctgtgaataggataaattggaagccaaagaaattagaagcagagagaccagctggaggagcgttgaaataaaaacaggtgtgaagcaacagacgagattgttggcagtggaaacaagtgtagggcaagggcgcaggagttcagcaggtatcctacctttcaatttattaagtcatttacaactgatgtctcctgttttattactctcttactgtgtattttgtggaactaagtcaacatctaccatcttttaacctgttctttgcatatcacagtcttttaytttgatgctaagcccctccaaaacagcattttcacatgaaacttattgcattgcacaaaaatatggtttaaaaagtaattgataataattaggagtatagggtatttgtacaggttcatttctgtctctttgcagaaagtagcatttctagtctgtcatgagaggccccaagctaaaacagcccagtttagccattcctgaattctttaaaaaaattttttttaatttaaatagagatggggtcttaccatcttgcccaggctggtctcaaactcctgggttcaagggatcctcatgccttggcctcccaatgtgctaggattacaggcatgagccaccgtgccccgcctcctgaattcttaacctacagaaattgtgagaaaataaatttttactcttgctttaaaccactaaatttggggtcatttttttcgcagcagtagataacttatgtacacattcatgccctttgccatgtcactgtaatgtcctcccattatgggcagggggtacttacctgtcctttaactctgggctcacttgctttgaccagtaagaggctctcttgggcatgtttttctcatcactatgagaaaaacatgccctggctagtctgctggtccaggaagagtgagagacccttggagcagagcctctccagccaacctagagatgtgcagtgagaggcagagctaccagtctagattagctgaatctcagctgatccaaagacagtgagtgataataaatgattgttgtttgaagcccctgagtttgggggtacctttatcaatagtaaactggagtcagatggattaagagatttgtggggaactggtggtctaggccaagcgtgagattagggagctggtttgaagagtttaactggaggcttctagcctgaggacctaagtcctaccctccagggttaggaaccatttagtagtggaatgtcaatcctccccaggctggagagggcaaaggtttggtacttggagtttcaggaaagccatgtcagggctgttcatgaagcacctacagtggcttttttttttttttccttcagttttgtygtttgtggtgactgaatttgcaggatcaccacaaagtcattgcaaaatctttactccttgtttttgccagcaccaactttgacctttgcagtctccctgactgacttcattctgttcttgctcagyttttttgtttcttcaggtctttttcttctcacacaggctatatctttcaagtccatatctgggttcacatttctttgcataatccagcgagtcgtacatcatgccaaagccagttttcttgccgccaccaatgtgagctctgaatccaaatacaaatataacatccagtgagattttggtagattttctctgaatttctgccttaggtactgttgccctccaaggataaaggacatcaattaccatttgttgtatttccactgaagtagtcagtcagttggtcatgaacttcctggaccagatagttaccatagagttcctgatgatagtagatcctccagcagccagagaggactacagtgttcatatgtagacattattgtacatgtatgcctacagaagcacagagtaataacaatggaagatcggggctttgagactgttgccataaaaatggatgaaggtgggcaggggacgtcgactagaaagagggaatcagtgagtttgagttcaaagaagctaattcaccctaccaaagtagaagggggtttatattgaaagttttatttagtagattagaaataggaaaagtgaggccgggcacagttgctcacacctgtaatcccagcactttgggaggccaaggcgggtgaatcacgaggtcaggagtttgagaccagcctggcttatggtgaaaccccgtctctactaaaaacacaaaaattagccgggcatggtggtgcacgcctgtaaccccagctactctggaggctgaggcgggagaattgcttgaacccaggaggtggaggttgcagtgagccgagatcacgccattgcactccagcctgggcgacagaggaagacaacgtctcaaaaaactaaaaacaaacagaaataggaaaaaatgtattttttttccttggagttaaaaatgtcttaattatatatacatgtaaaagctgttttttaaaaaagtgtatattctaagaggtttaaaagtaaaacaatgagtgctgtgtaaaagcagtaagatactctgaagtgtatttcattggtcaatttactcacaacctgtccctcacattgtacccaaggcatgtattaatgagctaataaaacatgtcatgtcatgttttattgtttgctgggcatttgttcaagcttctgtcactcacaaataaagactttgaagatgctagtggtgataataaatacctttaattttactggcatccttttttataaagtaaccacagtcataaatcgtttgatgcaagtaaaaatactgaacttattcagatttaaagactattgagaggaatttgttttgtttgtttgtttgtttgtttgtttgtttatttatttatttatttatttattttgagatagagtctccctctgtcacccaggctggagtgcaatggtgtgatctctgctcactgcagcctctgcctcctgggttcaagagattctcttgcctcagcctcccaagtagctgggattataggcgcttgccaccacgcccagctaattttttgtatttttagtagagacggggtttcaccacgttggccaggctggtctcgaactcctggcctcaggtgatctgcccacctcggcctcccaaagtgctgggattacaggtgtgagccgccgcgcctggcctagcaaacttttttaattaaaaaaataaaagtagcaaatgttttgtgaagtatacatgttagaaatcaaatataggagtattagattaaatatgcaaagtggtaaagtgaaggttgatatagatattgagaaggcagagaaactgttggtgactaagaaagcttagtatgtatagtggcccttttgattaagtagaccctcaaatttagagtggatctagttgatgaatgtttttatttgttaaatgtctaaattgaatttgtataccatttggaggcactctaggttacttacaactatcacagcaaaatatcttaaaaggcagtttatttgcctgagagataaaacatcactattaggcatgtaaagtgtttaacagaataccattctgatcaaaggacaagagtaagccattcagaaaatgaaacccaagccttcaattaccatctgtctataggctggtgagtcccaatttttatctccatcctgggtcactgctgggctctggagctaaatatttaactgttttctcaacacctccacttgaagttctcacaggcatctcagactcaggacatctaagaccacatatatgatctttcccttcgaagccatcccattgttctctatcttcataaaacacatcaccattcattcagattttcaagtcaaaaacttgtaagtcatccttaatacttctgctccttaccaggttcacctggtgcctgccttactcttccgtaccaccaccttcaccagaagcataactgggagggagcagagaaggaatttctctttggagcactctctttaaaagtagactctgggcccgatgcagtggctcaagcctgtaatcccagcactttgggaggctgaggcaggcagatcacttggtcaagagttcaagaccagcctggccaacatggtgaaacccgcctttactaaaagtataaaaattagccaagtgtggtggcacacaactgtaatcccagctactcaggaggctgaggcacgagaatcgcttgaacctgggaggcggaggttgcagtgagccaagatcgtgccactgcactccagcctgggccacagagtgagactctgtctcaaaaaaaaaaaaaaaaaaaaaaaaaaaagggcacagtggcttacacctataatcccagcactttgggaggccagggccggcagatcacttgaggtcaggagttcgagaccagcctggccaacatggtaaaaccctgtctctaccaaaaatatttaaaacattagccagatgtggtggcgggcacttgtaatccaagctacttgagaggccgaggcaggagattcgcttgaacccaggaggcggagattgcaatgagccaagattgtgcccctgggcaacagagcgagactctgtctcaaaaaaaaaagtaattaaaaaaaaggctgggtttggctgggccgggcgcggtggctcaagcctgtaatcccagcactttggaagactgaggcaggcggatcatgagatcaggagctcaagaccagcctgaccaacatggtgaaaccacttctctactaaaaatacagaaaaaattagctaggcatggtggcacacacctgtaatcccagctactcaggaggccgaggcaggagaatcgcttgaaccccagaggcggaggttgcagtgagccgagattgcgccactgcattccagcctgggcgacagaacgagactccatctcaaaaaaaaaaaaaaaaaaattccaaaatcctgaaagtgacccaaaagatgcttacatagtctgacctcagtctgtccctccagcctcactttctaccattctcaccctcactgtctgcatatcagccctaatagctgatccacagacatcctcctctgtatgggccatccttgcagcttggaacacacttttccatctccttcactctttaccccttatttatgtttcctttgtcagctcaagtgtcatgtcctcagggaagccatctccagaaaccccagtctcagccaagttcttttattccatgtggtcatagaagtatgttcattttcctgcatcagaagtatctcagtttataattatatttcttttttttgagacggagtctcgctttgtcgcccaggctggagtgcagtggcgcaatctcggctcactgctgcaagctctgcctcccaggttcacgctattctcctgcctcagcctcccgagtagctgggactacaggcgcctgctaccacgcccagctaatttttttgtatttttagtagagacagggtttcattgtgttagccaggatggtctcgatctcctgacctcatgatcctcctgcctcggcctcccaaagtgctgggattacaggcgtgagccactgcacctggctataattatatttctttgtgcggttatccaattgtttggcttccccattagactgtaataactatgagagcaagaactctctggttttgctcattggcatgagtacttaccttgcacatagaagatattcagtcaatcttttttttatacttagtgaatctttaataaatgaataaattgaggaagaacaaatggctaataagtgaaatgtcttcccaagtttaaatgaagtgtcactttttatctgaaaagtgaaacaataattctacttaatggcaagatagtctcaaacttggctggttagtatgcagatcaaaagaatttttctagaaaacaatttgaaagaatgttttaagagatttttatatattcagatctgttgaccccaataattctaatcacgaacttcatctgtggtagccagccaccaagatcacccccaattagccccacctccttgtacgccttgtgcaaacccttcctacattgtactagagttgatctgtgtgaccaataatatagagtagaagcaatggcatgttacttccaagattaggttataaaagatagtgaagaaggccaggcatggtggctcacacttgtaatctcagcactttgggaggccaaggcaggcagatcacaaggtcaggagttcaagaccagcctgaccaatacagtgatacaaaaattagccgggcatggtggcacacatctgtaatcccagctgttcaggaggctgaggcaagagaatcacatgaacccgggaggcggaggttgcagtgagcccaagatcatgccactgcactccagcctgggcaacagagtgacactctgtctcaaaaaaaaaaaaaaaaaaaaaaaaaaaatatatatatatatatatatatatawaaatatatatatagtgaagcttccttcgtccttcttgggtgtgttcttactctcctggatcacttgctctagggaagccagctgccatggcacgtgagtggcctgtgtggcaagaactaaagcctactgccgacaaccatttaattgagcttggagcagattcttcagccccttcatatgactgtagccgtggccaacagcatgactgcaacctcacgagaaaccatgagccagaaccagccagctgagccattcctggattcctgaccctcagaaactgtgaaataataaatgtcagttgttttaagatgctagtttgttttgcagcaatagataactaatacaccatcctaaggaaatacttacatgttctagtagttgttaatgttggcatatctagatttcgtatagtgtaaccattttttatcttagggagtaaattcattggaatgctttcagcagcaaaaaaatggaaaacccaattaaatagatgtgcatataagtgaagatgtatattttactctctctatatatattttactctaactgtatatgcagaggtagtcaggcatcagggatagtttaacatgacaactcagcactattgaagccctctctgtccgtgctctgccttccttactgttgtctttatcatcagcctggtagcagttaagctacagtagcccttggtatgtcctgtcaagacagggcaacatctagaggaaacaactcccacttytacgtgggtctttcctaggagctcagtggtggatttccctcatatctcttaggctagaattggatgatatatcctttcctaaattaatcattagcaggagcagtaaatacctgaagaaaattacggttttattagtaagcagggagaggagagagaaatggatcctggatgagcaactgtcctgtccacaataaggagtgatcttgtttcgctttttgagcagctcatattgttgttgcttctcaatccccactttacctcatccttgcacacctagaatacagcactcaatgcatggggatggtttcgggatgaaactgttccacttcgtatcatcaggcattatggagcaggcaacctagatccctggcatgcacagttcacaacggggttcacacttctttgagaatctaatgcccatgctgatctgacaggaggtggagctcaggcagtaatgctcgctcacccaccgctcacctcttgctgtgcagcccagttcctaagaggccacagaattagtaccagtccatggcctggaggttggggacccctgctctagactctgggatttcttcaatggataatattaaagggcttgatttacaagtttaaatgctcttggtgggtcggggtcgggggcgggtacatagatgtcattcactcttaaatacaatctacaaccctgagacagggttttactctgctgcccaagctagagtgcagtggcctgaacgtgtctcactgcagccttgacctcctggactcaagcgatctccccacctcagcctcccatgtgtggctggaaccacaagcatgtaccatcatgcccaactagtttttgtttgtttgtttgtttgttttttgagatggagtctcactctgtcacccatcctggagcgtggtggcatgatctcagctcactgcaacctccacctccctcccaggctcaagcagtcttcccacctcagcctcccgaggagctgggaccacaggcacatgccaccacaactggcttgttttttgtatttttggtagagacagagtttcaccatgttgcccaggctggtctcaaactcctgagctcaggtgatctgcccacctcggcctcccaaagtgccaggattataggcatgagccaccatgcctggccaattttttaaaaaaatgtttgtagagcgcagtggttcacacctataatcctagcactttgggaggctgaggcgggcggatcatgaggtcaggagttcgagaccatcctggcctctgctaaagatacaaaaaattatctgggtgtggtgacgcacacctgtaatcccagctactcaggaggctgaggcaggagaatcacttgaacccaggaggcagaggttgcagtgagccgagattgcaccattgcactccagcctgggtgacagggtgatactccatcttaaaaaaaaaaaaaaaattttttttgtagagacagggtgtcactttgttgcccaggctggtcttgacattttaggcttaagctgtcctcacatgttggcctcccaatgtgcttagattacaggtatgagccaccacacccagtctacaacctgcttttaaaccgtaagatatattaagtattgcatatattctgttatgtgctaagaaaatggaatccaattgctatacttctgagactcatctctgccacatactacggtctaatcttggtcaaaatacattcttgaaatcttaccttttttttttttttttttgagacagtcttgctctgtcacccaggctggagtgcagtggcaccatcttggttcactgcaacctctgcctcccaagttcaagtgattctcctgcctcagcctcctgagtagctgggattacaggtgctgccaccacgcccagctaattttttgtatttttagtagagatggggtttcaccattttggccaggatggtctcgagctcctgacatcaagtgatccacccacctcggcctcccaaagtgctgggattacaagtgtgagctaccatgcccggccctccttacctattaaatgggaataatgataattaatatttctgagggctgttataataaagaacataaaagtgtcatcacatagttagctcccaggagatattagattgcattcttttccttgcttttttctgattcccaaatgtggagatttatagacatttttctatacttgrccttttttaaaaaaaataataaggtatgtaaatttttggctgtccagtttctcaaaataattgaaaaggctaattcaaagcaaacatttaacatggtgaaatgggtcattagagagatctggtgtctcatccaacccaaatttaggttgtatttataaagatagtgacccagaatatgaatctgaartcctaagcatgaaaacaggcgacatttgcatacttttttaaaaagtacttttaacttcacaggcagctagcttctttgtttccacctcttcttttctgattatgtgaaaggtagcagtttggcttggcaggttcttgctggggctttgacacctttccgggccaattagttcacctttgttctgtgaccatggaccagacctttaatcctgagcagccactgttacaagtgcagtttgttctcatgtgagtagatatgtacaaatgtctcaccaccattagaaaagcaactcaaagtatctctcggagcagtaaagtaggagagcagcatatggctgagcaaaaccaccagtaccactatctcaagcaagcatcatcttgcaagtttcagtttttttcccatgttatttgaaccagccttacttcagcaaaaaggtcatgtgacagtgagacctacatttaaaaaaaattaacatacttctctctgatagtcattcaacaagtatcttgacatctatcacctttcaggaaaaaaaaaggaaatcccgtcaaaagtaaatattcactgaatgtatcctccttttctgtataataaaccttagtaaaaactgcacatatgtaagttgatgatataggtgtatctttttttttttttttttttttttttttcgagacggagtctcactctgtcgcccaggctggagtgccatggtgcggtctcggctcactacaagctccgcctcccaggttcacgccattcacctgcctcagcctcccaagtagctgggattacaggcgcccgccactactcccagctaattttttgcatttttggtagagacggggtttcaccgtgttagccaggatggtctcaatctcctgacctcgtgatccacctgcctcggcctcccgaagtgttgggattacaggcgtgagccaccgcgcccgtcctgatataggtatatctaaatctcatttactctgactaacatgcattcatttcacaattctgtatatctggtatctgaaggtactgatttggatgtggttatcatactagtttcttggcattttacaatttatactaacttttcctttataatagagcatgctctcttagtatatacayggcaagctgatggaaatgagggattttgtttcattagtaaccaaactcataaaaggtaataatgtttagggaataaaatttctgattaacttaggaacagttaatttgtggtccaattaacttatggtagtagatttcaggggactataaattaatcgtttcttggttttctgaattttctattttttttccagtgakcgtgtattacttgaataatttaaaatgtagaaatgatgaataataaagtcttaatcacagtaagaaatatgtaataaacaaaactgaatctttgattttagagatctttcaattattctgaaatagaattatctatacattctatatatagatatctgtatctatatagttatatctatatattgatatatatacattctatccctggactgtgagcttcttgaggacaggctgtttattaatcttcatatctatattgctttgcagaaagcctgaaccataatagaaccttaataaatgggttttttttgcatgaataaatgaggatgatatgcaaaccacagttaattgagagtcatacattttttaaaatgttaatttaaacatttgagaccaataaatgtaaaatattatgctcattagcttttttctttcttaacagctttattgaggtatattttatgtcataaaattcacccatttcaagcctacgattcaatgatttttagtaacttttatcaagtgatacagtcattaccataaatcatttttagaacattttcacacacacccctataaggtccctcatgcccatttacagttcccacccccagccccaggcaatcactaatctacatttcacatcaatggaattatacaaatatgtggtctcttgtgtccggcttcttccacttagcataatgttttcgaagttcatccatggcatagcatgtgtcagtaattcctttttattgctgaatagcatgtcattatatgtccatatctacccattagcttttaacatttaaaacacacgcacacatctacttaataatgcaacagataaacaggtactattcatttagcaaatacttgaaacttgaatatggcctaagtgattaaaaaatataaaagtgactagtaccaggtctaaccttcaaggaaacatataagaaatcatacagttcagagagaattaactgctgtgtcataatataaataagataatgttagtctaaagaggaaaatatttgtggtagtatttgagagcgctcctcaaagaagtgatatctggattagatttaaagttcacacaagtaggccaagcacagtggctcatgcctataatcccagcattttgggaggccaaggcgggtggatcacctgaggtcagaagtttgagaccaccctggccaacatagcgaaaatcgtctctactaaaaatacaaaaattagccgggtgtagtggtgcgcacctgtagtcccagctactcgggaggctgaggcaggagaattgcttgaacctgggaggcggaggttgcagtgagccgagattgcgccactgcactccagcctgggtgacagagcaagactccatcacaaaaataaataaaataaattcacgcaagtgtgaaaatatgtattttattcaagaaacagcaacttcccctgtgtgttaaattcaggcctcaaaggggatattttgtgtaggagatgggactagaagtattgcttggtactataaaagggaatgccttgaatgctatgctatagagttcatcttgattctatgagcagtagagaggcattaaaagagaatttttttttaattaattttttttttttttgagacagagtttcactcttgtcacccaggctggagtgcaatggcgtgatgtcgkctcactgcaacctctgcctcctgggttcaagtgattctcctgcctcagcctcctgaatagctgggattacaggcacccaccaccaggcccagctaatgtttgcatttttagtagagacaaagtttcaccatgttggccaggctggtctcaaactcctgacctcaggtgatccggccgccttggcctcccaaagtgctgggattataggcatgagccaccgcatccagcctaaaggagaattatttcaattctttattctgaccaagttaggaaagatagaggaaggtacaaaagagggagagagataccaaaagaaagacaaaaaattcaacaaatatttattgcccacctaagatactatattagatgctgattgtgcagcagaggccaaaccaagtccttgctttcatggaacttatagtctagtaaaggagacagacaataactcatttaacaaataagtatatgagtggtccagtaatatcaaggaagaaaggtttaacgcaaggtaaggatataggaaataatgggggaggctggtagactattaaagatgagttgaagtttaagtagagacccaaaagtaatgagaaatctagccatgcaaacktctagagagtgtatctgcagaacagcaagtgcagaggcctcctagaggccaagaggcatctaggaggtgatgcctagagtgtttggaacagctggaggccattgtagttctggyttgtgtttttaaaggtcaccctggcagttgggtgaacaayagactgtaacctttgtcaaagtcaaataaaatgtatagagagccaaatatctaaatttaacagtttacttgagaggaaagaattgcaattcagggtgtacacacagaccaaatggtctttagtatgtctgaagaacagagagaaggttggaggttttatgaaaaggagaaatgttacatattgctctttgagagagttcatccgcactagtaaggttctggggagttggcagattttgattagtgaatgatagtggtggataaaattagtcttagagttgcagcaagttatttcagcaactattagataaaactgatttgagattatagcaggcagcttgagcagccaggcttgtagagacttacagttttggagcaatgttacatattctaagtcctttttcctcctgtgacttctcaactctgttttagtcaggtgtgacaagattgacccaatttctgtgatcaactttcacactttgtacatatttcatttcgcatgtatgtaggtttatctgtaggattaattcctggacatgggattcctgagtcacagggcaaattcacttataattttgatagagattgtggaatttccagctagtttccacttccaccagccatatttgagaggcctatttggtcacagccttaccatcactaagagggaagctgagagttttttttttttattggtcagaagtcactaaatcaagatgttgacagacttgtattcttcctggagttctattggaaaatccatttccttgccttctctaatttccatgtttattccttggctcatggccccatctctcatcttcaaatttctctctcctgtcattaaattaccttttatgactttgactgtgcctccctcttataaggactactatgattacattgagcccatccagttaaaccagagtaatcccctcatttcaaaatcctgaatttaattacatctgtatagtcccttttgccttgtaaggtaacattcatagcttccagggattaggatatagacatctttgcttaaacattgagcattgttagcctacctcagggagattcgccgtttgtctgtgataggaaatatgaattgttttcctcattgtcctttgtctcctaacattgcccgtggttttgtggtggttttgctgtttttgccatttagagtttatcctggtaaatagtacgaaatgcagctcagactttattttttccagatagctctttagttgtaccagcaccatttactgaaaagttcaacttcttcctaaaatatagcaaatccctatatatagtttggttgctttctggactttctattttgytccctagtctgtctctctatctaaaaagtacatatttttaaaatttctgagattttacagcatgttatagtatctggtaaggcttagacaaaatttgctgtccctctccacccctcccccaacacacacacattcattgctcttctttttcaagattttcctggctgctcttctttgtttatttttcccatatgaacttcagtttgcccagtgtcagagggaaaaggtattgttagttttattggagtaacttatgaggttggatcttactatctttgaacatgatatgtctttatattcattcgagttatctttgttcctgcaatagtattttaacattttcttcattcagttttgcgcattcagttttgcgcrtttctaagcttattcccaggttttgttttttgttttttgttttttttggttttctttgagatggagtctggctctgttgtccaggttagagtgcagtggcgcratctcagctcactgcaacctctgcctccctggttcgagtgatcctcctgcctcagcctcccaagtagctggtactacaggagtacttcaccatgcccggctaatttttgtatttttagtagagactgggtttcaccatgttggtcaggctggtctcaaactcttgacctcaggtgatccgccccctcaccctcccaaactgctgggattacaggtgtgagccacctcacctggccttattcctaggtttttttctttgttttgggttttttgttgtattttgggtttttttggacagggtctccctttgttgcccaggctggagtgcagtggcaaaatctcagctcactgcagcctctgcttcccaagctcacgtcattctcctgcctcagcctcccaagtagctgggactataggcacaagacaccacacccaactaatttgtgtatttttggtagagacgggatttcaccatgttgctcaggctggtctttaactcctaaactcaagtaatctgcccacctctgcctcccaaagtgctgggattacaggcatgagccaccgttcccgaccttattcccagttttttaatcttttatttttgtattcataatgaaagaaaagatcctatttataaaacttactgattagtttttatgtatgaaagctatagttaatacaatttattatgttaataataaattattaattttagacactgctaccttactgaattatcttctagtttatagtagttttttagttgaatctcttgattttcccagtatgcagttatattgccttcaaacrgtaagagttaaactcatctttcctaatttgtttacatctacctttctcttatctcttctattacattgtaaatatcagtggtgttgtgtgcatctctgtcttactcctgacattagtgagaaaggctcatgtttcctcataaaatatttgctgacttttgggctgacacacacacccctatcacattaaagaaatacacatcagttgctatttttttattttttagagttagggttctcactgcgtcatccaggctggacagcagtggcatgattatggcccactgcagccttgaactcctgggttcaagtgatcctccctcctcagcctcctgagttgctacgattacaggtgtgagccactgcacccagctcttcctattttattctggacattttttctcatcaagaataggagttgaattttgtcaaatacctctgcagtatatatggagagataatatggtttttcttaggtttattaatatatattgtcacattttaaaatacattctcagatttataaaattaagtatgttataatttatacctaatgttttgtaaagaaggtcttaacattatgcattgtttctctcctgtgtggcttttctgtcattatccaatgctgtgttgcatatttgcaaccattgccataagtggaattttttttgttgttcaaatacttaataaaattaaggtgatgttgggcatggtggcacacacctgtgatcccagttacttggaaagctgaggtgggaggattgcttgagctcaggagtttgagaccagtctgggcaatatagcaagaccccatctcaaaaacattgcatgaagttaagctaataatttgatttgaccagtgggctgaagatgcccctcaacatggcagaagaggagggggctctatttcagctgaccttttggtgaccacttttttttcttaatattttttattttgtctccaagcaattgtgaaaagagaaaggattataggatcaggagcaggaagaaaagtgtattgagttaattaatccttctgggtaggttccagttagtttgacgtttcaaataaatgccataaaatgaacatggttttatatgtttgcttcagcattcctttcctcagagccctactgtccaatgctgagcacttaaattgtggctagtgaggtgttgtaagtataaaatgcacagtgattttgaaaacttagtataaaaaaagtgtaaaggccgggagcggtggctcacacttgtaatcccagcactttgggaggccgaggcgggcggatcacgaggtcaggagatcgagaccacggtgaaaccccgtctctactaaaaatacaaaaaattagctgggcgtggtggcgggcgcctgtagtccagctactcggagaggctgaggcaggagaatggagtgaacccgggaggcagagcttgcagtgagccgagatcgcgccactgcactccagcctgggtgacacagagagactccatctcaaaaaaaaaaaaagtgtaaaatagctcactaataattttcatattcaatatatgtttaaaatgatatttggatatattgggatagataaaatatgtcattaagattaattttacctgtttccacttttttttatatagccactagaaaagtttacattacatatgtggttcacattatatttccattggacagcattggtctagaggtggtagatgtgtatatatttatttataaattatatcctcttttacaccttgtttcttatgagaataaactttcatgaagactataatattcattctccattataatagattacatcttctctgatttttctttcttttgctttgtttgtttctttgttttgagacagtcttgctctttcgcccaggctggagtgcaggggtgcaatctcgactcactgcaacctctcccacccaggttcaagtgattctcctgcctcggcctcccaagtagctgggattacaggcacctgccaccacccggctaatttttctatttttagtagagacagggtttcaccatgttagctaggctagtcttgaactcctgacctcgtgatccacccacctcagcctcccaaagtgctgggattacaggcatgagccaccatgcccacccttctttttctttttttaagatagagggtaaactgggcgcagtgactcatgcctgtaattccagcactttgggaggccaaggcaggcagattacctgagaccaggagttcaagaccagcctgaccaacatggtgaaaccccatctctattaaaaaaaaaaaaaaaaattatctgggtgtggtggcttatgcctgtaatcccagtactttgggaggtcaaggctggcagatcacttgagctcaggagttcaagaccagcctggccaacatggagaaactctgtatctacaaaaaatacaaaaaattaacttggtgtggtggtgcatgcctgtggtcccagctacttgggaggctgagatggaaggatcgcttgagcccgggaggtcaaggctgcagtgagccatgatcatgccactacgttccagcttgggtgacagaacaagaccctgtctcaaataaaaagagggggagagaaagagacagggtcttgctctgtcatcctggctgtagtgcagtggtgcaatcatagcttacttataaccttgaactcctgggctcaagtgatcttcctgcctcagcctcctgagtagtcaggactacaggggcacacccccttgcctagctatttttttttttttttttttgtagagtcttgctatgttgcccaggctggtctcgaactcctggcctcaagcaatcctcctgccttggcctcccaaagtgcttggactataggcatgagccaccatgcccagccttatttttctatttaattatttctaagaaaatgtagttccttccatatgcccttgacattttcacataaattaaatgcaataggcttcttgtgcttaataccagcacttaagaactgatattgactatagaagggagttagtttgaagtctttctactttttcccttatcctgtagggtatattttaatagaagttccctagcttagaataaaatttgctttaacatttctttaactttccccctattaccataaaaaagcagttttcccaccacattctttttaggtagagctgaggttaggcatcttttagttctgtcttgttccaatagcctgagtgtttttgaatagttcgtttcttaacttttttattcttcaaaaacagaaacaattaaattactcctaaagtcttttttatcttggcttttgttacatttttaggaaagttatatcacagatgatattggaatatcgacttggaaggagcagacttttctctcccatggtgccttactagcaaagagctgccaagctgcaatggaattagcaaagcatgatgctgaggttcagaatatggcatttcagtatgggaagcacatggccatgagtcataaggtactttgcacaccctttatcttttttcagtacttaaatagctaaaaygacacacaagaaaccttttgccatttaataagcttcttttatatttcaaaaatgcttattgtgtggttcaaatctgtcagtcctggatgattgttatgtaatgtmaatagtataattgctaagtattgtgtaattcttacagaaagccacagtttacttgaaccatttttgtgatgtttgtcttttcttcccacctgaaagggttcttgagagaactcttacatattattaaataacatatttacagactggaatatattcacataatggaagaatatttgtcttttttgttacagttcccttatagcttttttttttttttttttgagatggagtctcgctctgtcacccaggctggagtgcagtggtgcaatctcagctcactgcaacgcaacctctgcctcccaggttcaagcgattctcctgcctcagcctcctgagtagctgggattacaggcacatgccaccacgcctggctaatttttgtatttttagtagagacgaggtttcaccatgttggtcaggmtggtctcgaattcctgacctcgtgatctgcccgccttggcctcccaaagtgctgggattacaggtgtgagccaccacgcctggccccttatagctctttatataaaacatgttatgaaaagttaataaaattcagaaatatagtgaataaaattgaaagctttaattttaataactaattctttgaatgggcatatgaaatctaaaatatcccaagattagctgctgtgttgttgcctctctctatatatataattttaaatttaatttaatatatactattcagatgttacttaaatagttcataagggggggaatatatacatatataatatctccaggtgagctttttgcatattttatttaatcttagattagtttattaagcaattctatttattaaatctttatctaaatcttttcctttaacttaaaaagtaaaataaagaccaccacccactagaaaaggaatgtattagggaataattctggagaattttacaggttattgttaatcatctgaaatttttttttttttttttgagacggagttttgctctcgcccagaggggagtgcagtggcgcaatctcggctcactgcaacctctgtctcccaggttcaagcgattctcctgcttcagcctccctagtagctggaatgtgtgtgcaaaccccccccaatttttgtttttttagtagagatggggtttcgccattttgaccaggctggtctcaaactcctgacctcaggtgatccacccatcccagcctcccaaactgctgagattacaggcgtaagccactgcacctggcctgaaatattcttttgtttattaaagtatatctaaaaactgcattccttaagcttcatatttcactgcattaactggtactttctgaatataactaaaacatactagtgtatatacatttcactaatttactcatttaattgcttcttgtagataaattctgatgtccagccttttattaaagaaaagaccagtgactccatgacttttaatctaaactcagctcctgtagtcttacatcaggaatttcttggaagagatttgtggattaaacagatcggagaggtaaaatgaaattactcctgttttaggtaccagtagtaattagtggattttagaacataattgatatttcttggtgatatatggctatagatgagccttaggcatattcacgtaacaggtaaaatcctttctttgtaatcttcgtttttaagaggtaaaagattagttaaagttagagattgcagtactgaatttttctattatctgagttcttagaatactgcaacacaaaactagtgcctgtggtgaatgctaattaactcagatgactttttttttctaaaggctttcaaaaattgggctatggtaatagcaccaccctataactgactgcaatttcccatctgtggactctcgcacaagctgcagaattccaggagctccgtctgtcagctcattgggttattttaaaacaaacttggaccctgaatacttgttctgaggcattatcaaagcgggggggaaaaaagcatggcgaagtgggaggggtaaaggggcttgaattgggtgaatttctcattttggcagatgagagggaacttttttggttttcttttaattcagaaactctagtgcaaaacttcttgcctttttagccaaagcctcttggaatttatttaacttcgtggctgtaattggttgggttaatctgaggctctggacagagaaaccaggcacagctgagggtgggggtagccaccatccttaaaggagagagcatgggtgggcgcagtggctcatgcctgtaatcccagcactttgagatgccaaggcaggaggatcacttgagctcttgagttcaagaccaacaacatagtgaaacctcatctctacaaaattaaagtttttgaaatttaaaaaaaaaaaaaaaaaaaagcttagagcctaagtgagtatctgcgttctgaaagatttccctcctcccaacccttattgattctcaaaatgctggctgccaacttaaaattcctcatattcaccaagtagaaaactggaggatttctttctgaagaaactgtcaaactcaggagaaaaagccttgcagatgtggatatttggggcctcctcagtaaacatggcatatccctgagcagtcctcctacagcaagacccaccacttgacaagcctcagaggatctaagtgcccagaatatctgctgccttactctgaagcagaataggaaaagaggaccactgggcatttgagaaaagctgcttccacgaaacagcaagtcaaaaacaaactgataaaaagggaacttagmggaaatagagacaatgcaatcaaaggcagatgtttttcaaagcactataatcaatatacttgacaaggaaggatattaaatccatggtataataatagatgatccattaaaaaggacaattcaagaataaaaattagaattataaaatataaaaatatgattgcagaattttttaatcagaagaatggaagatacaaatgaaaaaatctcccagaaaagtggacaaaaaagatgattttttaaaaaaagaaaaaaaataagaaaactaaggactctttcaggaaaccttgtatctattaagagtcacaggccaggctgggcacagtggctcacacctgtaatcccaacactttgggaggccaaggcaagtggatcgcctgaggtcaggagttcgagaccagcctggccaacatggtgaaacgctgtctctgctaaaaatacaaaaattagctgggcgtggtggtgcacacctataaggcagaggctgcagtgagcgagattgcgccattgcactctagcctgagcgacaagagctaaactccgtccccaaaaaaaaaaaaaaaagtcacaggccaggtgtggtggctcatgtctgtaatcccagtaatctgagcacttgggaggccaagggggtggatcacttgaggtcaggaactcaagaccagcctggccaacatggtaaaaccctgtctctactgaaaatacaaaaagtagctgggtgtggtggtgcacgcctgtaatctcagcttctcaggtggctgaggcacaagaatcacttgaacctgggaggtagaggttgcagtgagccaagatggagccactgcactccagtctgagcgacacagtgagactgtctttaaaaaaaaaaaaaaaaaaaaaaaaaaaaaaggccaggcatggtggcttacacctgtaatcccagcactttgggaggccgaggcaggtggatcaccagaggtcaggagttcgagaccagcctgaccaacatggtgaaaccccgtctctactaaatacaaaaaattagccaggcttggtgactcatgtctctaatcccagctactcgggaggctgaggcaggagaatcccttgaacccaggatgcagaggttgcattgagccaagattgcgccaccgtactccagcctgggcaacaagagtgaaactctgtttcataaaaaaaaaaaaaaaaaaaaaaacaagtcatagacagagaaaactaaaaacagaggtaagaaaattaacacatttttaaaaataaaaataatggctggacatggtggctcatgcctgtaatcccagcactttgagaagccgaggtgggcagatcacttgaggtcaggagtttgagaccagcctggccaacatggcgaaaccccatctctattaaaaatacaaaagttagccaggcatggtggcccgggcctgtaatcccagctactcaggaggctgaggccctagaatcacttgaacactggaggcagaggttgcagtgagctgattgcacaactgcactccatcctggccagcagagtgagactctgtctcacaaaaaaaaaaaaaaaaaaagacactttactgagtttattttaatcttctaaattgtaatgtacatttttatgtaaagctttataagataaccatcttgttctgtgaatgcctcctagtcagaaatagggaacacaatttgcataacacctaggagagacattccaccctaaatctcaaggaggttgcttattaatcctgaaattagttctctttctgattttttcatgttatttaccctcctggatatctttgagatcctttccttccctcccctaaagccctctccttcagttttgaatttgattgcaagatccttaacaataatagcaaactcaggccgggtgtggtggctcatgcctgtaatcccagcactttgggaggccgaggcaggcggatcacgaggtcaggaaatcgagaccatcctggctaacatggtgaaaccccgtctctagtaaaaatacaaaaaattagtcgggcacagtggcgggcgcctgtagtcccagctactcgggaggctaaggcaggagaatcacttgaacccaggaagcggaggttgcagtcagctgagatcgcgccactgcactcgagcctgggcgatagaacaagactccgtctaaaaaaaaaaaaaaacaataatagcaaattcatctttgaattacccatactacctgccacagtggcttacttggagtaattaccaaattaatatttgtcaaaaagtgagtgtggtgtggtcttgcaggttgagactgtttggtggyagcccggttttgttagagttaagttggtataacagaaatggcccacagaggaccaggatttggaaggtcagatcaagattgtccagcccttatgagctgcatgcagcccagaacagttttgaaagtggcccaacacaaattcataaactttcttcaaacattatgaaggtttttttgcaattttttttttttagctcatcagctaccattagtgttcatgtgttttatgtgtggcccaagacaattcttcttccagtgtggtccagggaagcaaaaagattggacactcctggtctagattctaatttggactctgctagcatctaagtaaacttaatcacattctctcatatccccattattcttttctgtaaaatgatggcattaaactagatcttttccaaagtccctttcagctctaaaataaatccaagaactagttctcttagacaagagatgcattataagaaaaatatttatctctattagaaacaggccgggcatggtggctcacacctgtaatcccagcactttgggaggccgaggtgggcggatcacttgaggtcagcagttccagaccagcctgtccaacatggtgaaacccggtctgtactaaaaatacaaaaattagctgggcrtggtggcgcatgcctgtaatcccagctactcgggaggctgagacaggagaatcacttgagcccaggaggcagaggttgcagtgagccaagatcgcaccagtgcactccagcctgggtgacagactgagattctgtcccccgcaaaaaaagaaacttttacaagttttaacactgagaaacagaaaaatcttgctgtcaatgatggaagtcacctgtgatttcttattaccacatttaaaattacttctttactctgcccaggcaggtttgtgtctcatctactgttttgatttcctgcttggaaagactgagaattattgactagacaaggaagccaggaggtgacatactctcgatacccgttcagcaccattgtgaagctaggagcaagagcacccctgggattttccttatcaggctgtgccacctcttctccagcagctcctttctcctgaaaaatcttaggattaggtagccctcttccatcacaactataggcctatggatgcatgtgcatgttgacacacacgcacacaaccacactctttcacaaaaggcagttaagaccggaaacagctgaaaaacatttgctgagcattttctccatactaaattctacagatctctccctgccttaattttaaatttaaatttgtagctgctgagaaataatgatcaggaaaaaatactgttagtgaatgggttattcaccctggggaggtgaagtcattactcagttatcattttgattcctaataaaagaaagtagaatccttcagagcaccacagagctctgactctctcagggagtccaggggctattgcaggtcagcaagctttatttttaatgatccttctagttttctgctgccactataagtcacctgaagaaataagaattatggttagattttcttggctattcctaatagtactgaaatgtcacttgggcttgtgacattctgacactgtcatgaaataccttaagtgtactacaaattaccattgctaagctgtaactcgcttgtccctagatagcttactattgctccttattcagaaagtaaaacaaagactgctaggcaagactggtgtgcgtgaaaataacacatgcctattcttaaacaaaagagaaaatgcacatgcagattcctcattaataacacatgtgatactcttctagttctttaagacatttttagtggtttcaaaaggaataatattaatatcatcctctatcatagaaggtatacaatgtaggcatttgaaagaactatatgcatgaccacaaagactatgaaatggctctagatatctcctaaattaaaatatttcttaaggctttctgttgcacttaaggaaacaaagtgcttgactacaggagatacagaaataagttgcctaaaggttgtctatggcccagtagagaggagataagataaatacataaatatagaaacataaggaatactgtgattcatgccacttggggagcatagaggaaagacaattgatgttcagttggaaaagtcaagaaagaggtttatgaagtcggtattaataatatgtgagatagtccttaaagaagattggatagcaaagatgagaatgggggcttcctaggcaaaggaaaccatgaaaaagtgatacaggtgcaggcatgcaatgttgtcaaattaaaaaaaagtgtcttaatttgggtggaatgtgaaaaacatagggtagtatcagggacagatgaagaattgctctgaaatagtaataactatatttaaaagactggtttatgtaaaaatatgtacatgaatgttcagatcagcaatattcacaatatccaaaaggtagaaatagcccagtgtctatcaactgataaatggagaagcaaaatgtggtatatccatacaatggaatattactcagccatggaaaggaatgaggtattgatacatgctgcaacatgtatgggcctttaaaacattatattataagcagtgcgcggtggcttatgcctgtaatcccagcacyttgggaagccgaggggggcggatcacgaggtcaggagatcgagaccatcctggccaacatggtgaaaccccatctctactaaaaatacagaaatttgccgggtgtggtaataggcacccgtagtcccagctacttgggakgctgaggcaggagaatcacttgaacccgggaggcggaggttgcagtgagcctcgatcatgctactgcactccagcgtggggacagagtgagactctgtctcaaaaaaaaaaaaaattataataagtgaaagaagccagatgcaaaaggccacatatcatatgattccatttatgtgaaacatccagagtagacaaatcatagagacagaaaaaagactggtggttgcccagggttggggagaggcgaagcgggagagactgtttaatgggtacaggtctccttctggggtaataaaaatgttcggcacttgttagtggtgatgattgcataacattgtgaatgtactaaatgccactgaattatactgttttaaatgattaaaatgattaattttatgttatgtaaattttacctaaatttttaaaagactttgggatgtttgcctatggcaaaccaacttgatgaagaagtcatgaagcagacattgaaagtttttgagcctgatatgatcaaggtctgagctgcgagggaggtaaatctggctatattatatasgatgaaaggaacaaagagatactaaaagcaaggagatcaattaagaagtttttggaaacccattgataagcacaagagaaaagcccaatcagagtgttggcaatgagaatgggaagataaggaggttaagcgtaaaactcatttcagagaaaatatatgggactagaaaactgatctgatagggagaggctgacaggtgtggactggggagtggcactcagaggctaaaacaaggattttggactaggataacagaaaaaattaagccattaatagaaataggaaagttaagtggaaagactggtttaacttaggttcttgacatggtgagtttgaagtactccatcaaggttgatggccgttgccttgggaacttgctgctggaggaagcaactaaattctrctattagcctgatttccttaatcatggcctttctgagacctgagycrattttttttcctggtcacactgtgcaatttaaaatttcatgtttcttccagattccaagagagcagcatagcaagaaaaacaggttacaaagaaataacaagacctctgagcagagagagatttgttatgtagataatacaagtagtatctcctcgccttactctagtatatctagtatctccttgcctctctcctttctaaaattggacaccatagccttctacatctgctgttgcttctttttctccagtgaaccaaaggaacagaatatgagaaaattaattccttagacatccacgcttgcctctaaaagtcgattagctttcccagttgaaagagatggtaaaatcaggtacccaagcaaagcagtccaggtgtgaatggtgttaacttccttgcacatgccttctgcgctctcttattcatagagaatgaccaagatagcagagaaaaggcctgccctgttcctttatattctgctatctttccagctctgtaactagaaagccgagcaacacaaggcctgcttctaccaaaccaatactcagtgggctgctctaacttccgggctagcagatgtagtagatttctgatttgtgacccttctttctgttatccccatacactacacactgttttgttttgttttgttttgttttgtttgttttttttttgcagagatggccagcctgaactgtattttaaatagcattatagggctgggtgcagtggctcatgcctgtaatcccagcactttgggaggccaaggcgggaggattgcttgaggccaggagttcaagaccagctaggcaacatagcaagatcccatctctactaaaaacttttaaaagtagccaggtgtggtggtgtgtacctgtaatcccagctattcaggaggctgaggctagagaatctcttgagtccaggaggtcaaggctacagtgaaccatgattgtgccactgcactctagcctgggcaacagagggagaccctgtcagacaaacaaataagtaattaactattatagtaaatgtcagtgttcttagggacaaatgctgaagtatctaggggtgagcatccttatgtctaaaacttactctcaaataataaatggtcatggagagaaagggggaaaacagaagtggtaaggtgttagcaactgttgaatctaagtggagggaaaatgagtgttcattgtattctttcaactaaaaagtttgcgggggaaggtagttttccttgaagatttaaaaaggaaatctttaaaaatggcagttattctaaaatatagcctgtaacatttgggaagaataacctgataagtagagatgattagtctctagcaatttctggactccctgctgtggaatattagttttctgcttttagaaaaaggtgtccccatatccagctttcaactccagataacagtagttggaaattggaaacagttcatttatgtcatccaatccttctttgttacctgacttataaaaaaacgtttgtttcttaaagtaaaagaccacattgtacatccattacttaccaacagggaatctgtctgcctttagtctacagagactggtatataaacctttggaattaattcctttgtgcatcctctcaatcagagtgctggcttttttttttttttttttttttttgcttttgtatggaatattgttttacagtgttcactatagctgtccgaggaggcctccagtgtcatgagcacaggcacactatcttgtctattttcacatttttaaaagataaaacaaggttcaaaccacacattctctgtgaactgctaaagatttggaaaaaattactttcttttctcttgacctggattgacaagaagcacacctacaggaggcaaaaagatgagtgaatcccttttaaagaccctagtaatgaagccctcagggaattgctgtgtatggtagaatttacagcggcttctggggacgaacagtgtggcaggaagaggttcaggactgctggctgttgaaatatagattccatttattttatatcagcctattttgggcccctgtgagaaagttattttartaatatcttgctctggctggccgcagtgactcatgcctgtaatcccaacgctttgggaggctgaggtgggcggatcacctgaggacaggagtttgagactacctggctaacacgacaaaaccccgttatactaaaaatacaaaaattatccaggcatggtggtgggcacctataatcccagctactagggaggctgaggtaggagaatcgcctgaacctgagaggtggaggttgcagtgagccgaaatcacgctattccactccagcctggggaacagagtgagactccatctcaataataataataataatatcttgctctgctagaaatacacatgataagtggcaggtgtcagaacaaaaagggaaaagttgcagtccattctcctcgagacttatggagtttacatagttgttctctttcagcctttgaagtaaaccctgatgcacatagaagcacaaattaaaaaagacattagacataggccagaccaatgatcctcaaacaaatcagaatcacaggggtaggctatggagaatctgcatttttcgcaagctacccaggtgattccaatacatccagcccagcatttgtgagagcccagcatctgggaacttctggtctggtctggtgttctacagatcaagaaatgaaggcctatacaaaaatgtaaaaattattcaagttattaaccaatgaaggactagaaaccatattttctggctcccaacatatccatcttcccaggtcacaatgcctcttgaagtgttcacaattaagatcttaggccttttgctgtaatcagtagacaaggcctttaatccctgaaattttgaggtgtatgtcttgaaatctctctggagatctgttaacttccattctaaggtcttttcctttagacgcactgcttttaaggttgaagcacttaattacactaattcttctctgtcctagccttttgttggttaattttcatgaaatcattgaatttgttttctacagatggaagcttaggttcccttctttagtgtatttataaatagaaggtgggtgagaaaatgaaaatatgccattgttctatatgggtaaaaattacatgtaaggcatcagctaagggctctacattacctgcatactagctcacaaacaaaaacatccagctttcctagaactaggagtgagtaaaattcgtttttcctgtacattccctgaataagtagtacataaccaatacatataaagaaaaagcttcatccatttattcattcactcagacactgatctcaacttgggatacagttgtgagcaagagaaaatttccttgctttcatggagcttgggagattgtagacgaagcatatctaaaacagtattgtgtaggtaggtgcagtggcccatgcctgtaatcccagcagtttgggaggccaaggcaggaggatcagttgcatccaggagttcgagaccagcctgagcaacatagtgagaccccatctctataaaaaattaaaaattaaccaggcatggtggtacatacctgtagccccagctactcaggaggctgaggcaggaggatcacttgaacctgagaggttgaggctgccgtgaactgtgattacagcactgcactcagcctgggtgacagacagagtaagaccctgtttaatcaaccaatcaaacagtcagtcaatcacaatactttgtaacctcctagaatataaattccaagaggtcacacattttgatctgttctgttcatgcctgtgtctgtagtgcctaagcagtgtctgactcatagtaggtgctgaatgagtatttgttaaatgaatgagcaaccaagaggtgtaatagaaactatcgcttctcccaaattaactatcttacaaaaagaataaggatagtatttaatgagaaatatcatttatgtaggaatctaaatcatttatttgtatctaacttgacatatttttatttatttattttttgagacagggtctcattctgtcacccaggctggaatgcagtggtgcaatcacagctcactgcagccttgacctcctggacttaatcaatttgcccacctcagcctcctaagtagctgggattacaggtgcgcgccaccatgcctggctgatttttgckgtgttgttgttgttgttgttgttgttgttgttgttgttattgtttgtagagacaggtttctcaccatgttgcccaagctgatctcaaactcttgtgctcatgtgatctgcccgccttggtctcccaaagtgttggaattaccggcatgagccaccgtgcctggtcagtatatttttaaaagctctaaagctttttgtgagaaaacaccatatcagaatgtctgttgtcaggtatgtttggcatatttagatattatacccatgtatcagctggaaacatatatgtattatatacctatagaagtttaaatatttaccagagttttttcctaaaataaatgatacttttatgtacaagctaaagtgatcaagagtaaaatgatttcatagagctagaacrtttattgtgacaaaatgaaaaggatattcgggtgagccacatatcaatagttgcatgttcagattataatggctrtggtaacggtgttgtcattttatgtaggcttctactctctcagctttcaaaacattatagagctgatgttgagcagatctagattatatccatggaatttctctgccgtcatccccaacaatgtgtccctactgggtgacagggtagtggccaagctaagaagacaaagtaaagtgagagagtttgaggtttgcaaataagttgtgattaagcacaggtaattcaaagtactagaattttccaagatgattagtctataaacaaagtatgggatgggaaaaatggttttacaggaatttgtgatagggctattctagatgtccttatcagtaaagaatattatattcactcttcttacctgttgaatttttttgagacagagtgggaggtggctcaatgcagccaaaaggaaaattccacccctaagtcattgtcagtcatagtttctccatggtttgcctttcagtcttcaagtacagaagttcaactttctaactttcaacaaatgctactttcaacactcttaagcaccgcatgataagcactgaacgatgagaatattgagagagcatgaagaggagatggttagaagagaggcaacattgacagtgaggaaatgacagatgtgctcagtgttgagctgtttgacctcaggaacaattctctaggactcccagtttgtgcttctgtgagtggaagaaaacacactcaaaagtgtttgatacagtctctcaaaaatagtcaacacaggacacttctatgacccaacatgcaaggatttctccccatcaacaagcaagcaatcacttcagcaagctgacaccagctgagtgtctctaacttacttctattttgacacttcttttttttttttttttttttttgagatgggggtctcactttgttgcctaggctggagtgaagtgatattcacaggcacaatcatagctcactgcagcctcaaactcctgaccgtaagctatcttctcacttcaacctcccaagtagctgggacaacaggcacgtaccatattttgacacgatctacctggagatagtgtcagatcctataggttgagggctcaagactgcaccccccccttaccccacccccaccttcagatgccagtcacaagctccaggttacctgtgcttctgattgacctgctataaagtggggctcccacgaccacttccttgggttcagttaatttgctagagcagctcccagaactcagggaaacacttactttctttttcacagctatgtgaattttggaacagaaacacttatacttaccaatttatttaaagaatattacaaagaacacagatgagaagatgcataagttaagacaagtgggaaggggcgtggagttttccrtttcctctccagtgtaccaccatatagaaacctccatgtgttcagctccccagaagttctccaaattctgtgtttttatggaacaaatttttgggtttttatggaagcttcattacataggtatgattgattaagccattggccattggtgatcaagttaaccttcagcccctctcccctccccagaaatttgggggtgggctgaaagccctaaccttctaatcctgtcttggtctttgccatgaccagtccccatcctgaagtcaggagttgccagccatcagtcagctcgttaacatacaaaaaggcatcacttggygagtttctgaagattttaggagttgtatgccagaaaactggactatgaccaaatatatatttcagaatatcctagtgtcatttgaaaagtgctgcacttgagcaattcatagtagtcagcaaaagacaaggaaaaggatggagagtggaaaaagtggaaaacttgtgaccacaggatcagcctcaatgtcagatgtccattaacctaaatgaattcaagagtcagctgcgagtttgagaactgaaagactaagcatgttgggaaagtgctgctgatgaaattttggtcacaggccatctgtggattattcgtaagatcaaggccagtccatatttggacaatatcaaagtgagtagctaggtcataagtgagcaatacagatgtgttcagggcttccctaccacttctgcagaagttactatggtgggattttcagtgtagacaaaactattttgggaaaagatgcccataaacagacaaacgaataaatataaaatatctaagcatagagactaacagcttggttttgaaatttctttaagaactcactcatattcctgttggtacaatgcatctcagtactaagttcaaactcttcttagttctctgaaaatcctagaacactaaaaaacttcaaaaagcagactgaagaccttactctttttatagtagattggttgcagaggccttttgtttcactgaaaatrtttaatcacaattttagagtggtttgtggtggtgccaacaactgtgcatgaacagtgttttataagtttcttactatgaaaataagaaaaacaagggctgggcgcagtggctcacgcctgtaatcccaacactttgggaggctgaggtgggtggatcacatgaggtcaggagttcaagaccagcctggccaacatggcgataccttgtctctactaaaaatacaaaaattagccgggcgtggtggtgggtgcctgtaatcccagctactcaggaggctgagacaggagaatcccttgaaccttggagggggagtttgcagtgagccgagatacaccactgcactccagcctggacgacagagcaagactgcatctcaaaaaaaaaaaaaaaaatggagtcatcttcagaaaaatttttaaaagattctaaagcagcaagaagggtcaggaccattttttttttttttttttttgagacaggatctcactctgtcacccaggttggagtgtagtggtgcaactatggctcactacagcctcaacctcccaggctcaggcagtcctctcacctcagcctcccaagtagctaggactacaggtgcataccaccacacccagctaattttttttattttttgtagagatggagtctcactatgttgccacaactggtcttgaactcacgggctcaaacaatcctcttgccttggcctcccaaggtgctgggattacacgcatgagccactgtgcccagctttaggaccaatattataaactttttttttctctcacggaagtaatctgcctatgttaattacctgtataatgtaaatttggactcaggaacaaaatggtcttgagacctaacccgtttgtaagttggaggactcttgttctatgcagaagtggcaggagaaattttattctgaagtctgcaaaacacaaactgacctgccagcaaaaactaaccctggttgttatgttaagattttttttttttygagatggagtcttgctctgtcactcaggctggagtgcagtggcatgatctcagcccactgcagtctccgcctcctgggttcaagcgattttcttgtctcctcagccttctgagtagctgggattacaggcgcctgccaccacgcctggctaatttttgtatttttaatagagacggggtttcaccattttggccaggctgtctcgaactcctgacctcaggtgatccgcctgccttggcctcccaaagtgctgggattacaggcgtgagccaccgcacccagctgaatttacggcattactaagagtgaaacagcctgacattttgtgcctcctgaattgatggagtatgtaatatttccacataaagtatttttgccaaaaatgtttaacytaaatcttagcagccttctccagacccaactttcagtttacaagcaaaacagaaacaagttaaatgacgcaatgaagaaagaagaaaaagggattttataaaacagctatccttgtcttctcaaaaagtcaatggtttttatgaaaagaagcatggcttttattttcattttgttaaaaattgggagagactagtctaggcaaaaaagaagaaatgataataataaataaaaggcaacaaaagaggcacaaaaaccagaatgcaatgtgtgaatcttgattaattctggttttggggaaaaaagctataaaagatattcttggaacagttgaagaagtttgaatataggtttgtgttagatgatatggcattattrtgagttcattaattttgattgtggtcatggggtgatgtatgagatgctgtatatgtataagatacatgctgaagcatgtgacattaagagtcgtgacatccactcctgccagatctaggtagtgtctatgcgtgctcagtgatctgttcgtttaacttttctatatgcttgcaatttacatggattataatatatagttcaatatgtatattaaatagagagagggaaagggggacagagaagctgagttctattctttgagaagcaaaaattatagaagcactaaacttttagagaagtaacaaattaattttcccctcttcttttgtaggctcaagaaaaaggaagattggactatgctaaggtaggcagattttatacatactgtactattttacacatttcaatttggtgtttggctttcgtttatatttgaaaggtcaaaagagaatgatcacattgagagctgaaggacatttcctgttaagtaacaggccaatagcatgtggaataaggttcattcaacaagaagtctatttattattgagtacctgtttcattccagacattgtattaggtattgagaatacaacggtcaactagatgaagtctttcctttcagaatatttacaattctagtggggaaaatcaataacaaaataaaggactaaataaataatgtcaagtgtcagcaaatgtgatgaggaaaaataaacagtaaaatcactagctattgttgaaagatgctatggggtgtggatggaagacaacctttagggccatcagataataagtagaaagcaccttacaggatagacttgagctctcaaaggcaggagttctcacatcacctgtggaacttttgaaaacacatgtgcctaggtaccactgcatcagaccctctttcaccaagatcagaatcccctgatggagagagcagtacaggggcaggctggagtggtttgaaaatgtctccacagataattctgacacacagccctggttaaaaactgctgcgggaggtcagatttcagtgcatcagtacaggcctaggaacacacttgggtcacgttctgttttcccctcagggacaaatggaacatttagcaggtgtatggcatgtgtacagctgcttggctaaaagaacatgtcaaccatctgatttatgcaacaatcaggaatatccaggatgtgagcacacctgcactccaaagacagggagggagaaacatgacccagaagggctctgcttgccgtgggacaaccaaaaccctcaagggcctctccagagctgacctggaacctcgcactctcctggcagcctagtggggcacacccatggcccccacctttactcttctttccttgctgaaaataaagtctctcttttttttttttaacaattacaaaatagatttactttgaaccactggttcttatacccaggaacatatgtcagaattacctatggaggttttaaaaaatccgtaagtccgggtctcccgcttggagaaggttgcaaagcaggtcaggacctgagtgtttctaaaaagttcttcaggtagctctgatgtttccttctggttgaatcactgaatttaggttgacagggatactttggtttttggggtttgggggccatttgcggtagggtgtgggaagcttttcttacagatttactaggagcagcaaataacttggtctctggcttttttggagtctgtctcaggtcttttctccccagttaaggattttttttccttcactgcctcttctttgatttttgactttttccctgggcctttccctggggtctcagactctgcagcttttggggtctcagaggctgtcaagtcctttctctccctcccatgaggagtgttgggaccgtctctccttttatctgcctccttcaagaaaaactagataataggagcacctgtaaaccaagggcttccatatctgccactcggtcttagatgtgtacttgagcctcatcatatacccaaacgcaggctgtggacttaccctcttgggtctcccacaggcatragagcccagtgcatcttaaactaaactaaacatcttttctgacatctctggcctttctgttgctgttgtttaatgactttattttttacagcagttttaggttgacagcaaaagtgagtgaaaagtagagttcctatagcccctgaccccaaacacatgcagcctccctcaccatcagcatcccacaccagagaagcacattgttacaattgatgaatctaaggccaggtgcagtggctcatacctctaatcccagcattttgagaggctgaggtgggaggaccacttgagcccagaagttcaagaccagcctggataatatggtgaaaccctgtctgtacaaaacagtgtaaaaattagctgggtgtggtgatgagcacttgtagttgcagctacctgggaggctgagatgggaggattgcttaagcctgggagcagaggtttcagtgagctgagatcatgctgctgcactccagcccgggtgacagagtaagaccctgtctcaaagaaaaaaaaattgatgagtctacattggtgcgtcgttatcacccaaagtccatatattgcattaggaaggttgcagtccctggtgctggacctctgagccttttttcttatcctctctcctgtgattagcactgtcatcccaccagtcaaccatgtgagaaacttaccatgtgagaaaccrcttctactccccacctcttgttccatgaccaagtcataccagttttatagcctacattttcttgactccaactcctcctcttggtctctcttccattcctcgtgctcatagtctcttcatctgaacactgaaaaacctactgctcagtctccactgcctctcttttgtccccacagatctttaccagccagagtggctgtctaaaccaccaatctgaccgtttctctctccagcttaaaacccttcattgctctaggccgggcacggtggctcacacctgtaatcccagcactttgggaggtggaggcgggcggatcacgaagtcaggagatcgagaccatcctggctaacacggtgaaaccccgtctctactaaaaatacaaaaaattagctgggcatggtggcgggcgcctgtagtcccagctacttgggaggctgaggcaggagaatggtgtgaacccaggaggcggagcttgcagtgagccgagatcacgccactgcactccagcctgggcgacagagcaagactccgtctcaaaaaaaaaccccttcattgctctgtgttgtctatccggcacattcggagcttgctgggttggcatatacggggctgtgtgatctctcccctaaagagaccctccagcttcatctcccatggtcctgcagcagcaccaagtttcataaagcatactgcttctgttctctgcgccttcactcatgctgtcccctctgcttagaatgtcctgccgtctttatctggctccctctgctcatcctatgaagcttaatttgggattgtctcctatagcaaatcctctgtggtttcccaggctggattaggtgctttcctcagttcctcaatacactgtgcatttctcagtcactgctcttactctgttatattataatgatccatttatgagactgatcctagactgtgagctcttggagggcagagacagtttcttttttctcttagtatatctggtacccaacacagtacttgacacttagtaagtgacgagtgaatgagcaagtaagcgagtgaacagaggccatgagtaagaaaatagaaaacacacgcagtaagttggggagaagcaacctgctgcaggagaaaatcgggggatagggcattggttctcaaggcagagaggaaaggaaagcgtttgacacagtttgaggatatcagcagggttaagaagattgcttaggaaggttgtagtaaactagtttgaagataaagactgggatttttactgtggtagtgacagaaagctaacatatgaataaaaagataagggaaaagagtgacaattgaacattgatgcttattttggttatttttgttttttttttttagagatagggtctcactctgtcactcaggctggagtgcagtgtcacaatcatagcttactgcagcctcccactcctgggctcaaatgatcctcttgcctcagactcccaggtaactaggactacagatatgtgtcaccacacccggctatttttttttatttgtttctttctttctttatttatttaattttaaggaacgaggtctcgctgttacccagactggtgatgctttttttatgactcaaagaatgcctctggggtttcttatcacagaagcacttgacaatggaagagatttccactggaaaatggcaaagagaaaaatatggtgcacaaataagagcacccctggaccaagcaatggctctgccaccaactcaatgcaaaatctggtaacagtcactgtgttagtcttttcttgccgtgcaataaaaaatacctggctggggccgggcacagtggctcacacctgtaatcgcagcactttgggaggccatgggggtggaccacctgaggttaggagtttgagaccagcctgatcaacatggtgaaaccccgtccctactaaaaacacaaaaattagccgggtgtggtagcacgtgcctgtaatcctagctactcgggaggctgaggcaggagaattgcttgaaccccagtggcacaggttgcagtgagccaaggtcatgtctttgcattccagccyggacaacagagcaagactctgtctaaaaaaataaaaagaaaaaaaatatatgtctgggtatagtggccaacactttgggaagccaaggcaggagcacttgagctcaggagttcgagaccagcctgggtaatatggcaaaatcctgtctctaaaaaaaayacaaaaattagccagatatgttggtgcacactcatactcccagctactcaggaggctgaggtgggaggattgcttgagcctgagaggcagaggttgcagtcagctgagattgtgtcactgcactccgtgctaaaaatattaaaaaatagctaggtatggtggtgcacacctatagtcctggctactcaggagcctgaggtagaggatcacctgaccccaggaagttgaggctgcagtgarttgtgatcacgccactgtacaccagcctgggcaacgggagtgagagtgagaccctgtctcaaaaaaaatgaaaaagaaaagaggwttaattggcttatggttctgcaggtataygagaagcatagtgctgacatctacttctggttaggcttctggtgagcttagaatcatggcayatggcaaagggtattgggcatgtcacctagcaagagaggggaggtgccacacacttttaaacaaccagatcatgcatgagctcactgagtgagaactcactcgtcaccaagggcatggcactaagccattcatgagggatcagaccccctgacccaaacacctcccgctaggcccacctccaacratggaggccacttttcaacatgagatttggaggggataaaacatccaaaccaaattgttcacttaatctctttggtcttttcttagtttcctcagtgcagaacgagcagtttagagtagtgctgttctattccctaggcccattctaaatctgggaggagacattcttatcctgaggtccagacacactccttcacccaaccgacatttatttatttttaaatttaaattttttttttttttgagacagggtctcactctgtcacccaaattggagtgcagtggcacaaccttagctcactgaaacttccgcttcctggggtcaagtgattctccagcctcagcctcccaagtagctggaactacaagtgcaagccaccaatgcgcagctaatttttgtattttttgtagagatggggttttaccacattgctcaggctggtctcgaactcctgaactcaaagcgatctgcccgcctcagcctcccagagtgctgggattccaggcatgagctacctcacccagcctttatttgatgttaatatattggaggcactatgctagtgccaagacaaccatcatgaacacgactgccagggtttgccatcacaagctcccttgactccagcttccctatctaaagtagccactccacctttgctctgtttttttctccttaacatttatcataacataaaattatcagtttgtatttaagtgcatgtttatttcttcttccactagcatgtaaaagatctaacggcaggtgcttcggtggccttgctcatggttgcatcaccctccctagcacaggcttacataggagtgcttgacaaacatgtgtgcatgagtattacattcgtgttatgttaggagacgtacaggaggttaggagaggtctgggatcgaggaccgtagactcaaattagtcattttaagaggtttttttttttttttgagatggagtttcactcttgttgcccaggctggagtgcaatggcacaatctcggctcactgcaacctcygcctcctgggttcaagcaatctcctacctcagcctcctgagtagctgggattataggcatgcgccaccacacccagctaatttttgtatttttagtagagatggggtttctccatgttggtcaggctggtctcaaactcccgacctcaggtgatcygcccacctcggcctcccaaagtgttggaattacaggcgtgagccaccacaccgggccttaagagtatattgactgtgtaatacattccatcccaaagttgcctaaggttgtcttttcaagtgcccagtaatagtatttctcatgccagtaaatagaaacccacccctccttgaatatgtagtgctattctgatatttaaagacataactcgatttaggtagttaatccagacctgtcagccttaaacagacttaaatccaagtaacatagagaagaaagattatatctttctctactaagtcttggggagatgtctgcagtattatgccttatgcagtatgttatggactcttggcaatgcatctcatgacctaaagtctactcctccctgctttgtgtgctctgctttttgtggtcatgatgttcaggctaatataggcatcacacttagtggcttagggttcccctggtaggagttatttgtaaaatagtatttgaaaaactcagcagccatttcaggagactattgtgaaattcatttattgctggaaatttctttatttccaagtgataggtatttgtaaactcaaaagccaaattttgtctgaaaagtcagatatcaagaaagtgtgcagccataaaaaggcatgagatcatgtcctttgcagggatacggatgaagctagaagccatcattctcagcaaactaacacaggaacagaaaaccaaacaccgcatgttctcactcataagtgggagttgaacaatgagaacacatggacacagggaggggaacaacacacaccagggcctgttggggggtaggggggcgcgaaaggagggaacttagagagcgggtcaataggtgcacaaaccaccatggcacatgtatacctgtgtaacaaacctgcacgttctgcacatgtatcccagaacttaaaataataaagagtaaaaaaaaaactatataattatttcagtcatgcactctgtggctttatggcccatcactcaattttgtcggtttcagatggtgaggtagtaggggagagtgtggaagaggtgatcattttaaaatcattctcaactggaccttcaacatgtgtgtctcattcagcaaaatagtggtctgtacacagacactcagctagaaattgaattactttttaattgagttcctgttgtgatagagcctggatatgaatgctttacactgctgtagtacctttcatcctaagatatcaaagcacttgacaactattaattcattacatctctccctgtctcttaaagtagttaacacagcactggaagtcactctcctcattgctgaaactcactcacctgggcagtgggcaaagatggaagctgtttaactgtgtaaggcaatcctaccttagtcgcttttaagatggaaaaacaaggaatatcttacctagttaaaactgcagaagttgtattagatggaatgtaattaccagaagtgaagtgtgaycaggaagctaacacttttgctccagtgcacaatgctgtggggatcttaattccagtgactgtcctgcagccctaggtgcacatctcagactgttccagctctttaggcttctggcctcaaggttaggcagagccgcttcagctcagtgctagagggaagagtgccacctattgaattgtaggaattcttggagatgtgttgggactggtggagaaggctctcggaccacattcacgtttggtttgccatggtaactaatatatatatatctaaaagaaaacgaatatgttgactactcttgcttagaaaaacatcgacaaacgtctgtgtattttccccagctggagctgagcgtatgcctgtagtttagcctactgctacttgaaataagcatgctgctaaaaagactgaggcagatggtatttttaccacttcaggcaaaacatggcacctatggttcgactttctacaattttaattttttaacattttcaaaatggcttgtttaaatatctccgtcacagagacacagactttttcccagtttctttttaataattgcttcagatatatagatatgaataaccatcagttggtcaaaaccagactgttcagcattgtagagcctgccttctgttcattctttcaccagtgcctaggactgtgccgtaaatgagctttgacattcgcgctcattttgatacaaagacactaagtagtttataatagcttgcattatatttatctctagtctttcttcttctcttcttcttctccttctccttctccttcttcttcttcttttttttttttttttttttagatataaggtctcactatgttgtccagtctagagtgcagtggctacagcctcgaactcctgggctcaagagatcctcccatctccacctcccaagtagctgcgactacaggtgcactgtctctgcactggtctttctctaggctttattgtgcatttcatatcatttgtctcatgactcaacacacaaaagggaggtttttgctggttttttaaatgtcctcttatgaggatcattctaagcacagagaaataattgctcatgcttaagcacttggtaaaaaaaaaaaaagatcttccagatattaattcattagccatccagttctctgtcaaatgtaagagattttttataaggatagggtttttgactcatcctccctgctagaatttgctcagggttccagagtgtcacgttctggctctatcctccaatgcctctcagacatcagcatttagcagctgctgctctcctctgtcctcttcacccccagaagtccttgcacatttgttttattataaaatgcatttgcatagagcacacattaaaattctcttcccaccagcaaacagtaatgtccacagacatttgcatttgcatgatcacatatcattacttccctttaaaaagaaaaaagtctttcttctcatgtcatgattctcctttccaaggtttgcccttttagtcatttcttcttattacacatagatgcttcagccatttttctgcatattgagtccagaattttcttttttgagccttgaatatagaaattttttgtatatagtattgttctttttttactgacaaagccagactcctttattcgtttatttatttatttttggtagtcaatttttgctgctagttccttcccatgaccctagcaaactggctctgagactttttcacattggcacatttagaaaacagttgttgctgtgttttctctttcctgtacccctttcttgggcagatgctgcatctcctaccctgggactttacattagctcttttttggtaaaatatgccatacaacatcactgaatgcactaaatctctcattttctctagccccgcaaagatgtattttttctttgctttgttttgttttgttttgttttgagacagagtttaattctcgttgcccaggctggagtgcagtggtggaatcttggctcactgcaacctccacctcccaggttcaagtgattctctcttttttttttgagatggagtctcactctgttgcccaggctggaatccagtggcgtgatctcagctcactgcaacctccacttcccgggttcaagcaattctcctgcctcagcctcccaagtagctgcgactacaggtgtgcaccactgcacccagctaatttttgcatttttagagacggggtttcaccatgttggccaggttggtctccaactcctgacctcgtgatctgcctgccttggcctcccaaagtgctgagattacaggcgtgagccactgcacccagctcaagtgattcacttgcctcagcctccagagtagctgggattacaggcgcctgccaccacgcctggctattttttatatttttagtagagatggggtttcaccattttggctaggctggtctcgaactcctgacctcaggtgatccatccgcttcgacctcccaaagtactgagattacaggcatgagccaccgcacctggccaaagatgtcttagcatttaggatttctattttagtgataactatggagattgtggagccattggcattgccctctcctatcttgttccataagggacttgtaatataattagataagacgtttatagtagaatttaaagaaaaaaaaatccatatcaaaataccataatggtatgggtgcaactatgtaacttttttttttttttttagacagtcttgcttgtcacccaggctggagtgcagtkgcatgattatggctcactgcagtattgacctcccgggctcaagtgatcctcccacctcagctttgcaagtagcagagactacagttgcatgtcaccacacccagctaattttttaatttttttgtagagaagaggtatcactatattacctgggctggtctcaaactcctggggtcaagtgatcctcctaccttggcctcccaaggtgctgggattacaggtgtgagccaccatgaccagcccctgtccaaaaattttaaatcccccactcctcatttccttaaaaccagattaaaccagttatttttctcttggcaactacatttcagacacctgtttttctttgcagcaatagtgagtagattctctttaatctgtttttcaaaacaattagtttgtcagtttttgcaaccactgctttgatttcatatctccttcaaattgcaattattaatgatggaaaaataatcactgatcagtttctgtttacagtaaattatagaagcttttgtaccatgtgaaacattatatcaaaaataaattataggccgggtgtggtggtttatgcctgtaatcccagcactttgggaaaccaaggtgggcagaccacttgaggtcaggagttcgagaccagcctggccaacatggcaaaaccccgtctctactacagatacaaaaattagcctggtgtggtggcgggtacctatagtcccagctactcaggaggctgaggcaagagaatcgcctgaacccaggaggcagaggttgcagtgagctgagattgtgccactgcactccagcccaggcaatagagtgagaytctgtctcaaataaataaataaatacataaataaaataaataaattatacacacatgcaatagttagtatcttaaaccagagttktgccttattattagccttggtcttttgcaaaacatttgccctctcgacattattcattcctatcatcaagctagtcttttttctccttaactctttcagtatgttattttgtatttgtccccagtgactatcatcttgctttgattatctgttcctctaatttcttaatgttattttaaaattagattcttgttctctgaggtgttagcaatcccacacacctcagtggcatcagcagatttaattatcataatctctattcctttgtggatcatgaataaaattattaaatgattttaatgataagcatctttatgacatcatataacatgccaccctctcagttagcccaaataatttttttttttttttttttgagacagagtcttgctctgtcacccaggctggagtgcagtggcacaatcttggttcactgcagcctccacctcctgggttcaagcgattctcctgcctcagcctcctgagtagcttggattacaggtgtgcaccaccatgcctggctaatttttgtayttttagtagagatggggtttcaccatgttggccaggctgatctcaaactcctgacctcaggtgatccaccggcctcagcctcccaaagtgctgggattacaggtgtgagccacggtgcccgaccatccataattttctttttttctttcttttttttttcttatttctttttcttttcttttcttttttttttttttgagacagagattcactcttgtcaccaaggctggagtgcaatggcacaatcttaaattactgcaacctccacctcctgggttcaagcaattctcctacctcagcctcccaagtagctgggattacaggcgcccactgccatgccaggctacattttgtatttttagtagagacggggtttcaccatgttggctaggctgatcttgaactcctttgggaggtgattacccgcctcagcctcccaaaatgctgggattacaggcatgagccactgcgcccggccccaagtactactgatactaatttaatataggcagttataaatctcttttatttttcttcagattctatattcctagtttattgatgcttggtttaaaatattatatgtggctgggtgtggtggctcacacctataattccagcactttgggaggccaaggtgggtggattacctgaggtcaggagttcgagcccagcctgaccaacatggtgaaaccccacctctactaaaaatacaaaagttagctgggcttggtggtgcatgcctgtaatcccagctactgaggaggctgaggcaggagaatcgcttgaatccgggagatggaggttgcagttattgcgcccctgcattccagcctgggagacagagtgagacatcatctccaaatataaatacataaataaataaaaagtaaatgaataaaatgatatatgtaaaagtttacattatttagctcataacaatatttagtggggcagtctctcccactcttcaatttaccattttgtattactgacccctaaaaattacatatctacataatatctaatatttatcaggaagctaagtcaggcttagatcgttgatgaagaccagttcttgacggtaagcatggaatggtgtcttgagtttgctcaccattgcaccgtgaaagcctactacagcacctggtgcaggataggtacccaataaatatttgttgactgactgtcgaatgaatgaatgaatgatgacccaagatactgcgcgtttttgcctaacctctgttcttctaattcataaggaatatttaattccacctttgttcctcttatatccccccaagtatatttttaatcaaatgattacatcctcaatgcctctcaccccctgggttgaggcagagagattcaattggggtaatcttttgagtcttatctggaaagctaactagaaatgcccttcaggctggctctgcgggtggatgctctgcactgtgggatagctggattcaattattgctcccagtttgtggtgtcagaagccamctgtgcaccrggagagcctgtatgtctttatgtcgaagatagagccctctgtccctatagaaaagcctgtttagtccattaaaactgttttaaagtggatctgaagggaacactatctctttccttgtcataaaatatagtggagaggcatgggtttcccaaaattatggtttttgagtgaaaagagaggcacctctgtatagatactgaacgtagttttagtaagttagaagatatcgttacctagattcatatttccacagtcatacactaatcctgctgtcggattttgtgttgaattaagaatttttgtgatttgaagctgtttgagccatcagaaagctgtagttgattcagttggtacatctgaagccattcctccatatttcctatgcagtgtctccaagcactactcagcctccccacttaccacatcagagtattgatccctgataatgtacttaaccatctttcctgaaataacaaggtggctatgtccctcagttttcaaacagaattacttaggtaacagtagagatcatgggacctgcagcatagctcagtgaagtgtgaaatgttactaaagattgtaggtgagtagattctgtccttttcccccgagtccttgacattctggcttgatgaaagatcttagctaaggccggatgctgtggctcactcctgtaagaaggccgaggcgggcgaatcacgaggccaggagtttgagaccagcctgaccaacatggtgaaaccccgtctctactaaaaatacaataattagctaggcgtaatggcgggcacctataatcccagctattcaggaggcagaggcaggagaatcgcttgaacccgggaggcagaggcagcagtgagctgagatcacaccactgcactccagcctgggcaacaatgtgaaactccatctaaaaaaaaaaagaagaagaaggatcttaactaaatcataataaaaccaaagctgtacctctgaagattgattagtgtgtagcgcaatggtgccccctgtggaagatctccctatcctggatctaagaagattatgctaacctgtatctttaattgattcctaagatttgtgtgcagctgtcagaaaaatgggtagacctttctatgtgctgtactttctttaagatgcatgccattgtatgcgtgctttgcagcgtacactgtttaagacacacactaaacaccttaatcaaatggttctatcgaattctgtgaatcccctctttttatagagaagagctcaaataacctaacagtgtccacacaattatctcacagggtcaagattctactcaggtctgctgacttcacaatgtgtattctcttttgttatttgttttttttaagagacagggtttcactatgttggccaggctggcctcgaactcctgtcctcaagtgatccgcccacctcagcctcccaaagtgctgggattacagatgtgagccacttcgcccagcagcagtgtgtattctttaccaccatcctgcttctcaaagtgctttagacatactacaaaaagttgttgttgtattcaggctctgatcttgcaagcatccagaaaacggtgtgtattagtctataatctaacataattctggtctcagaaatgtgattgtctaataaatgactgtgctaggatttatgtttgctgaaccagtgtaataattattgtgactttaagctgataagcatgcttcacttttgaaaagaaagttttatagataataaccatttaaaacaaactctgatcatcattctcttgaaagaggcacaatctaagttaacaaatacaccttccataacaccatagcgtagagacctcctacatttggaagagctgttaatcttgcagatatgattacacttacatggcacagagtaaatatacattcttcacctcatacattggcccccacactgatgcaacctacctagaagacgtggctgaagcctacatttatttcattaataaatgtagatagaatttctctgtcgtttgaggtgctttcttgtgaaattataaatgtgttttaaactcatcttatatcaggatgtattttaggatgctaggaatctaggatcacatggatgatgatagtggtagtttggggcaagtggtccctaggtatcagcatccaaatactaaagcacatgaaaattggaacatgagaaggatataagaaatgtataagtaagatagggattcaagtaaaataacagaaaccgaaactcactcttaacatagtttatatattcctcaaatacccccaggactatttgattcctacatgatgtgaatgctctcatcccacagtattctttttaattaaataaccagcttagtatttgtcatgagattacagagcttactatttattgattcactcctaaaaaagctacaggcaagagtggctcattgctgcagtctacagcctatgacatgttttgcttgttgaatttctattacagagtttgctaaaaagctttacagtcccagttttgcttttgaatttcaatgtgtagaattaagtttctctttggaatatgatactaaaattaaaaattaactttgaatcagaatatggataaatccatgattatttataaatcaccaaatattcctttggaagacatgacaaccaagaggcagtgattgcttttcctgtgaaattaatcctaaatgtaatataattctatattactaacctcaaatgccaaacctatcaaatgttgatgcaagtttataaattaagaattacaggctgcgcatggtggctcacgcctgtaatcccagcaatttgggaagccaaggcgggcggatcacctgggatcaggagtttgagtttgagaccagcctgaccaacatggcaaaaccccgtctctactaaaaatacaaaaattagccaggcacagtggcacatgcctgtaatctcagctactcgggaggctgaggcacaagaatcacttgaacccragaggcagaggttgcagtgagccaagattgcaacactgcactccagcctgagtgagagtgagaccctgtctcccaaaaaaaaaaaaaaaagaattacattacgtgtttcagcagatacatgtaaagaaaatagaaaaaaaaaaaagaattacttcgtccattttgtctcatttaattacattttgagagcaggcatgtctgctcataccctgaaatgcaggtttttttggtttttttttgagacagggtctcactctgtcatccaaattgaccttcactccttgacatagcaagcactactttgtctcagttcttctctgccattctgtcaacaattaggtcaattttaagtgtaccagtaaaattatttaaactatatataaatacctctaaaccatataaacatgtttatatgatgtagatatattttatatcatataaatgtatccctaccatatggtttaggagtatttatacatatacagtagtatggttatatctgttcagttatgataatttgtacgaaatgagctgttgcgttgtgttcagctctttgtggatggcaggccacagcgtgaactcacaaacrtacttagcagagaggttgagccttgaaataagttctgaagtctcactcccaacaggaggctgcataccatccagactaagcataatagccatacagttttaaattagaaaacagtaaaattgataaacgtggaggacagggcaagaaaaactatactaaacatgcttttatatttgtgtgtgtgtgtgtgtgtgtgtgtgtgtatgtgtgtgtgtgtgttaagggggaatagaatacattttaaatagtcaatatgatttgggaattcatttttcaaaaatagacatgttttggccgggcgcgggggctcaacctstaatcccagtactttggaagactgaggccggcagatcacctgaggtcgggagtttgagatcagcctggccarcatggtgaaaccccgtctctactaaaaatacaaaaattagctgagtgtggtggcgcttacctataatcccagctactggggaggctgaggcagaagaatcacttgaacccgagaggtggagtttgcagtgagctgagattgtgccattgcattccagcctgggagacagaatgagactctatctcaataaataaataaataaataaataaaagcagtgaaaataacctggggcaatatttggtattgtcactgcatgaaaccacaaataccactactgcagtsagtgcctttggttgataattttaataaaaataagttttggttagttaaggatttaagtaaaaatatactagttttgttttgtgactcagtggcggatgagataatacctgtcttgctcagtgcctttaggtttaacaacaacaacaaaaaagtatgaccagaagaatatacttaatcaattgagatatgcatgacctttttcttagcagaaaatgtggaaaatttctacctccaatttctactgacatttgttctacaaccatatggcatttttaggttggtggaaaatatatatgtgttgcagtagaggtacataattaaataatggcttcaattttctgcaatctctataaatatggctttatcataagctatttgactggaggtattttttttctaatctgtgatatgtatcttttaaaaaatctgtccttgtacataggcatgcaaaggacattagcgatataggtatgtgttatgttctcaaatgaaattgtaatgctttctggtttgtttaagagtgaaagaaagggactatagcatattggttaagaacaagaactcatcttgactccagcacttatcatctgtgttactttggacaacttgctcttacctaaatttgttcctttgtaaaatgaaaataatagtagcatctacctcgtagggctgttgtgagggtagaagatagatataggtatagatacagatagagcgagagagagagagatcttttttttttttttttcctgagatggagtctcactctgtcgcccaggctggagtgcaatggcaccatctcagctcactgcaacctccacctcccaggttcaagcaattctcctgcctcagcctcccgagtagctgggattacaggcgtgtgccagcatgcctggctaatttttgtatttttagtagaaacaggtttcaccatgttggccaggctggtcttgaactcctgacgtcatgatccacccaccttggcctcccaaagtgctgggattcctggcgtgaaccaccacacctggccaagagagagatcttagaacagtgctgggcacacagtaagtactatatatgagattgtctttattgtcattgctgttattattattgcttttctaatattgggaaacactactattcttactgtatttttgcatgtgaatctcatatgattgagaaatctatttaaaattctctttgtctctttctagttttgtcagattaagatgtttaattaagatcggtgaattttttttcctatagactcttgcaaataatttctaactctgagtaaaaaggaatgcttttatgttgtttgcaatgcatttcacagtttattgtattagaaaactgtagcttttccttttgtaccaagtcttgccactcagaagctgtcaagacctttcagttaagcactatcagctagaatcttgggcttgggtagacctttagaggcagcgtcgtcctatctttcacactggcgaagagtttcagtcatattttctcctacatgtggtcatccagtcactgaaggcttccaataatagggaacccacagcttgtcaaaaataatcattctgttgttagacaactctagtcatttgaaggttcttttcttatttataagtggaatcttcttccgagaaactttaccttgttgctgtttgttctgtcccctgaagcacatagaacaggactgttccttcttccatttaattacttcagatatttgaagatggcttttatatcctcccttcctccaggttaaacattccctaggtgacatgtttccaaatccttcttcatcctaatactggacccaatctatcatgccagtgcccctcttgactcatggcccccaggactgaaaatagttttctaaacattagttgaccgtccgtgtgctgtgagaccattcctgcctgtgttttggacatgtacacctgctgatgctgccaaagtttgcatttgcatttttttgtacctacatcacagccttggctgataccaagactgtggttattaaagattctcaacatttttcatgagtcactgccaamttgcagcttatacttttacaattaatttttgaaacctaaatatacaactatataattatccctgttagattttactggctactatcagtcttttgttcaacatgtcaataccgttaaaattttgatactatccatgtgttacctatctctcttggctgtgtgacatctgaaaattaaaatttaatatgcatttcttcttcatcttcattcaagtaatgcatagaaacgtgataagaagaagaaaccaagcattaagttctggtagcatgacactagagactgctttcctgttctaagcgtttttttttttttttttttttttttttgagacagagtctcattccatcaccaggctggagtgcagtggcgcgatctcggctcactgcaacctctgcttcccaggttcaagcaattctcctgcctcagcctcccgagtagctgggactacaggtgtgcaccaccacgcccaactaatttttgtatttttagtagagacagggtttcaccatgttggcgaggatggtctcaatctcgtgacctcaggtgatccgcccgcctcggcctcccaaaatgctgggattacagctgtgagccaccgcgcctggcctgttttcctgttcaatataaatccactactaaacatttcctaggaataattattttacatgttcaaatctatcttaccatactgtgacctgtaccccgtttctctgccttattcatgaaggactaaacttcaaaaatccaaagttactctatcttttttttttttttttgagacagagtctcgctctgttgccaggttggagtgcagtggcacaatctcaggtcactgcaacttccgcctcctgggttcaagcgattctcccgcctcagcctccccagtagctgggacaacaggtgcacgccaccacacccagctaatttttgtatttttagtagggaaggggtttcaccatgttggccaggctggtctcgaactcctgacctcgtgatctgcctgccttggcctcccaaagtgctgggatttcaagcgtgagcccccgtgcccagccactctatcctatttctgaagctaccagccaagtggccacatttaaaaaaaaaaagaagaagaaraaaaaaaagaatgtgtgtgtgtgtgttttattatgacttgcttattgtgacccacttatcctggggctgccaccaccattgcctttttttctagagcccacaaaccatctgtttaacaaccctttttgaagttttgccataaattctccataaattcactggtctgtgtttcagaatgctcctttgtcctcttttttaaaattattatttatttatgtattttgagacggagtttcactcttgttgccttgactcaagtgcaatggcgcaatgtcagctcactgcaacctctgcctcccaggttcaagtgattctcctgcctcagcctcccaaagtgctaggattacaggtgtgagccaccattcctggcctctcctaagtcttaaagtctttctctagtttccttgggcagaagtggctgctgcctccacttctcctaagactactcagaacccatgccggggccttctctttaatattttaaaagaacttttagaacttttgaactacatagttttcagagacatacagtgattttctcaagagggtcttttatgtaagagcarcatgtatcattcaaaaggtgtttaataaatgttaaataataatgcacttaattttaagtactttgtatcctcttctctctttgttaatatctttaattggatcccctagcaggggatttggacttaatttatttcaggtgatactgcacttatacaattatttagttgacttaattagagatttaattatattagtgccctaaagtgctatatcagagaaattaaacactgactgttaattcacctttcgtatttattgtgctgtttatgactacagygatcttcaagccataagggcttgaagatttggaaagttctttctatgcatcagcttggactttgcccattcaaaatgtagatgaaggcaggaatggaaatgccttttttaggctgagtgcagtgcctcacgcctgtaatcccagctccttgggaggccgagatggaaagatcacttaaggccaggaattcaagaccagcctgggcaacatgatgagaccacccgccatgctcatgtccacagaataaaaataaataaattagccaggcatggtgatgcatgcctatagccctagctactcggaaggctaaggtgggaagattgcttgaggctggaatttgaggctgtggtgagctttgatcataccactgcactccagcctaggtgatggagtgagacgctgtctcaaaaagaaaaaaaaagaacttgaaaaaaattgtggtcttttatctatggctattagaaccaagatcatggacggttgtgatggttcacacctgttacctagcactttgggaggctgaggcaggaggatcatttgatcccaggagtttaagatcagcctctgggcaacatggcaaaacccatctctacaaaaaatacaaaaattagccaggtatggtggcacgtgcctgtagtgccagctactcaggaggctaaagtgagaggatggctcaagcccaagaggttgaggctacagtgaactatgatcttgctactgcacttcagcctaggtgacagagtgagacctgtctccaaaataaaggcgtatttaaaaaaagaacaaaaaagaaccaaggtcatgggtccattccttcactgttctacttaaccctctctgttctacaggcctgtgactacctctctaacaggtggtcctgggaggcagcaactgtgttcctctctgtatttccagcatataccaaatgcctaggttatataggtgtccaataaacgcttgttggttttaatttgattgttgcaaagacaaccagttgaagtatggttagaatagtataaacctggctgggtgcagtggctcatgcctgtaatcccagcactttgggaggctgaggtgggaggatcacttgaggtcaggagttcgacaccagcctggccaacatggtgaaaccttatctctactaaaagtgcaaaaattagccaggcatcatggcacatgcctgtaatcccagctacccaggaggctgaggcaagagaattgcttgaacctgggaggtggaggttgcagtgagccgagattgtgccactgcatccagcctgggtgtcagagtgaggctgtctcagaaaaaaaaaaggggwkgggggggtggttccaagatggccgaataagaacagctccagtctacagctcccagcgtgagcgatgcagaagacgggtgatttctgcatttccaactgaggtaccgggttcatctcactggggcttgtcagacagtgggtgcagtgcaccgagcgtgagctgaagcagggtgcggcattgccttacccaggaagtgcaaggggtcagggaattccctttccragccaagcgaagctgtgacagatggcaactggaaaatcaggtcactcccaccctaatcctgcacttttccagtggtcttagcaaacggcacactaggagattatatcccgtgcctggctcagaggatcccacgcccttggaacctcgctcattgctagcacagcagtctgagattgaactgcaaggcagcaacaaggctggtggaggggcgcccaccattgctgaggcttgagtaggtaaacaaagcagcgggaagctccaactgggtgaagcccaccgctgctcaaggagacctgcctgcctctgtagactccacctctggcggcagggcatagccaaacaaaaggcagcagaaacctctggagacttaaatgtccctgtctgacagctttgaagagagtagtggttctcccagcacagagttggagatctgagaatggacagactgcctcctcaagtgggtccctgacccccaagtagcctaactgggaggcatcccccagtaggggcagactgacacctcacacggccgggtacccctctgagacaaggcttccagaggaacaaccaggcagcaacatttgctgttcaccaatattcgctgttctgcaacctctgctgctgatacccaggcaaacagggtctggagtggacctccagcaaactccaacagacctgcagctgagggtcctgactgttagaaggaaaactaacaaacagaaaggacatccacaccaaaaccccacctgtacatcaccatcatcaaagaccaaatgtagataaaaccacaaagatggggaaaaaacagagcagaaaagctgaaaattctaaaaatcagagcgcctctccccctccaaaggaatgcatctcctcgtcagcaatggaacaacgctggatggagaatgactttgacgagttgagagaagaaggcttcagatgatcagacttctccgagctaaaggaggaagcttgaacgcatcacaaagaagctaaaaaccttgaaaaaagattagacgaatggctaactagaataaccagtgtagagaagtccttaaatgacctgatggagctgaaaaccatggcacaagaactacgtgacgaatgcacaagcttcagtagccgactygatcaagtggaagaaagggtatcaagtgattgaagatcaaatgaatgaaatgaagcgagaagagaagtttagagaaaaaagaggaaaaakaaacaaacaaagcctccgagaaatatgggactatgtgaaaagaccaaatctrcgtctgattggtgtacctgaaagtgacagggaaaatggaaccaagttggaaaacactctgcaggatattatccaggagaacttccccaacctagcgaggcaggccagcattcaaattcaggaaatacagagaacgccacaaagatactcctcgagaagagcaactccaagacgcataattgtcagattcaccaaagttgaaatgaaggaaaaaatgttaagggcagccrgagagaaaggtcgggttacccacaaagggaagcccatcagactaacagcggatctctcggcagaaaccctacaagccaggagagagtggggggcaatattcaacattcttaaagaaaagaattttcaacccagaatttcatatccagccaaactaagcttcataagtgaaggagaaataaaatcctttacagacaagcaaatgctgagagattttgtcaccaccaggcctgccctaaaagagctcctgaaggaagcactaaacatggaaaggaacaaccggtaccagccactgcaaaaacatgtcaaattgtaaagaccatcgaggctaggaagaaactgcatccactaacgagcaaaataaccagctaacatcataatgacaggatcaaattcacacataacaatattaaccttaaatgtaaatgggctaaatgctccaattaaaagacacagactggcaaattggataaagagtcaagacccatcagtgtgctgtattcaggaaacccatctcacatgcagagacacacatggactcaaaataaagggatggaggaagatctaccaagcaaatggaaaacaaaaaaggcaggggttgcaatcctagtctctgataaaacagactttaaaccaacaaagatcaaaagagacaaagaaggccattacataatggtaaagggatcatttcaacaagaagagctaactctcctaaatatatatgcacccaatacaggagcacccagattcataaagcaagtccttagagacctacaaagagacttagactcccacacaataataatgggagactttaccaccccactgttaacattagacagatcaacaagacagaaagtcaataaggatatccaggaattgaactcagctctgcaccaagcggacctaatagacatctacagaactctccaccccagatcaacagaatatacattcttttcagcaccacrccacaccaatccaaaattgaccacatagttggaagtaaagcactcctcagcaaatataaaagaacagaaattataacaaactgtctctcagaccacagtgcaatcaaactagagctcaggattaagaaactcrcccaaaactgctcaactacatggaagctgaacaacctgctcctgartgactactgggtacataacgaaatgaaggcagaaataaatatgttctttgaaaccaatgagaacaaagacacaacataccagaatatctgggacacatttaaagcagtgtgtagaaggaaatttatagcactaaatgcccacaagagaaagcagaaaagatctcaaattgacaccctaacatcacaattaaaagaactagagaagcaagagcaaacacattcaaaagctagcagaaggcaagaaataactaagatcagagcagaactgaaggagacagagacacaaaaacccttcaaaaaatcaatgaatccaggagctagttttttgaaaagatcaacaaaattgatagaccactagcaagactaataaagaagaaaagagagaagaatcaaatagacgcaataaaaaatgataaagggaatatcaccactgatcccacagaaatacaaactaccatcagagaatactataaacacctctatgcaaataaactagaaaatctagaagaaatgcwtaaattcctggacacatacaccctcccaagactaaaccaggaagaagttgaatcactgaatagaccaataacaggctctgaaattgaggcgataattaatagcctaccaaccaaaaaaaagtccaggaccagatggattcacagccaaattctaccagaggtacaaggaggagttgataccattccttctgaaactattccaatgaatagaaaaagagggaatcctccctaactcattttatgaggccagcattatcctgataccaaagcctggtagagagacaacaaaaaaagagaattttagaccaatatccctgatgaacattgatgcaaaaatcctcaataaaatactggcaaaccraatccagcagcacatcaaaaagcttatccaccatgatcaagtgggcttcttccctgggatgcaaggctggttcaacatatgcaaatcaataaacataatccagcatataaacagaaccaaagacaaaaaccacatgattatctcaatagatgcagaaaaggcctttgagaaaattcaacagccttcatgctaaaaactctcaataaaggccgggcatggtggctcacgcctataatcccagcactttgggaggccgaggcgggcggatcacgaggtcaggagatygagaccatcctggataacacggtgaaaccccgtctctactaaaaatacaaaaaaatagccaggcgtggtggcaggcgcctgtagtcccagctactcaggagactgaggcaggagaatggcgtgaacccaggaggcggagtttgcagtgagccgagatcacgccactgcactccagcctgggcgacagagtgagactccatctcaaaaaaaaaaaaaaaaaaaactctcaataaattaggtattgatgggacatatctcaaaataataagagctatttatgacaaacccacagccaatatcatactgaatgggcaaaactggaagcattccckttggaaactggcacaagacagggatgccctctctcaccactcctattcaacatagtgttggaagttctggccagggcaatcaggcaggagaaagaaataaagggtattcaattaggaaaagaggaagtcaaattgtccctgtttgcagatgacatgattgtatatttagaaaaccccatcgtctcagcccaaaatctccttaagctgataagcaacttcagcaaagtctcaggatacaaaatcaaagtgcaaaaatcacaagcattcttatacaccaataacagacaaacagagagccaaatcatgagtgaactcccattcacaattgcttcaaagagaataaaatacctaggaatccaacttacaagggatgtgaaggacctcttcaaggaaaactacaaaccactgctcaacgaaataaaagaagacacaaacaaatggaagaacattccatgctcatggataggaagaatcaatatcgtgaaaatggccatactgcccaaggtaatttatagattcaatgccatccccatcaagctaccaatgactttcttcacagaattggaaaaaactactttaaagttcatatggaaccaaaaaagagccygcattgccaagacaatcctaagccaaaagaacaaagctggaggcatcatgctacctgatttcaaactatactacaaggctaaagtaaccaaaacagcatggtactggtaccaaaacagagatacagaccaatggaacagaacagagccctcagaaataataccacacatctacaaccatctgatctttgacaaacctgacaaaaccaagaaatgggtaaaggattccctatttaataaatggtgctgggaaaactggctagccatatgtagaaagctgaaactggatcccttcctcacactttatacaaaaattaattcaagatggattaaagatttaaatgttagacctaaaaccataaaaaccctagaagaaaacctaggcaatgccattcaggacataggcaygggcaaggacttcatgtctaaaacaccaaaagcaatggcaacaaaagccaaaattgacaaatgggatctaattaaactaaagagcttctgcacagcaaaagaaactaccatcagagtgaacgggcaaccgacagaatgggagaaaatttttccaatctactcatctgacaaagggctaatatccagaatctacaaagaactcaaacaaatttacaagaaaaaaacaaccccatcaaaaagtgggcaaaggatatgaacagacggaaactcaaaagaagacatttatgcagccaatagacacatgaaaaaatgctcatcatcactggccatcagagaaatgcaaatcaaaaccacaatgagataccatctcacaccagttagaatggcgatcattaagaagtcaggaaacaacaggtgctggagaggatgtggagaaacaggaacactttgacactgttgatggaactgtaaactagttcaaccattgtggaagacagtgtggcgattcctcaaggatctagaactagaaataccatttgacccagccatcccattactgggtatatacccaaaggattacaaatcatgctgctataaagacacatgcacacgtatgtttattgcggcactattcacaatagcaaagacttggaaccaacccaaatgtccatcaatgatagactggattaataaaatgtggcacctatacaccatggaatactatgcagccataaaaaatgatgagttcatgtcctttgtagggacatggatgaaaccggaaaccgtcattctcagcaaactgtcacaaggatgaaaaaccaaacactgcatgttctcactggtaggtggtaattgaacaatgagaacacctggacacaggaaggggaacatcacacaccagggcctgtcgtggggtgggggaagtggggagggatagcattaggaattatacctaatgtaaatgacragttagtggatgcagcacaccaacatggcacatgtatacatatgtaacaaacctgcacgttgtgcacaggtaccctagaacttaaagtataattwaaaaaaaaawwtttttttaagtatraacccaaaacaactgtcttaaaatacagtgactcaaaatacatgccccaatgagtaggtactcccaaatctggctaatcactggaatgacctaagaaccctttttttcagtcctgatagactctatctccagggctagaggcctaggcatctgcattttaaagttccccacatgagtcttacggccaggcaagtttaggaaccccagcttaatgtatctgttgtcacgtttatttaaaaaagaacaagatcagctgggcgtgatggctcacacctgtgatcccagcactttgggaggccgaggtggacggatcacctgaggtcaggagttcaagaccagcctggccaacgtggtgaaaccctgtctctactaaaaatacaaaaattagctgcgtgtggtggcatgcacctgtaatcccacctacccaggaggctgaggcaggagaatcgctggaacccgggagacagaggcttcagtgagccgaaaccatgccactgcactccagcctgggtgacagagcaagactccgtctcaaaaaagaaaaaaaaaaaaagaacaagatcattcttttcaagatagacctattgcccattctagtttgcagtaaaaatgagtttcatttatggtttatcataactaaaggatttccttggagtcagtagtttatgtttagctagcaggagtgtttacagatgtcagtgaggaataatacctttcatgaaggattatattactgataagtcattactggtgggcattttacacatgaaagctatcaggttcctccttggtatgcaaagccctgtgagcccaagtctggagttgagtattgactaaagtaaaatagtcatcaggtatgagaaattaaatcctctaggactgtgatgtcctcctggttgctcttttgccctaatctgaattacccttttatcatagtattaaataccctgttagctatcatcagatatttagtttagcctggctgaataaagctcatagaggaacaaactaaatgaaacagtcaggggaatgtagaatgtaaaacattctggagtgcaggctggtctttcaaaatgacaatgtcatagcagaaaaaagattaaagtgtcataacaaacaaatgtgatttatgaactggatttatcatagtttaaaaatatggttaaataaaagccattctggaaccaattggagaaatttacacctggactaaatgttagataattcagccctgtgccagaattatcggggctgggcacagtggctcatgcctgtaatcccagcactttgggaggccaaggcagatggatctgttgaggtcaagagttcgagacyatcctggccaatctggtgaaaccccaactctactaaaaatacataaattagtcgggtgtggtggcacatgcctgtaatcccagctactcgggaggctgaggcaggagaattgcttgaacccaggaggcagaggtgcagagctgagattgcgccactgcactctagcctgagtggcagagtgagactccatctcaaaaaaaaaaaaaaattagggaattcttgacaaaataaaaagaaaaagtgtaaawttttaaaaattggaaacttgaacaaacaaaaaataaatagggaatgctctctccttttttttttttttttttttttgagatggtctcactcactctgtcacccaggctgaagtgcagtggcatgatcttggcttactgcaacctccacctctcgtgttcaagcaattctcctgcctcagtctcccaagtagctgggattacaggtgcacgccaccataccgggctaatttttgtttttagtagagatggggttacaccatgttggccaggctggtctcactcctggcctcaagtgatccatcccccatggcctcccaagtgctggrattacaggygtgagccactgcgcccggccgggaattctctaattagtttttctagttagctttcctagctgtgacaatagtattgtgattatgtaggacaatgttcttaagagatgcatgtcaaaacaagggtgaagcatcctgcagccaatgatgtgcccaaaccaagtcctaacgactcacaggctattattaaatcttcaagaattgtgtgaccccaccacccttggcagtttgaaatcagccataatgggagtatttataccacaaaaatctgcaaatgcaggcttttgtcccccaagagaactaatttactagcatatcactatcggcggtttactttcaaatggatcagaaaacacacacacagacacacatataratagaacaaaaatggcaaaatactaacaattgttgcgattgttgaatctaggtagagaatctatggtcattcatagcactagtacttgagtcagcagactttttctgtaarggccaaactgtgaatatttaacactttgtggccatacagcctctcaggcaactctgcaactytgcaactctgcctttatagcacaaaaggagtcatggataatgctcacatgaatggatgtggttattccccaacaaaactttatttatgagaacacagggtcaaatttagcctagggccatggttcaagttttctgtactttgaaaataatttataatacaaattgaacactttttaaaagtacaaatttctttttttttttttttttcctgagacggagtctcgctctgtcacccaggttggagtgcagtggcacaatctcggctcactgcaagctccacctcccggggtcacgccattctcctgcctcagcctccacagtagctgggactacaggcgcccggcaccacgcctggctaattttttgtatttttagtagagacggggtttctctgtgttagccaggatggtctcgatctcccgacctcgtgatccgcccgcctcagcttcccaaagttctgggattacaggcatgagccaccgcgcccggccaaaaagtacaaatttcttagcctaggctgggagtggtggctcacgcctgtaatcccagcactttgggaggccgaggtgggtggatcacttgagctcaggagtttgatatcaacctaacaaaaattgtgaaaacacatctctattaaaaaaatacaaaaattggccatgcgcagtggctcacacctgtaatcccagcacttttggaggccgaggtgggcagatcacctgaggtcaggagttcgagaccagcctgaccaacatggagaaaccccatctctactaaaaatacaaaattagctgggcatggtggcacgcctgtaatcccagccactcaggaggctgaggcaggagaatctcttgaacttgggaggcacaggttgcagtgagccaagaaacagcaagctgtttcatactgatctgttttcattccctggacactctgcacactttggccccctttgtgcctttgctcaaacagttttctttccctacaatttccttgctactcccaagcccatatctatttatcagcatttacaagacatcaactggccgaggtgacacacgcctgtaatcccagcactttgggaggcgaggggcaggaggatcatttgaggccaggagtttaaaaccatcttgagcaatatagtgagaatgtgtctctacaaaaaaaaaaaatttaaattagctgggtgtggtggcaggtccctgtagtcccaggtacttgggrgctgagatgggaggattgcttgtgcacaggaggtagaggctacagtgaaccatcatgatccaccactgcactccagtctgggtgacagaggaaggccttttaraatctctttcagttaaagttgatctctcatttctctcaatagctgtagtcctacatttgtgccctggttttgctgcttttcacagtttacccttaattaactcttgttytttgtgtttttttgtttttgtttttgttttgtttgttttttgagacagagtcgcactgcagcccccaggctggattgcaatggcgcgactttggcccactgtaacctccacttcctgagttcaagcaattctcctgcctcagcctcccaagtagctgggactacaggtgcacggcaccatgcccagctaatttttgtatttttagtagagatggagttttaccatattggccagtctgatctcgaactcctgacctcaagtgatccgccctccaaggcctcccaaagtgctggaattacaggagtgagccaccgcacccagccatcccttaattaactcttgatccacaaagcaaagaaggcttattctactctttacatatagtaaatactcaattaatactcataaattaaacatcttatctagtcatgcagacatttacatacctaaaggtgctaacctagaagtctagaataggaggagaatgttggtctgcctaatatcaatttggagaagagataatgaaaataggggagcttggcccagcgcagtggctcacgcctgtaatcccagcactttgggaggccgaggtgggtggatcgcaaggtcaggagatcaagaccatcctggctaacacggtgaaaccccacctctactaaaaaaatacaaaaaattagccgggcatggtggcacgtgcctgtagtcccagctactcgggaggctgaggcaggaaaatcgcttgaacccgggaggcggaggtagcagtgagccaagatcgcgccactgcattccagcctgggcaacagagcaagactccatctcaaaaaaaaaaaaaaagaaaagaaagaaaatagggtagcttgcttgctttctctcccttcctccctccctccctcccttctttcccttcttccttccttccttcctccttccctccctcccttccgcctccctccctccctccttccttccttccttcccttaagactgctctgatccaagtccagttagctttgaggttattgtatatcacgtcaaaatagacttgatcttggtgggtgggatggctttcttggtaatggctatgggcttaatgaagggaaactaagtcatccgagcatctattgtgatttaggcactatcaggcactctgtgcagtgttatgtagtccccccagcagtccgacaagggacttatattatccccacttagaactgagaacagttaaggccgggckcagtggctcacgcctgtaatctcagcactttgggaggctaaggtgggcagatcacctgaggtcaggagttcaagaccagcctgaccaatgtggtgaaaccctgtctctactaaaaatataaaaattgactgggtgtggcggtgggcacctgtaatcccagctacttgggaggctgagacaggagaattgcttgaacctgggaggtggaggtttcagtgagtcgaggttgcaccattgcactccaatctaggcgacaagagtgaatctccatctcaaaggaaaaaaaaaagaaaacagttaaatggtttccataagattataaagctaggataggagtttgaatctggctgcttctgatacccagcaccattttagtgcctttgtgcattcaatgattggcaagagaccaaggaaacctaggctagaacagttcccaaaggctatatgcagtgtggaaatatctgtgaagtgctgagaatctgatggagtttagtattaagtgccactggacaaggcattagaaaacctggcctctggcggagcacagtggctcacgcctgtaaccccagcactttgggaggctgaggtgggcagatcacctgaggtcaggagttcgagaccagcctggccaagatggagaaaccccgtctccactaaaaataaaaaaattagccaggtgtagtggtaggcgcctgtaatcccagctactcgggaggctgacgcagagaaatgcttgaacccgagaggtggaggttgcagtgagccacaatcgcgccactgcactccagcctgggcaacagagtaagactctgtctcgaaaaaaaaaaaaaaaagaaagaaaacctggcttctgatctctactctgcctgcctccatctgtgatcttgagtcactgagtttctctggacctctgttctcttgactgtataattagaggaataaatcagcttatttattttattcattcatgtttcatgcattatacagtaaggaccttgaagtctcatgaagtcatagataagtgaatggagaattaaaatacaacactaagtcgggcgcagtggctcatgcctgtaatcccagcactttgggaggccgaggcaggcagatcacgaggtcaggagttcgagaccagcctgaacaacatggtgaaaccccgtctctactaaaaatacaaaaaaattagccaggcgtggtggcgggtgcctgtaatcccagctacttgggaggctgaggcaggagaatcgcctgaacctgggaggcagaggttgcagtgagccaagatcgcgccattgcactccagcctgggtgatagagggagactctgtctaaaaaaaaaaacaaaaacgctaaaacaatacactactccagatgtgcacagggagtactccaggtacccagaggaagaggagcaactagctccttagggccatcttcctagctcagtgcattccacccaggtggaatttggggagcttgttggggtsggggagacagccccagggggagatggtagatcaggttacctctgagaactgcagttggttcccctataattaaaggggagaaggtttgggaggctgaggcaggaggatctcttgagcccaggagtttgagattagcttgggcaatatagtgagacttcatctctacaaaaagtttttaaaattaaacaaggatagtggtgcatgcctgtcttcccagctacccggtggctgaggtggaaagatcacttgagccggggaactggaagttgcagtgagccaagatcacaccactgcgctccagcctgggtgacagagcaagactctgtctcaaaaaatacataaataaataaaggaggaaaaggggggaaaagtgaggccaagcaagagctagcttggcaagggacttaaatgcctcatgaaagagcttagacttttctcttaaggctattggaagggtttaagcaagattgtctttgcattttattaagatctccttggcagcatagtagatggagtccaggggtgcagacctggtggtgggaagactctttaggaagtgattgcaaaaactaactgaggtgagagatgatgatggcctgaactaatgtagtggcaatgggaatgaggagtagaggataaacttgagagctctgaagagatagaaagactrggattcattgttatcagtcaaaatggctacagataatttcacaacctcggctgccacaggtgggcgaggcactgtggtgcwcattacagtcactcagggatccaggccaaggagcatctccagtgtgggctggtagctgtgcaagagggaaagctctctaaggactcacaggacagttaaatgctgcagccacaaagtgacatccctcattcacaactcatagaccagaacttgtcacctggctacacccaatctctgggagccagaaagttcagctgtgaatgagcaaccctgagactgcccctgtgcctaaccggatgtggggaatgaagacgtctgggtttctgacttagagaattagccagactggccaggcatggtggctcacgcctgtaatcccagcactttgggaggccgaggtgggcggatcacaaggtcaggagatggagaccatcctggctaacmcggtgaaaccctgtctgtactaaaaatacaaaaaattagccgggcatggtggtgggtacctgtagtcccagctactcgggaggctgaggcaggagaatggtgtgaacctggaaggcagagcttgcagtgagctgagatagctgcatcccagcctgggtgacagagcgagactccatctcaggaaaaaaaaaaaaaaaaaaagcattcaggccgggcacagtggcttacgcctgtaatcctagcattttggaaggctgaggcaggcggattgcctgaggtctggagacggagaccagcctggccaacatggcaaaaccccatctctaccaaaaataccaaaattagccaggtgtggtggcaggcgcctgtaatcccagctactcaggtggctgaggcagaagaattgcttgaatccgggaggcagaggttgcaatgagacaagatcatgccactgcactccagcctggatgacagagcgaaactttgtctcaaaaaaaaaaaaaaaaaaaaaaaaaaaaaggccgggcaaggtggctcatgcctgtaatcccagctttttgggaggctaaggcagggggatcacgaggtcaagagatccagaccagcctggccaacatggcgaaaccccttctctaccaaaaatacaaaagttacctgggcgtggtggtgcacacctgtagtcccagctacttaggaggctgaggcaggataatcgcttgaacccgagaggcgaaggttgctgtgagcagagattgtgccactgcactccagcctggcaacagagtgagactccgtctcaaaaaaaaaaaaaaaaagtaacattcagatctaatactatgtgtctttcttgaattttcatatggactattgtgtcaacatatggtgttaaaaaaaaagttattaactaagatattagtgaagccttcctcacataagaatatcaggctgctggccaggtgcggtggctcacacctgtaatcccagcactttgggcagcctaggcaggtggatcrcttgaggtcaggagttcgagaccagcctggccaacatggcaaaacgctgtctctactaaaaaatacaaaaattagatgggtgtggtggcgcatgcctgtagtcccagctatgtgggaggctgaggcaggagaattgcttaaacccaggaggcggaggttgcagtgagccgagatcgcaccactgcactccatcctgggcgacagagcgagactccatctctttaaaaaaaaaaaaaaaaagggaagaatatcaggctgctgaattcaaaatgccagagatgtaaatgccctccgccttcttactgccatcccccagcatggcacatttcaagatattaagggatgggagtcaggaggagctgtaattargctgattggaacctattgtgctgctctggagcacagacaccaagcagccttagggaatgagtgcctcaagatcactgggaaatgatgtcctcttttccagaaaataacgtagcagaaatactcaatctatactatttctccctttctttgttttccatctcccctccccaatttaattgtggtgcttactgtgtacctttaaaactgacttttatcatgcatttgtttcttaacagttgcgagaaagaatcaaagctggcaaaggtgtgacttcagctattgacctgtgtcgttaccatggaaacaaggcactggaggccctggagagctttcctccctcggaggccagatctgctttagaaaacattgtgtttgctgtgaccagattttcatgacatcaaattaaaaagacactattgttagttagctgaaaatcctagggaatgaggttgattgggagcgctttcacgatgcgttaatgacttttaaaacatatgcatttttccttccttttatcacattgctaaatgagttctgctttctttttggaactgctacaaacaaaattagaagaaaaaaaggtcaagcagttttcacttgtcacgccagaagcacacttgaggctgcagtcgcagaaataattaatgagattcgctcctgtgacctcagcaaatggacaggaaataagtccttattgattggaccgagccagggatggcgccagggcggtggcctgtggtttttcctgctagagaggacaaagcaagttggaagctgcaggtgtcaagagaaatgctctcaataccaaccagggaggattgtctaatcaaaaactagtgaccaatttgtcataatggagagtagttcaatggattgagaaaaatatgttttatttgttggcttgtaattatgtctctggattattattatttttttttttagatgtagttttgctcttgttgcccaggctggagtgcaatggtgcagttttgactcactgcaacctccgcctcctgggttcaagtgattctcctgcctcagcctcccgagtagctggaattacaggcacctgccaccacgcctggctaattttgtatttttagtagagatggggtttcactatgttggtcaggctagtctcgaactcctgacctcaggtgatccgcctgcctcggcctcccaaagtgctgggattagaggcttgagccactgcacctggcctcatgtctctggatttataatgcagtatgaatatactttgtgctttatggtttttataatgtctttttggagaaattgccgaaaagttgccaaatacttgaagtaggagattaaaatgttatcaaatgttaaattggttatattaggaatagtctgtttttctttcctgaagatcagtttttttattcaaacacatttcaaagaaccaaattttttttttctttaaggaaaaaggagctttttttcaagtgaaatgtattcatttgtaatactttggtttaaggcatactttaatttttacgagtttcagaaacagaatttttgtactagggaattcattggtgagagtgttcttttaacctcagaatgtcaaattttggtcttgaaccacagacatccaattacagaaagaatataagcaatctcacaggcctgcaatcggacactgtctctgtgtggttcataggagatgatttttgaggtttgcactcatgcaatttgagaacaccgttgacaagaaggctgagtttacataaatgatctagattgaaactcagctacctttcttcctcatgtggtgtaattacagccctatctggagacagcgaatacagcaaacagattttattacctagttcgctcaaacactacatgaagttattttagttaaagccctcccccaaaagttataaaaccattttatcagggcccaacatgtggcatgcaatgaagagaaaatgtaaagctacagaggttaatgtattgtattataaaatattttaagtgtactcaaaatatcataattgtacagtttatgccaccataatttgaggcctatagatttagcttaagagaacactsttctgtttgaaatgctttctgtcactgaaattggcttaattagtaaccatggataagatgctttagatcagactaggttttaatcattaacttccacaaagaagtcatactttgcgttaggtgtgctggttggaygtgcaggaacttcagcaagcagtaggttttactaagcagatggtcgggcactgcagggcaccaggcaggatcctagggcgcctcttattctgcgttagcatctggtttgctgtatgaccttgcacaagtcacttccttctgagcctcaattttctcatctgtacaatgagattcaaaagttgacctgaaagtcaagtgtgaaaaaaaaaaagagattaaacaagataattatgaaattctttccaggtttgttttattttctgaaagtttactattcttgactgtctaaatagcaaagatgctgtgtgaggttcagggaggagggaaggtgaaacccaaagagaggccctgaaggaatggagagagcttaatggcaagcttcctgccaagctgcctctgcatgacctaaaggattccagctctcctatgtgacatgtaaccctggacttttctgtctcaacacctgccttgctgctttcttcgggacctttcctacctccctgtcatcttcccagctgctctcgtgtcctttatcccatctcctgtaccttgccatcctgactccctggaacctggatccctgggagcagtagccccctgctgcctgmtgagtgacagagctctgcctcccccacaggggtggctggcctccttcctcaggccccacttagcagaattctcacttcctcagcatcacggcaggcttttacagaacataacaagttggctagttcactccaaaatacaagaccaatagcctttctccctgccccttcttcagggatatttatttcttagcacatatgaagttcttatagtttcagacaatctctaaggagaaatttggggcactgaaacattcctcaatcacacctctcagcctgctgctgcctgggtgtggctaatggaggcagtaagtagaattaatggctctggaatgtgtccttggcccctctccagctttccccatccccagttacctgctagagggaagaattcattcattagcaattgtcctgctttcctctgcctagcaccccccaaattgtcagctggctcctgcaaacctcactcactactcactccaggcccatgaactctcctccctgttcatttcttctttgttaagtatacttggccaggtgcggtggctcatgcctgtaatcccagcactttgggaggctgaggcaggcacatcacctgaggtcgggagtttgaggccagcctgaacaacatggagaaacctcgtctctactaaaaatacaaaattagctgggcatggtggcgcacgcctgtaatcccagctactctggaggctgaggcaggagaatctcttgaacccgggaggcagaggttgtgatgagccaagattgtgccattgctctctagcctgggcaacaggagtgcaacttcatctcaaaaaaaaaaagtatactaaaggctacattaatgcaggcttccatgtcccaggcactctgctaggggccttgaatatactcacttgttttaacccccacaaacactcttgggagtaggtgttatccccctatttacagatgcagaagctggcagagaaaattacctctgattgactggcttgtcctcccaccgcacctcccacctgagggtctcccagtagtgcctctttctttttttttggcttttaaaaagaaaaaaacaacatttttttccaacgatttcaagcctgttgcctcctgtctccttcatgtctctattcttgaatcttcagtgtctcttctgctggctgtgagtgtgttcagctctccttgtacctaaaataaaacttcttacttcaccctgtttatccttccacctccatttcttcccccagctttaccagcaaaccttcttacagtctactaactccttacctcctacaatcggtcattcactagcaggtccccattatctagatcagcaccacactttaggtactcaaagaatacttgctgaacaaatgcatcaggcctcttgctgcgctgctctactgagatggattcttaaaagttcacagctgccgggtatggtggctcacgcctgtcatcccagcactttgggaaactgaggcaggcggatcacctgaggtcaggagttcgagaccaacctgaccaacatggtgaaacctcatctctactgaaaatacaaaattagccaggcatggtggcttatacctgtaatcccagctacttgggaggctgaggcaggagaatggctggaacctgggaggcagaggttgcagtaagccgagatcaggccattgcactatagcctaggcaacaaggacaaaactccatctcaaaaaaacaaaaaaaaaattcactgctggtgtcttcactggaatttgtgagcagctctagcagtggccctgcactctgccctgaacttgctgtagcatttcatgttgcagcctgcccctgggtgcccgtgaccacctcagttcagagtcttcttttttttcccttttgagatggagtcttgctctgtcgcccaggctggagtgcagtggcacaatctcagcttactgcaagctccgtttcctgggttcaagcaattctcctacctctgcctcccaagtagctgggattacaggcacctgccaccacgcccagctaacttttgcatttttagtagagatggggttcaccacgttggccaggctggtctcaaactcctgacctcaggcgatctgcctgcctcggcctcccaaaatgctggcattacaggcgtgagccaccgtgcccggccagttcagagtcttcttctcttctctgactactcttttttattcccacccctagagccatacttttctaaacatttcaattctgtctccccagaaacagtttgacaaagcagtttcctggcccactaagtcctcttcttttaaattctccaactaagaaaaattgttctctgacataagaacaatatcaggccgggcgcggtggctcacacctgtaatcccagcactttgggaggccgaggcaggtggatcacgaggtcaggagatcaagaccagcccggccaatatggtgaaacccggtctctactaaaaatttaaaaaattatccaggcagagtggcgcggcaggctactcgggaggctgaggaaggagactcgctggaacccaggaggcagaggttgcagtgagcagagatcgcaccactgcactccagcctgggctaaagagcgagactcctctcaaaaaaaaaaaaaagaacagccgggcgcggtggctcacgcctgcaatcccagcactttgggaggccgagatgagccgatcatgaggtcaggagatcaagaccatcctggctaacacggcgaaaccccaggctggagtgcagtggtgcgatctcggctcactgcaagctccaccttccgggttcacgccattctcctgcctcagcctcccaagtagctgggactacagggaggctgaggcatggctaattttttgtattttgtttaatagagacggggtttctccgtgttagccaggatggtctcgatctcctgacctcatgatccgccagcctcggcctcccaaagccaccatgcccggccaaccttgtatattttacttgataacaccaaattctcttgggttatcttgcttatataatgtggctatccagtcacacctaaaaataaatgatcagtgacattgtttgcctggtccagggtttcattctccagtgtttgtaactttatcttacctatgacaatattattctatggcccaagatgtgggtgacacctacaaacttgggctaaaagacgtatacattaatgcaaaatgttccaaaaagatataggacttttttctggtcacattgaactccagtaaccagaaagtaacctgaataatcctcaatgatctcctttcaaaatttgacaaatggctatactaaaggtgtttttaaataagcaggttttaggccgggcgcgatggctcatgcctgtaatcccagcactttgggaggccaaggcgggcggatcgcctggggtcaggagtttgagatccacctggccaacatggtgaaaccccgtctctactaaaaatacaacaattaccaggcgtggtggcgcatgcctgtagtcccagctacttgggaggctgaggcaggagaatcgcttgaacccagaggtggaggttgcagtgaggtgagatcgtgccactgcactccagcctgggtgacaaagcgagactctgtctcaaaaaaataaataaataaaataaacaagcaggcttgggagcttgtggtttttgttttttgagttttcttatgatatctttttttaatttgggaaaatgtacatataaatttacctttttttttttttttttctgaaacagagtttcgctcttgttgcccaggctggagtgcaatggtgcgatctcggctcacggcaacctctgtctcctgggttcaagagattcccctgcctcagccacccgagtagctgggattacaggcatgtgctaccacgcctggctaattttttttaatctttagtagagacagtgtttcaccatgttgaccaggctggtctcgaactcctgacctcgtgatccacccacctcggcctcccaaagtgctaggattacaggcgtgagccactgtgcccggccactttttttttttttaagactccagctaatcagcaggttcatcactaataaggagaaccttgcttttcggaaaactgttttcagactccttcctggagttcttagttttaggaagatcctttcctgcctattcatttgttttcacactttgaaatcctgttgttatgacgaatagaagctccaaggaattgtctttagaatctgtaaggacttcttctcaatctgcagaaggcttgccacaccttcaccaaagcacagtcagtgatcgattagttggcttgtttttaattcatttgatataactgaataacttcagagtagctagaaatacaagcgcaaaccaccctgcccagctaatttttttatttttatttttttgtagagacagggtctcactttgttgcccaggctggtcttggactcctggcttcaagcaatcctcctgcctcagcttcccaaagcactgggattatagccatgagccactgggccctgccaacattgtaatttattattattattattttgagacacagtcttactttgtcacccaggctggagtgcagaggcacaatctcagctcactgcaacctccgcctcccaggttcaagcgattctcatgtctcagcctccgaagtagctgggattacaggtgcgcaccaccatgcctggctaattttgttttgttttgttttgttttagtagaaacagggtttcaccatgttggtcaggctggtctcgaagtcctgatctcaaatgatccttctgcctcagcctctcaaaatgctgggattacaggcgtgagccaccatacccaggctgtgatttatttttatttttatttttgagatgaagtcttgctctgtcacccaggctggagtgcactgccaggatctcggctcactgcaacctccgcctcccaggttcaagtgattttcctgtctcagcctcctgagtagctaggattacaggtgcgagtcaccatgactgcctaattttttgtatttttagtagagacagggtttcaccatgttggccaggctcatctaatcctgacctcaagctatcctcccacctccacctcccaaagtgctgggattacaggcaggagccaccctgcctggcctacccaacattgtcattttttttttttaatgataaaggcttgaatagaggggcacattttattgttattaatagtttccattattgttaattatgttttattaataataaagttgtttgcactgtcttttaaaaacacaaagcactctaacaagataataataatttacctctttctcttctcccaccttcagtcctgatcccttacatattaactgttttattctttcagaatgggtcctggctttccattagggaaattacagacttccaaaggtgacttaacaagaggtgtcacctggtaagaggccagaactgatagtggaatgtacccctcctttagctcaccccaccttgcatcggagctctcaaaggctataggtttaaggccactacagatagaatattcctaacttaaatccactggcatatatagagtatgaccaatttgttgtgagr

SEQ ID NO: 94161 - DNA, 18161 bp, Homo sapiens
ttaaaggtataatcttttgtcaaataatatagatgaatggggttgggaggttgggaaaggtggcaacttctttcttgaaggagccaagagcagctaaggaagagtggggagccatgcagtcatgtctttctctctctggagttccctggtgggaatgatgattagttacctcagtggcaagatatgcccatgttctctctggaataggctgctgagaacacagcggttctcactaaaagactgacactaatagtgtacaactttcttctttgttcatagctgtcttctggcatctgagcaatgctgatctcactagcaatcctttctggataatcagtctccatttttttactccgcagtgtttctgcagattccttaatgtgcctttgagccctctcagggctattttggtttgtggatagctatctgtatttgtttttggatgggatgaaaggtattacctcgtactccaccatcttggtgacatctgtcagaactttttatatcactcaactatcttgtgacttgtgtttctatgaagaaatttgaatactaacttttttttccaggataatttattttgattatttttatatttatattgttaatattgttaatattttattcttcctgtcttctgggaacacaggtggctgtaagtcccagctgaatttgcagaaaggaagaccaaatgaatacttccaggttatggagtatgagatgtggtgataaacgatacttctaggacaaatcataagagtgggatttccatatgctttcttagctaccatggcaacaaggccctgttccaactgatgaagctaatggacagcaaatcagagcccactgtcaacctgtagtctgaaccacatgaaattgctatttgaccatttttgaactagaaaatggcaatctcatatattttaactcaatgttagaaacacgtagtgtaggctacaaacacacctttgttaaattaagatactaaaattaggagtcagtttattatagcagctatgataaatcttgtttttctttttttttgagataaagtatgccctttgaattatcagaattaagtctctgtttcagggaagtaatctattttatctttgaatatgctttcttttccatttcaactgtactctttaagaactatgtatttttattaatagagaatattgtgtacatttattgggtacatacatgtgagtatgtgttatatgcacagagtgttaatgatcaagtcaggctgtttggaatattccttacttcgagtctgtattctttctttctttctttttatttttggagatggagccttgctctgccacccaggctggagtgcagtggtgcgatcttagctcactgcaacctccgcctcccgggttcaagcaattctcctgcctcagcctcccgagtagctgggactacaggcgcacactgccacgtctggctaatttgtgtgtgtgtgtgtgtgtgtgtgtgtttagtagagacagggtttcgccgtgttgcccaggctggtctagaactcctgagctcaggcaatccgcctgcctcagcctcccaaagcgctaggattaaaggcgtgagccactgggccctgccaagtatgtattatctctatgtgttgggaaaatttcatgtcctctcttctagctactttgaaatagtcaacacattgttgctaattaaagtcactgctattgaacatgagaacttatttcttctatttaaccatatgtttgtatccagtaaccagcctttctttattgcctcttcccaccctcacacacttctcagcctttggtatctatgattgtgttttctaccttcttgacgtaacttttttagctcccccatatgagtgagaacatgcaatatttgactttctgtgcctggcttatttcacttaacagaattacctccatttccatccatattgctggaagtgacatgatttcattcattttatggctgaatagtattccattttgtatagattttttaaaatccattcatctattgatggagacttaggttgactctgtgtcttggctattgtgaatagtgctgcaatgaacatggacatgcaggtattcttttgatatactgatttcaattctttttcttgggataaatacacagtagtagaactgctagatcctatggtagttctatttttcactttttgagaaatctccatattattttctgtactggtttactaatttaaattccaaccaatggtgtaggagaattccttttctctacatcttcaccagcacctgttacttttagtctttttaataatagttattctaactgggataagataatatctcattgaaactttgattaatgatgttaagcattttttcatatacctcttggccattcatatgcattttataaatgtctgatcatgtaatttgcctacttttaatgggattatttgttttctttattgttgtttgagttctatgcaaattccgtatattacttccttgttggatgaatattttgcaattatatttttcatccactaggttgtctcttttattattatttttttttgagacaggttcttgctgtgtcagccaggctggagcgcagtggcctgatcacacctcattgcagccttgacctccagggctcaagtcatcctcccacctcagcctcccaagtagctgggactataggcacacaccaccacacccagctgtttttttttttttctatagagacagggtttcgcaatgttgcccaagctggtctagaactgggctcaggccatttgtccatctcagcctcccagtgttaaggttgcaggtgtgagccactgtgcccagcccaggttgtctctttaatctattgactatttcctttatgatgtagaaattttttagtttaatatggtctcattgtctatttttgtttttattgcctatgcttttgaagtcttagccatctctttgccacaaccaatggcaacacttgaagtgttttccctatgttttcttctaagagttttatagttttggatcttacattcaaatcttcaaaccatgctgagttgatttttgtggatggtgaggaaaaggggtccagtttcattcttctgcatatgaatatccaattttcacagcactatttattgaagagactcctttcttcaatgtatgttcttggcaactttgtaaaagattagttggctataaatacatgaatttatttctggtttctctattactaggctaccatagctttgtaatatagtttgaaatcaggtataatgcttccaggtttgttctttttgctcattgctttgggtatccataatattttggggggtttcatgtgaattttaagattgctatatctaattctgttgaaaaatgacactgacattttaataggaattgcattgatgctgtagattggtttgggcagtatggtcattttaatgatatttcttcctattgatgagcactggatatgtgtccatttgtttgtgtgtccatcagtttttttcatcagtgcttggtagtcattcttgtagagatctctcatcttcctagttaaatattttcctagatattttatttttttacctattgtaagtaggattaccttctgatttctttctcagcaatttcattatttgtgcatagaaatgctacttttttctgtgtttttgtattctgcaactttactgaatttattgatcagatctaataatttttttggtagagtttgaatgtttttctagatattaggtcacatcatccgtaaagagggactatttgacatccctttttttccagcgtagatgccttttttttttctttctcttgccaggttcctctggctagcacctccagtactatgttgaatagaagtggtgaaagtagaaatccttgtctcgttccacttcttaggtaaaagactctcagctttttctccttcagtatgatgctatctgtgaatttcttccatatgacctttattatgttgtgctatattccttccgtgcccagtttcttgacagttttttatcatgaagggatgttgaattttatcaaagctttttctgcttcagttgaggtgatcacatgacttttgtccttcattctcttgatgtgatgtatcctgtttattgatttgcatatgttgaaccattcctgtatccctaagataaatcccacttgatcatggtgtatcatttttttgaggtgctgttgaatttggtttgctagtgttttgatgaagatttttgtgtctgtgttcatgagggttatgggtctatagttttctttttctgttgtgtccgtttttggttgtggtagctggataatgtggccctcatggagcaaactagagagaattacctcaaatttttggaatactttaaggaaaattggtgttagttcctctttgaaagtttggtataatttagtataatcagtgaagccatctgatcctggacttttttgggggcgagacttcattactgctactatctcattacttgttaccggtctgctcaggttttttatttctttgtgtttcaatcatggtaggttgtatgttttcagaaatttatgcatttcctctagattttcaagttcgttagcatggagttgctcataatagtatctgatgatcttttgtatttctgtgttatcagtggaatgttgtgtgccctgactttcctgttcagtgggcggggtggggatacaaggcagagtaggaccacttggctcacccacaaataccccagtgatgtgtgcaggcaccaaatctgatgggtgtctgggggaactcctggtgaaatgcattgaggtctccacagggggagaggggctgaactacctccatatcttagacaagcaggaacatgatctgtttccttattccacccctttcctgggccctgtgactctcagtgcagccacccactgtcatctatctccaggacaccatgtggctgagagccacagaaaatgcttaatggccttgaggtagaaccgcttcactcagcctaatacagacagctttgtggttcttctgttctccaatgtgagaacactgctgcttcacatagagaggggtagaggcttcaccttttggcacatatgagtgggtgtcagctgtggttgtggtggctggttaagtggacccgacctcagaacctaggggagtctgaggactcagactgagggagtggtcaggccccggcagtgatggagtgggctaggaaatctctgtgtccccaggaccctaaatggccaactagatggtgtataacaggcctggagtgactgggcccggaataagccagcagtcttgttcttatgtccctagaagtcaggtgccctctgtgatagggagaagcaggctgctgatttccgggtcaccagcagaaatttcagtcaggggcaggcagaatgctcaggcagtggaagagtgctgagatggtgggagctccagggtagatcacaggcctgtgggggctgggctctcagaaagtttccagggtgcatctgaaatgataaggcaggagcaggacagctgtgctgaaggtattttacatggaagacaggccttcctgagtgggagcagtgaagggagggagctgtgtggcgcatgcccacttgagcctccctctcacaggtgcagtggcagtatcctgccttgggatctgcaagcatgcctggcctcccactctcttcctggcctggaagtgctgagggcagcagcggtggcagtggcagcccaagggcatatcaccaggctttggggcctgtgctctcagaagaataacgttcagcagtgagaatgctcaagcaggggcagtcctgctgctggagaaagtaggcctccttcagctggagcagtggaggctggcagctgtggggcacgtagcttgcttgcagtttgctcccgtagaagtggggtggatttcactgttgggccatgtttccccgcttccagcatggctcagtggcagcaactgctgcggaggccaaagggtggatcaccagccccgggttggggatggctctcagaacacctggctgcagccagcatgctcaagtgggagcagggtggctgggctgcagacctgtctcagagtcaggtcaagtttagcggggagcagcagagacaggcagttgcgtggtgccatcttctcacctgttgggttgttttgtatgatatctctggcaaatttctcattcatatcctgaatcgtttttctggttgctttgtgttgtttttcagtattcccttatatcttatcgaacttcyttaaaattgatattttgagttcttttctgggtttttgtaactttttaaaaatggggatcttttgccgaagaatgattgtgttcctctggaggagtcacatgtttttgctgttttcatgtatccttacactggtatctgtgcatctggtgtaacagtcatttctttcaactctttaaatttgcattccccagagccctgacagaatgcttaggtcgagggtggctgcagttgtgctggatccaagccactggggaggggagggctgccttcagtggtggcagcctaagctggcaggtgaggaacacccactctgtttgtacttcagccatggtgatggctgcttcactcacacctcaatcctagtgactctgggcccccggtcagtgtgcaggctcttttgagttgggatttcaaaatggtaccttgctgtagctgcttaggactcagcgagagtgtgggacccaggacaaatccttcaagtgcttcatatttttaaagagaatttgttttttctctattccattactatcattttctctcaattttatgttgtttttaaaagtttacagtgatttacttaggcttrgccattatatatartttattcttattccatttttatttttacatttagctttcattttttacttcatatatttgcctttttttcctgaaaaataaaagcycttgttttcttccattttggtctactatatatattttctgaatatttacaactcttgtaactttttctaagaaatagcatgcctgtaatttcattgcaactattacaaatgttttacacaatttcattttgtgtttttttgagtagtgccttctatgatatattgtacttattagctctttgtttacatttctttctctaacatttttccccacatttcttcttgattttaatctttgagttatgatcagtagggtctgaagagaagtagtgtgagaggcaagggtaatgttagaagggttgtgaattggagcaaacattagctttcactttgtgtcagtgtttaaaaacaacctctcactaaatctgacttttctttgttttgagctgtgtcrttgccaggtgtgaggtattgaaaaagagaatgtagattgcagcaagaccctttaagtcacaaccttttaaaagttgcctatatttaaggtgtacaacatgatgttttaatacagatcaaacctttctgtgcttgaatctttggcttgtttttctttacctcctctttgccttcacatttggcaagtttccaaactagagacaagtttgtgtataatataaattgcttatttacatggtttctgttaaatctcctctttggaagtccctgatgtcaaactaaacttttatagcgcattctctatagtctgccccacattctcccttaagcgcatccctatgaagtaccaatctctgattttagatatcattatattccaatgattatagggtttatctttcaacaacaacatcacatgttggaaaagatatatcttgtttgaagtctgacacagcatctatacatattccctcctcttcacccaaaagtcacagattttggcccaattagctgtatagtatttgaatttgtggcattacccaactttctggatggtcatgtggtagttaatttgttcatgtttcaaagaatgtgagaaccacaattgttctgcttacccttatattcagaaagatcaaactgttggtgtttcttacattttagggcttaaaaattttgttgaatgaatgagtaattgaaagtaaaaatgaaataaaaatgaaacagccttggaaaccattatatacatggtaatctgcagtacaatcctaacattttaaagaagataggcctgtatccagtaaatatataatatattgctattgatttagctttatatttgatatttatagttttttcttctaagcaacgttatgtcaaaagacccaaatttaagtgaatgtgaagtcttaattttctgtatagacactatagatattttctaaaataaatatatgatatagtggacagtggaaattttcaataaggaaaaattattttactgaatgagattagcagaaatatctaattgctttctttcttcactttttttctcttcaaatgtactacctgacacattacatacttctttcctacagtgtaaataaatatacagcttactttaagatttgccatataaatttttctctacgtcctcattttactttggtcattcataattttatggtaaaacttgtgaatataaacaaagtataacttcttaaaactattcataaacaatgtgaaaaatagatacaatgtagtcttagcwtataaaaaaatcacagatatatgtgtctattcttttaaggaaaagtagcttttgaggatattttgtcaatataaacactgaataaattttaaaattcaaagctataaaaacttccttagaaagaaggttacattgatgaatgttccttatgagaatgacttccttggattgtatatgtgtccccaaaccaggaaagtaaaacactcttctccatcatgccagaagatcatatgtaagtcttatcagggaaagaagggaacttaaatgcattatatttcttggtaaattataatcaaaataattatcaaactttaagagaggcaaattagtaaccaattcttcaaagaaatcaaatctcttgagcggttactgattttatgtgtgaacactttctataaacatcaacctcattgataatgtaattttcagggagtacttgaagtaagccaaaatcctgacacatttaaaactaacaagaattcagtggaaaaaaccttacattcaaactataactgtttggtaaaggtgttttattcaagattcaagattattttcaagtcaggatgagttcattatcagagcattgtagtaatagctaggcctagggagaaagggtaaaattacaaatctggaacaaaacgatagaatctccaaatgccaaatgatattttgaaaagtaggaaatggtaagttgaacatagcaatttagaaaatggggatagatgtttaaattacctcacaaactagaggatcactgggaataagcggagtagacwtttttggttttaattttgtttaatgttgcattattggaaagtaaaactaaataaaaatatcattataataaataaaccaattgtatagactgttagaagaggaattaatatgtgcaaatatgaaagaaacctaggtcttagaatacaatatatcatgcattgtcaatgagtttgacagaaaacactgaataaaaatataaaaataagcaataagaggaagtgtaaggaagtaagaaaaagtatggcatttttcctattattcatatttagtactatgattatatgtaaataaggtaaatattggaatgaatggtaagattaaaaggcaactcattctctctattataaaaatatttgtctgaacactatcaagaatccagatktgtgaaaacataatgctggaagtagaaacttctagagataaagacttgactgattagaaatatctaaaatctagaaacacagtgctatgagatttagtcctaccttgcagttgaaacaactaaaaaatgatgaacaatttcataaaatataatatgcatatttttcttaattttaataactttcactttaaatatacacacatataaatacacacacacatataaatacacacatgtgcaggtcaaaacaaaaacaaaatgtggtcattaataagcacatctaaatcaaccctacagtgacacagaaatamtttttctattccattctttctaaaaatcaaatagaaatgttttaattttctctacttaaaaaaatttgattcctcttcagtcataaacagtttcacttaattgattagcataattatagtacagcatttttgctaccacattggggaaaaaaaaagcacagaacttaacaagcaggtgttatacaataaagttttacttaatgagcaaaataaatatatataaacatacacagaagagaaagttaaatactgtttggaattaaaagtaaatgaaattatataaaaatatttatatttggattacgctctttggggtattcacctttccatagtaatcattactgatttacaatgtagtaatatattagccttgaaaaatactgatcatactaacatttgtagcatagcatgctatgttttaaattttcatttaagaataattatcttagaaatatgcatgaagaaaattataaacaatttacagtgcaaagatgtacatatatttttcatgtatatatatcttaaactatacatatatgttgacatgtatgtgcgtatatatgtatatatgcttgtgtatagatattgctaacctcgtgtctctcatacatgtctctgtcttctgaagaataccctggatttgttttttcccctgcctgtgtaccacctcctatactgttttcaaggtaggtcttccagttaccaaccttttgaagctttatatgcctgagaatatttctactgtggctttccatttcagtaagaatttgacaagatataaaactgtaatgaaagattcttttgtccatgttttttgaatgctacttcatttcttcttatattcacagttgttattaaaatgtttgatatcagtctaaccactctttcttcataggtgatcagctctttatggaaattgatacgatattctcattgactttgatatatttactttttacgawaatatattggtttttcctaatctctcttattttacatgttatgggcccatttatctttcatttgggacatttattgctatgatttccaaaatatttctactttcctacttttacttttaaatattttctgtgatacttgctatctggatgttggcacttttacttttatctccacatctcttaactttccttttatattgatttatttatatttttcaactattgtatttatttaaaacaaactgacasgttcaagtacctgtcttcagaaaagccagcagctttttttttttttttttttaacaaccagtgatacctctagttggcttcaatgttagctgcagaaaatgacctttgtggacctttacctccaggctgggaaaaaaggatggattcaacagacagggtctactttgtgaatcataaaacaaaaacaacccagtgggaagatccaggaactcaaggcttccagaacgcagaacccctgccagaaggctgggaattttgtatactcatgagagtgttaggtactttgttgatcataacacaagaacaacagcatttcaagatccttgcaataggaagtcatttgcaactaaagatagaccacaaattgcttatgattacagctttaggtggaaacttgctcacttctagtatctgtgccagtctaatgcactaccgagtcatgtaaaggtcagtgtgtcccggcagacattgtctgaagattccttccaacagattatgacattaaaacccaaggcttgtggcagttatatataatatttagagaagaagaagaacttmattatcgtggcctagcaaaagaatggtttccttgctttcatatgaagttttgaacccaatgtattgcttatttgagtatatgggcaagaacaactattgtctgcaaagaaatccagcatcaaccattaatccagaccatctcttatgcttctgttgtattggtcattttagtgccatgatgctatttcatgaaaagtttattgatggtggtctctagttaccattccataagtgtatgttaagtacaaatctttttatatttatattgttttgcycttcccttcttttgagatagtccatctcactaacttgttctaataggtatccacactactagtaatacattctattatatcctttatgcagctattagattttttaatccctaatattttacttagttgtatctatcattttttctctgtttttatttctcatgtgctcatgcatctccttaattgtatttctaatccttatcttgaacccatggccttgcattaaaataactttacttcttatggtacttctcattctttttcttttaaaataaattcactcaccagattttgtttgcttgtttgtttgtttagtctagtgtgaccatatttctatggagggcataccctagttatatcagcaaaaaaaaaaatcaattcaagaagggatgaggcctagagtatcccacatttgtaattatttccactatttatcacctctctaatgcttcaggttagagattaactttaaccccctgcttatccccataaagcagcatggcattagtttgagggtgaaactttttataatctggagcctaaattaagactgattagtcttgagaatgtggagatgaagatgaaagggggtgatggtttgaacaggggatggggttccaagattcatagattctgcactagcttctgcaatttccctgatttcactctaaggaacaagttatcactgagctgagcctttgtagggctattaaattaagggggcctctctcacagcaatgatggagaaggaggtatgagcagaacaaactacttttttctgatttatcttccatataagcagacacctgctataaagaccctcattcatttttctgtctctctggatgtgttttagttcacagtttctactttcctctctcctcagatcttttaataattccttcttcagtttctttacatttgatgacagggaagggagctttccaccagtgctaattctcttcttggcagaaattagctctattgacagtttatcaactaattgaaaaattaaataacagtgttatcagtaagcattgcttagtaatttgtagcagttactgttggttacatacctagcattctcttggaaacaatctttattcttttctaatagtatcctaattttttctttttggtaattattctgatccacatagctatgaatttcattaacccaacagttattatttcttcccctagctgtactgctttaagaatgatgtggctctattatgtccaatcacacatgatagggagctgcttgggaaatgtgttcttggaaagcttttttgtttttcttttatcacaagagtagtgatccacattttattttgttgtcctgtctgaatttaacacgtagaactgctgcagacttcttggtatctacctgaaggtgaagcccacaaacagtcatatagagtgcaaagaactttaggaaagtggatcttagccctgaagtactatgtctagaaccatcctaattctgaaccacttattagggaaaataatacaataataatcgtaataattcatacaatataatgcaataatacaacacaataaaataattcaataataattttattgtttaagtcagtttggaatttggcatgtttgttacttgaaaataggacattctaactgaagtgtttaaatttatcaaaagagtttaaaattatttataattaatcaagctccttgatgcatgactatttattttaatgatctataaactcatatctgttgatcatgaagatgaaatgattaaaaccaaacatttctcagccaagtaaagctaattaatttcattgaaaatgaaaacccccaagacaaacaaattatcatattggtataccttacgaaaatgagtttgcaaactttaaaaaatctatgcttaatacaaagccatagaactcagccaaattaatgtactcataactatataatcctaggagagtcacccaattctaaacaaccccctgtggggaaacaactacaagaacactatctccactcttttaatatatttttcctgttgatcccaaactactaaaaatgtgctatttcacaaaaactgtgtgtatttgaggagggacatattttatttcaggtttaatttgttttactgaggtttactcaatgtttaatatgtacattgttttctgaatactaacagggaaaatttgtatgaatttattttttataagttttcaactgtagattgggcttagctgagtgggggtgatcttatttttcttcattttaatatgggcattcaggcacatggttaaggatacaaaggtgaacagaaggctgttgggaacaagccccccaaaatctggccataaactggccccaaaactggccataagcaaaatctctgcagcactgtgacatgttcatgatggccacaaagcccacgctggaaggttgtgggtttaccggaatgagggcaaggaatacctggcccgcccagggcagaaaaccacttaaaggcattcttaagccacaaacaatagcatgagcaatctgtgccttaaggacatgctcctgctgcagttaactagcccaacctattcctttaattcggcccatcccttcgtttcccataagggatacttttagttaatcaaatatctgtagaaacaatgctaatgactggcttgctgtgaataaatatgtgggtaaatctctgttcgaggctcccactctgaaggctgtgagatccctgatttcccacttcacacctctatatttctgtgtgtgtctttaattcctctagtgcctctgggttagagtctccccagctgagctggtctcagcaggaggcaactcaaaatatttcaatgaattaaaaacagtacagacaaatgtctcctaggtttttccattaatcattgacttagtgaactaaaacataaccaataaagtctgtcagcattatagacagcaatgatattttcttttatttttgccaaaaatgcccatgaatggtgtttttcaaactaaatatgctaagaatattttaaagctttttgctttgaatttttagtctatggaagattcatatatttgaaaaatacaattatattaattatgagaaaaatactaatgctcctggattccatcacaattagcagtttgctaaacactaactctcaatttctgttttcatctatttacctgaaacaaaatttctcagcctgacctggtctgtgtgctactatttgaatagcattgcaataaagcaatctttttccacttgaaaggagggagaaactcaacttgccacagggaataatgtttgtctgaaacttcacaatatagttttatgtttactacatggcaacatcatgaataaatctttatcctgatagttggtcaaaatctatttgacaccagacaataaagatagcaaaattttatgaattgcatcaaactaaatagtttttttttattatgacaggatactaaatacaatgcatagggatgaataatcacatatggtgaatataaccagaattgaggtttaattattctgaacccatgtgcctaattcatatcccaaaacctgttacttattatctctgtgatcttgtaaatgtattaacatttctgtttctcatctgtttgtctacgtcacaggatatttacaagtgaggtaacttaaaacttctctaaataccttaatgtttattaagtgtttggtagtggtagctgtcactaattattatttattagcaaatgatattttaaaaataccagatactgctccatttctttactcctttttatattaatacttctcagaagagtaatttatacttacatcctcttatgccctccctctatttctctgtctctgtttgaaacattctttcttccccccattctgttcctgttttgtttctacctgtctaatgaaatagtctttgacaaggccacaggatagctttaatttgccaaaatcaatgatcaatagtctatcttcacttaacatctcaacagcatttgatacatcttgccacttcctctttccagaaatattatcttcagttttccaaaacaccatattcttctacacttttcgttacctgtttttcatttgttctattacatcattggcaactcctcctgactccactgactattctttttcttcttttccagagctcgcatgcagctacatactttcattaagtgatcttattcaacctaatggcttaaatgactactttggagacttccaagcttacttcagaacactaaaaactcctgtaagacttagatttgtatatccaatttgtacactattgttttccttggatatctaatactgattttaaatttagtatgttctaaaaaaaaaacaggctgcttaattccaagctcttttctttctaaactcagaaggaagaatctagtttctctcttgaacataccatagcaaatgtcatcactactcatctattggcttgttcaggacaaaattctaagaataatctatgatttctcattttctcttagtccttcatctgtcttgtttatggtgatagctttagcacctaacatagaagctagtttataggagaacttcaaaaacatttagtaaatgaatatatttctctcacgttagtgagggaaatactgattacttgaataatactcttttgatcattatactcactgtgctttatttttacaacttagtaacctctaatattaaacatgtaatcagctgtatgcttcaaagccttgaataggcagtgaggatttctgtgtgaggaagaagcgaaactaatgaagtatgattgtgcactgagaaaacttgtttcccacctctaaaatgcacaataataaaagtcattaaagttttacatataaatgtcagaacagtttttaagaggacaaaagtctgttgatattcatcctcttcttttcacacacttcaaagtttaagaattcaggtactatggactgtagttttgcatgtatatttttattctggcatgacttcatttccagaaaatattttagtatctatatccttatatcttcttgccttcttgtagtccatttgcaagcgtgcctttcttctactgtcaaatatgtttgaaatgcagatatgtaaaaaattgctatctgctatcattctctctcctgtgcatatatagtcatagtttaaggtaatttcataatatcaatttaatatattattccaatgacatattttctatatgcatctgtcatcaagatattagattctttgaaaagtaattggatatgttttatgccaaatccaaacacctatgtcagatgacagaaatcctttttcttacttgtcctaccaaagcaaagcaaatttgataatcacctacttgtcaaaggcaagatacactatgctttaataattcataagtgtggataaaatgtttagtcactgtaatttgagatagaaaacttttacaattttaaatgtaatacattcttaaaacaaggcttttttttctgtttcaattcatatagaagatttcattgtcttcctttctttcccatgttgaaatcacatttcttgtgaaatttttattgcttgtgacagagtggaaagaataggtaaagatcttargatgcttgagtctcatctcccaacttatgtacattgaagttgcctcaagcagaataactaggataatggggtgaggacacttcaagtctacattcccggttagagcttttgctctagaatatgctgtagtcttaacaaataaaaattggatagatccaatgtgagattgaaaagccatatgttctccacaatcaaggacatttagactcaccatttgatcttatctttctcactcttattatttccaggacaaatgaaaacaatgacaaggtgaactgaaaaaaagactcccctcaatgcttggaacagagatagtatttttctccaaccacttgtttcattgttttggactct

SEQ ID NO: 94162 - DNA, 42929 bp, Homo sapiens
ctagaacaccttgacaccaggactgtaagggttctaccatatttttatgtgagggggccgatacagttagccataaactgataaactaagaaattattctctgtctaggtgccatccttggtaggaagctttattagaagccaaaataaagaagactatgctggcctaaaagaagaatttcgtaaagaatttaccaagctagaggaggtaattatttctcctagctatcatcagagtaaacgataactatatctaccctccttttcctcctattcttttctttatattcccactttccaagtcactttaaggtaattaggaaaattcccctaaacatttttgtttacagcagactgctgttataaagcagaaagctgtcctgcttaagatataaatcaaaacacctaaacagactttgtcatgggcttgcttttaaaatattctgctaatgttaaaataacaaggaaaaaggaaattgtacccacgtttccacaagtttttatgtatccagttttccatgcttgtttgcagtccttgtccatatatttaaaaaaaattaatatagctctaatcagagcatagatatcattctgtgtcctgctttttttcctgtgtccacttagtattacatactaaatatttcccaccagaaaaagtttgcaatgaacagtacagacacttgagggaagcccagatgtattttaccttcttttggggacagctgacatttgggccttggagtctgtctcttggccttgaaatatttcattcatgctaagcctgaagtttttactgacagaagacatagttcctgtctttcatgggaatgcattttaacattttatcagtaagcatgatgtttgctgtaggtttttcagaaacctttttttcattataaagttctcttctattactagtttgctaatttttaaaaaagtcataaatgttgaattttattgaatggtttttctgcatctgttacatctattgaaatgttcatagaattttttcctcttaatctggtgaatatggtgctattgacaaatttttttttttttaatgtttaaccatcctagcattcctaagataaaacctacttgttctctatggatttttatatgtactgtagaattagctaatgaatgatttttgtatgtgtgttcataaatgagattggcctataaattttctactcttatagtatcattattggcttttggtttcaaggatattctgacctcataaaatgagttgggtaactaacctgtttttctaatctctgaaaccatttggtagggactagcggtttctttaaaacatttgagcctggtgtctttaacaggggtagatttttcattactagtttgatttctttaatggtaattggttttttggttttatatttcttcttgaatcagtgttggtacttttatatttttctgctgaacagtgtgggagctggaaagtaagatgcagtccatattcttcagataattagtttagtagtagacagaacacagtaggtagatataagcaatctaaaatgcatattatgcattgaaaaaaaactatggaggttatttataaagggcaaattagtttggtggtttaaatagccagataatattctcaatcaccccctttggcaaaccctgtaaccaattcgccttcttaaaatttcagaaacatacaatttgtgttttgttttcaaatgattgtcatctgtttagcagttaatccagtctatttccagtatattttaagtacaaatgcttttgcacttacaatggggttacatccaataaacccaccgtaagctgaaaatatcataagtggaaaatgcatttaataaacccaacctacagagcatcatagcttagcctagcctgctttaaatgtgctcagaaaacttccattagcctgcaattaggcaaaatcatcaaacataaaaccatcaaacataaaatatttataaagtgttgaatatctcatataatttatcgaatacctgcatccaaaagatgctggcaacacagcacactttagagcattggttgtttactctcttgatggtatggctgcccagcatcaagagttatcatactgcaaatcgatagcccaggaaaagagcaaaattcaaagttcaaagtagagtttttactgaatgcttgcttttgcaccgtcgtaaagttgaaaagaatttaaattgaaccatcataagctgcagactgtgcattttatattgaaaagttaatatttttaatttttaatgcagagaagtacccaaagcataaaaacacaacacgttttcacaaagcgaacacagccatggaaccagcacccatatcaactaacaaaatactagtttgggcttttttgtactttatacaaatggactcatataatgttcatcttttgggtctgcctgctttcattcaatattaggtttgtgggttcatctctgctgtgtgtagttctttcctgttctttatacagtgttccaaagtatagtatattacactttacccattctactcttgatagtaaacgttttcacatttgggctattacaaatagtgctgcagtgaacattcacataacatatcttttggtgaacatgtgttacatttccaagtacaattgctgggtgatgagtatgcatactcttaaaacatggttgtaccaatttacacctctacgacagtggttccatacccttgccaacttcattttgttcattgtaggcattctcttgggtgtatagtgttattgcattttggttttaatttgcatttccctaatgactaatgcagttgaacacctttccaaatgataattggccatttggacatcatctttcttgaagatcaagtcttgctcatttttccaatgggtcgtttgctatttttcttactgattcccaggaatcctttctatattctgaataccagtcctttgtattacaaatatgttgtactctgtgacttgttttatttttcaattttccagtttatgttgttgattgttttacttcatcccagaccaacagattctaaagcttaattaagctttttgatcagaaaaaaacccaacttggatacatcggagtaaaaactgcttctctcacctgctctacttatttcccttcagcatttctagtgagtcttactacatgcacaagtaagaaatacttttatgctgtttaatgttcaggttctgactaataagaagacgaccttctttggtggcaattctatctctatgattgattacctcatctggccctggtttgaacggctggaagcaatgaagttaaatgagtaagatatttgaatattttgtgcataatttaggatgacaggtggaatagtatatattgacctttctttataacagaagttgaaatatttaatacaactggtctgaatgagaacaagcagacaggggaatcttggactatcccaggcatgtcatatacctacactaactactctccatcactgcaatggggcaggggatttctgagacatgtagtaaagtgctttaaaatttattccttccttcctgattaaaaacccataaggggaaggatatggtagcttacgcctgtaagcccagcacttcgggaggccgagacgggtggatcatctgaggtcaggagttagagaccagcctggccaatgtggtgaaaccccatctctactaaaaatacaaaaattagctgggcatggtggtacacacctgtaatctcagctactcgggaggctgaggcaggagaatcacttgaacccgggaggcagttgcagtgagctgagatcatgtcactgaactccagcctgggcaagagcaagacacttcatcaaaaaaaaaaaaaaattccataaggttgtaaatttttgtaaggatgttgttgcgggattgtacgaccagtgttacctcccatttaccgtaagatttccacattattttccaaattctgttttgagtttggcagccaccttgccttactccggcttcttggacgatagagctattcagggttacttttggtcataatctgggtgtagaataattaacatagaacattcctgattgtattccctgttcttattttaataaattgtcagtttctctctttgggcaagttctcacattaactgaacaaattgcttcactctagtctcattccttttgtgtaaaaaagggacctctatagtgtctttcaaattgaatattctattacaggcatttttaaatatttttaatgaaatatttaagggaaaaaagtgaaactgtagagtaataattacatatgggagactctgtgatgtcatcctagttgacctagctcacacctttcattttttcctcttcccacaggtgtgtagaccacactccaaaactgaaactgtggatggcagccatgaaggaagatcccacagtctcagccctgcttactagtgagaaagactggcaaggtttcctagagctctacttacagaacagccctgaggcctgtgactatgggctctgaagggggcaggagtcagcaataaagctatgtctgatattttccttcactaatatgaataatagcatgcttttattttaccaaggttcaggttgcatgggatcatcttctctgactgatttgacatcaacagccaaacggtgggggtctccttaacgcccccctacagaaatgaaaatgcatttcctgtctcaggatgctgaaacgactctgagggttctatcatagtccatgctgaaaacccccaaattatcatctttagcaaaatctggacttgaatcttttttttttttttgagacggagtttcactcttgttgaccaggctggagtgcaatggcctgatctcagctcaccgcaacctccgcctcctgagttcaagcgattctcctgcctcagcctcctgagtagctgggattacaggcatgcgtcaccacgcctggctaatttttttgtattatcagtagagaaggggtttctccatgttggtcaggctggtctccaactcccgacctcaggtgatcggcgcgcctcggcctcccaaagtggcatgagccaccgtacccgtccacaatctaactttataactgctcacaggaaatacccactcagttaccctgttgtgtgatttcatgagatgctctcttgttgcttgtcttctggtttcttagttgagaagctttcaattcctccttctttcatttccatcatcaacttaatttcacattctctctattgttggccctgaagaccagacgcacattacccgaaagctgggtggctgggcagactcctatttggtctccctgtctctaaccccttcaaatccttcctatcaaatcccatgttgggcacataggtggtgtcccatttatgtaattaaatactgtgtaggctgcatcagtcaattctgcctacaaggttgatgagtaataggtaagagccccactgagaaatagaaatgccatcttccacacatttccatagcccactgggtttctcactattcaatttttattatcacatcaccaccacgagaaggtaggtcggagagcaatcatttcattctatagatgatgcaactaaggtcccgaggttaagtgaggccttaaggtgctggcagaaagatcacacccagcgcactgctcttaccattggaatcagggctgtcggtccgctccaattgtctggtttcctgaacttattttcaagttcgccattgagagaaacctccgaatgactaattcttaaatttaagggtgcataataatcacctatggctcaccgctgcatttccgattcagcaggctggggtgggtagcgaagtctgtatttcaaatgagcccctcaacccaggtgacgcaggcggtgtggggaccgcatccggagggcgacctggagccgactgacttcacaaaggcctcctgccgcaaaccttcagcggccaccaaagccccggctgccggcggcggaccacctctgctgccgcgcgcctaccggagccgcttggccctagtgctttccagcggatttcccctcaggtgcggagccgggtgccggggtcccacagccaaccactaccggttcctctttcgtcagccaccggcgccggcaggacccgcgaatcccgatctccaggagcctgtaaggaggccgcccattggctcagccgcactgctgggcaggtacttccaaagctttgaggattggctgatgctctgggcgccggggctagttggcgggtaggatcacgtgcgaggggcaggccccgtctaggccccgcctccttgctgctgctgccgccgccwatcctggtccggttgcccgagttcccggaggtctctcgcgggacctctctcaccgccaccggtgggtccgttcggcctgcgttgtattggaagggaagaggggtttgaggtcaattctgtttcctggggttttcacgaatttcggggcccacagtaggcttgccaactttaacttttgcctaacactttacgagaaatcctatttagccttggccactgttgcatcaaagaatttcacatccaacaaagtgcagcctaagaataaagaacaggtctttaaaccgcatacctttaattaaggtgttcttattttttctgatttggctggaaacaggcagagaccaccccagataaccagttctcagccttgcgtgggacaccacgagtcccacgtgtttacgtgtttaaggcactggcaagcaggggaatttggtttctgggaatgtgctgtctttgtgaaaaytgtgaaaagtcttccctgctacaytgaaataatcataaaataataatagctaatgttgaacacttactatgtatcagacacatgctaagcattcaatatttctcatccagtttctgaatgaaaccttcgcaaaccacataatgtactggtactattagctacgaattacatataagaacacccgaaagttgttgtcatttgcccaaggtcacccagctaataaatattgaagagattcgaatctagcctgaactcttacagtaagaccgttcgtgagatgaatttatatgtgctatttttccagtctctttatccaacagctctgacagaggatagtatctaccttttttttttttttttgagacggagtctcgctgttctgcccaggccggactgcagtggcgcgatctcggctcactgcaagctccgcctcccgggttcacgccattctcctgcctcagcctcccaagtagctgggactacaggcgcccgccaccgcgcccggctaattttttgtatttttagtagagacggggtttcaccgtgttagccaggatggtctcgatctcttgacctcgtgatccgcccgcctcagcctcccaaatcgctgggattacaggcgtgagccaccgcgcccggcctgtatctgcctttttgaccacaccattattcgtgggatttaacaggagttaatgagttaataatgttccttttccaaactcagtggttttgattttacaaattatttgacttttcctgatttcaggatcttgacaatttgcctttacttattcaaatgttattataccaaatatttatttaaaaagttttttttttctttgattcctcaagttgtagagagaaatagggatagggaagcagaatcaagtagttaaaaagatagcctcatttgaccctgatttcccaattgggaatatgaaatttttcctgaatataagcacatttgagaatagaaccttttacctaacgtatctcactttttgaactcattggacaataagggaacacccagtaatataatctttcatataaattaggcttctaacttattaagaggaatgtactccagtccagtttctgctactatcaagagatggcgtgacaaaaaattttgaaaagttgccgaatgcaaaccacagttcctcttctcaaaacaaatgcatgtaaatagagtgtaagctatttctttggtggcattattttcctagaaggcttaagtcgttaatcacccatgaccgaagatccaaacattttcaaagcagatccgatcrtatttcaggtggctgaaaatggatttggagtaggtttaatatggtctacttacaatttgtttcatgattgagtgggtcagtataataaaggtataaacatgaaataacatagaaggaaagtttgcaaagaggatttcaaagaagtacctgttgggtattcaaaagaaagtagggataagcttaaggttaaaatctttctagggaaagtatagtgttcagaggtaagattaaaaaccacattactgaaatggagtctgcagcattcagcccattcaattggcattaaactggtaactggtgaaataagtrttgtgagttgaactttaattctaatatgcttggcaaagccgaatcacagtgtgcttcatctttgtggatacaaaattggaatgcactctgctatttaaaatgtgttcttactcactagcgtttgtcattaactttgacgtatactgagctcttactatactgacratgccctggactatttgattcgatactcacaattcataaagtaggtattattggtgttctcattttgcaggtgaggaaagtgaaatccaaaaaggttagatagcttgcctaagtgccaaagctgggtctcaaaaagtcagcccattgggctccagggcctgttctgagaaccttgacactagattgtttccctttagaggagaacagcttccatccctgtcttctaactctaccaaattaacttggcatttcagaacttgatttcccacatacagatacacttttcatgaacatttcccaactctcagagttagtttcttttaaaaggtgggaatgaaaaaacaaaacttggaaaatcatcctcttctggcaaagtagaaaggtggatccaggaaccttttaatttacaaatggaattcccagtttggccattatccagagaccatggatgggcaaattaaggccattgggctaaatccaaccaattgttggtttttttatagctcaatatctaagaatgattttttacatttttaaagggttgaaaaagaaaaaccagtcacaacgtgatatgtgaaaattatatgaaattcaccaagagtgagccctaatatattaactatggatgttgggtgataatatgtcaatgtgggttcattgattgtaataaatgtacctctctgattggaatattgatagtggaagagactgtgcatgtgygggggcacagggtatatgggaaatgtgtattttctgctcaattttgctgtgaatctaaaacttttttttaaaaaaaggctattaaaatacatatatgcagttcaaattcagtgtgtccataaatacagccacacccatttgtttatttatcatcgatggctgtttttacactacaagtgtagaactaaatagtggagaccagatggcctgaaaagcctgaaatatttaatatatgtaaaaacatttgccaatcattcagttcatggcatctgataaagactaagatactggttgagattgttgccgctggagtcaaacttccagggttcctagtcctccctctttcacttactagttgagaagtgcttaactatgctagtctcagtttactcatcttttaaagtgaatcaaaatagaacagttatgggacttttttttttttttttttttttttttttgagacggagtctcgctctgtcgcccaggctggagtgcagtggcgcagtctcggctcacagcaagctccgcctcccgggttcacgccgttctcctgcctcagcctcctgagtagctgggactacaggcgcctgccaccgcgcccggctaatttttgtgtttttagtagagacggggtttcaccacgttagccaggatggcctcaatctcctgacctcgtgatccgcccgcctcggcctcccaaagtgctgggattacaggcatgagccaccgcacccggcccagttattggactattttaagaattaactgggtcaatacacatgaagcaccaaatatatattagtaataatttattttgattttgagattttgcaaccctcttatggccttttttaggctatggatatatttttctcaactatcttgaaatctgctttttttatatgagggatgcatgtgtatgcccagaagtcatcttacctaccaggagctctaagatgacatggttgtgtttcttgcttctattttaccatccaatttgtccttcttgatcagaattagctccaaagtagtagaagttactctgttactttctctgtcttcttaaatgaaaagttgtcagcgtagcaagccgggaaccaatatgtcttctccaacaccagatttcttgctgacatatatgcattttattttcagagaacatttattcaaacatttttgccattccctgattcttataaaatgttaatactttccatattattatctaagcttatttcacatgaaatcattgaatgacagcaaaaaatgtagttgagtcactattctgaagatttgcaaagattcttattcactagcaaaaaatgttaacactattattaaccaagaagttctggatagactggaattccaaaggccaaayagtacccagttataagctacataattaggctctgtcattttaataaaagatatttagattcaagtattatttgttgagcagccattacgtgctatatcttttcctggacttaaaatcctttcctccyaacactattaccagttttaaaggtcaagacaacgagtcaagctttggacttttaaagttcttcarccctactagctggtcactttgggcaaataatttcatttttctgaagctgttttctgttttgaaaagtagaaataatatgagttgcctgactgagcaattgtaggaatcaaggtaatctatggaaataatttagtcagtatkagtgagacacagaaaatatttttctttccttcatgatctgttaatcctacaaaatgcatttacaagcaattcccacatcagctcaattctggaaaatttaaggaattatttttttacctgctgaaattcaggatctcagcttatcagcatcagagccaaagccacgtctattatctcacgtaaacagaaaagctgtgcwagtcgcccctatatggctgggctgttggcaatgtatccttggcaactagtaagagtgttctcaaaaatttatgctggggaacgggggaagctcacaaattgttctttgcctccaggtatcttaattttattcattgccagtttttcagagcttgggtaaaatctcacaagtagggccaggactgggatgaggcaactgaggtgtctagggtgcaaaatgtgagttgtctagacaccaaagttgtctaggtgtctaggaggcactcactctctggggtatgtgagatttcaacaccaatgactttttctttcctagttgctgtatcatgagaatgtttggccttattattttttaaagctgtacttacttaccaaagagtggccagtttagtgatgcaagagattcagaatgggraaaaaaaagtcagctttaccctagtcagttttgattaaactcctttgaaatccatgttggagtttaaatgcccattcttgagggattcttgatgtagaggaggcccctccaaagctttaagcacatgtccagagcaagggggagcttttctggtgttattttgtcttgttttgttttttgccagctcctactctcgggcttccaaatctggggcgatgtctccccaggttaarttaccctagctcctgctccagatcgcttccccgtgccccgccagagcccagtagttcaaaaattaaatttggggcaaggggtgcgcgccagagcgcagctgtttctggagcctgcggcagcggtggcgagccacagggcggcgaccgtgagctccgggagctgcgcaaaccacctggagaccatgtctggggatgcgaccaggaccctggggaaaggtgagtgctctccatggggtccgcgagctgggggcgccgcgtgacagaaaatgttggcttcggcggagctgcctggccttggcctgcagaccggcggggcaggaagggacttggagggctctcctgaagaaaagccacatgcagcactgccctctctgggacttgggagttggagctcccacagccatcttgggatctgggcaagtgagcgagctccttcctcaccgggctgactagcctctcctttccctgtccccctcyatcgctgctctgcaggaagccagcccccagggccagtcccggaggggctgatccgcatctacagcatgaggttctgcccctattctcacaggacccgcctcrtcctcaaggccaaagacatcaggtgagaagcgggaacccagagcccccgagcaaacccagcgcctcacaggagcccgggaatgtttaacatctggggcgccctgctcagcttttacaaggggctccctgtcccttttttcggaggcaaagtcaacaaatagcaaagggcgagcttttttttagcgggccctactgaaatgcggagcccttttccgagtcacgcctatgcatgaaacttctagsccagcgcagagtaatgtgaatgatggggctggtgaactggttccctcccagaatgtttaagggcacagccaacactactgaggccttacctgactgctccacagaggtagttcccccaccacaccccaggcatcttaggtcactgtttcctttctttattgaacttactgcatccagcattttcttatttgttcatccatctcccctccccagtccccttcacccatgtgcgttctcgagggtaggaactctgtctcttttattcatgagctaggagagagcctgtcacatagtggatgctcaaaaaacatctgttaaatgaatgaacaaatctttccaaacaatgaaatagaaggaattgctatcaagaggtgtctggaagttttcaagacaccttgaaaacttgagaaatgggtacagatgcttccaaaaggaagtttgcaaaaccagctcctgcaggtctggatttggagggcagagcagctttgctgggatgtggactgcataatgcagctggcctccaagctagagtgttgagaatatgtcactccaggctcccgactcttgtctcggagagtccatcacaagggggtgacttcagagtttcagactcatgtcagagagatacaaagactaatacagagatgttttaaataaaattatgtaaatctgccttgttgagtatatagggcctgtatttccacattcttcccttttgctcaaattaagctgaccttaaggttacctgttttttgaggaaaataacaacaactggatgttttgcccatttggtgataaattatcagcttaggagctgatgtatttccttaggtcagcgtttctcaaacttggcactgttgacagtttaggccagataattctttgttggagaggtgggatagaagctgtcctgtccatcactggatgtttagcagtatccttggtctctacccattcaatgacagtagagtcccccttccctatgcactaccttcagttgtgacaacaaaaccatgtctccagacatagtgatatgtcccttgggaaggaggccaaaaatcacttctagtcgagacccattgctttaggttgagacccactgctttaggtcttgctatgtggcctatgctggtctcgaaatcttgggctcaagcaatcctcccaccctggcctctcaaagtgctgagattacaggtgtgagccacctcatccagcctctgctgtaggtttaagacaatctcctagactaagcaatgaacgttcccatttgtttcctttcatgtttttaaacatacgttcatgcttctggtaactatatagttatctaaataataattgtattatgtgaacattaaataataatagtattatttgaacatctaataattagaagaagaattaaaaaagttattgcatgcttatgtgccaggcactgtcctaaacactttatacatatccccaccacagtaccaagagatgggtgtaattattagccccattttataattaaggacactgagcacagagaggttasgaattcggttaaggtcccaagctagacygtttattctgatgccaaaactcatactcttaattgttaacatttaccatattctgttgtgacctgttaataccagatttgtattttcaagctgtagaatgtactaaactctctaatgccatggttaagtgtgtgagctctgagtctgtctgcctggctgtgatcttggctctactacttttttttttttttagatggagtttcttgcccaggctggagtacagtggtgtaatctcagctcactgcaacctccacctcccgggttcaagcaattctcctgcctcagtctcccaagtagctggggttacaggcgcccgccaccatgcctggctacttttttgtattttttagtagagatggggttttgccatgttggccaggcaggtcttgaattcctgacctcagatgatctgcccgccccagcctcccaaagtgctgggattacaggtgtgaggcaccgcgcccggccagctctactacttcttagtgggtggtattgggtgtgagattcaacccccttgagtcttctttcctatgaggtgagcctacttcagggggaattatgaggaacaactgagataaggcatggaaaacatccgacacatcttactgcmggaaggaagatgatgatgttatgtattttatacaaaacttaaaccttaaaacactaattgcaaattttaacttttaaactgattgcttctgctttcaagaagagtgcctgcctgcagatgcctctcatttttgttctgtcttgttttccttttgctttttaagacatgaagtggtcaacattaacctgagaaacaagcctgaatggtactatacaaagcacccttttggccacattcctgtcctggagaccagccaatgtcaactgatctatgaatctgttattgcttgtgagtacctggatgatgcttatccaggaaggaagctgtttccatatgacccttatgaacgagctcgccaaaagatgttattggagctattttgtaaggtatattcaatttaaaaagycactcacactgtattttactttgcatgtctttcccaaacctcaacccattttaaagccaaatcattggtgaaactgttttgttttgataccatgtgatcctcaggagattagctagcatggaattagggtagagcatggccactgatattaaaggcttaactgctaggcgcttctccatttcaactggcaggctcaggaggtatggttatgacatggcaatgaccgtgtaacttgaagcaggaatactgaaagaactgaaaactggtgatccttaaagggagtatttctccagcttcaggtaaaaagtaatggagtgcgaagattatgcatagaaggtgatgcttttttattattttttttttgagacggagtctcgctctgtcacccaggctggagtgcagtggcaccatctcggctcactgcaacctctgccacctgggtttaagcaattytcctgcctcagcctcctgagtagctgggattacaggcgmatgccaccacaccccctaattgttgtatttttagtagagatggggtttcaccatattggccaggctggtcttgaactcctgacctcaagtgatctgcctgcctcggcctcccaaagtgctaggattacagacgtgagccactgtgcctggccagtgatgctctttagaagcataagagtgcctgctgtccaggaaatgtgaagaatagataaatggtggcagctttgataatgaaagaaaaaagaatggagaaattttaagatggtgtctttgaaaaggaatttttaaaaacctcaatgatattaacagctgacatatatygaacacttatgatgtgccaggcactgtcctagttactttgtaggagctaactcatttaatccaactgccctttgaagtgggtactgctatcgtatccatttttcagatgagaacactgaggcttagagaggttgagtgtcccacctaagaatgtatagcatggaagcagctgatcaagtaaggagcactggagaaaccctcctaaagcaccctgctttcccagggtactataagaagtagattcctactgagaaccggaaccacagagaaaacctagtgcctctcacagggagctggggggtctgatgtgggtgttgccctgttaggctggagttataaagcttcgctgccttttcaggcagaacaggaactggaagtttccacagacttctccactgagaacctgtgtcctctgattaggtcccacatttgaccaaggagtgcctggtagcgttgagatgtgggagagaatgcactratctgaaggcagccctgcgtcaggaattcagcaacctggaagaggtacaaaaaggggtccctctcctggtcagctacagtggaggaagctaggcagggtcgctaacctggtcactctracaccagctttcacaggcttattctttctgcctttgataagtcagacttctgatcatctgattgcatgtttgccctcctctaacctggtctagaattattctggaaaatctgatgaggagttggggaggacatgccatgaattgcttcctttcccagagtcaccccatctccctgagtagctctgyatggcttctgtagcttctgccaatgaggtcaaggtctgtaaaggttaggggttgtgtttggctgctgaagtctaactactgtaaattcatgttgtaagggtttactctctcacataacattctttctcacgtattataagggtttattctcacacatacggtggctcacacctgtgatcccagcacttggggaggctgaagcaggaggatcacttgagcctagaagtttaagaccrgcctaggcaacatagcaagacccctcctctacaaaaataattttaaaaattagcyaggcataacgatgtatacctgtagtcccagctacttaggaggctgaggcaggaggattgcttragtctgggaggtcaaagctgcagtgagccatgattgcaccactgcactctagcctgggtgacagagtaagtaggactgacaaaaaaaaaaaaaaaaaaaaaaaaagccagaggtaggcagttcaggcctatcttgatggcttcttcatgacattatcaggaactgaagctttttctctttatgggctctgtcatccttagcacaacttagtacaagggtatcatcctcaaaataacaagatagctgctgtcactgcagccatcacatccaagttccaggctctgaaaaggagaatataaagaaaaaaatggcaaatggtcatacccctttaaagggctttaaatcctaccagaaattctactcaatggctatttacatttcgttggccagaacttagttgtggggtcataactatcttagagaaagctgggaaatacagtcttttagctgggataccctgaataaaatcagaggtctgtaattaaggaagaagggggaaatgggtgcggtggcaggaatactctttgccagtagatgcttcattaacctggcagtaatggagctacttatccygtacttctagaataatcaggaaggcagttcttttacttcctttatttttgctccagaaactgacaaattcaccttatgggtgggtggttcctctattggcagccagagaatacaatttttttccccttaagggaagactggttattaatactcttccatttgacctttatcaagtggaaacagattaaatgtattgatatttccagttgcctatctcaaatttgtacgattaagtatttatggatgacgaatggtcatgtgtaggaaatgtcaaccttttgtcctgaggtcaccaactgtggccttgactccaaggaggccatatgatgtggtggaaagaatcttggatcttaggcttggctttactgaattccagaaccttgggcaatgttctgtacctctctgggccttggttttcccatgtgtaaaatgagggattattttgaaatgtgtgttcctcagagcctctgggttctgcaggggactgcccagtgagtggaggcctggtagattgttctagacactgctttacttaggtcagcactgccttcaaccaccatgttcaacctgacatctaagaagatggcatttggggagagaggagagctgctgctttaaaaaagaagttcgaaaatcttgtgaatagagaatttatagtctattttaaagatcagctgaatggaccccatcatgcctggttaccttctcacagataaacaaatactggaccagggaaaggagctgggaaaaaaaaaactctttgaattcaacgatacagtaattgaaacattttcatcagtttcccttctacctccatttggatgatggatgaactttttaaattacagattgctagatgaaagtatagggttatgatggagatacagttcttcttcagtcgggggtcttttccagggcaaatgaaccagtattttgtgccatgaatcgtgctgcagatacttgcatacatcatctcattcaatctttccaacaaccttctcaggtacaaatggtactagtcctgttttgcaaattggagtggcctctctgtaaaggctcagaactaggtactaggaataaaaagaaattaaagaccctcgaggggctcaaagcctggacagggagataggctgttaagcccatttaaaacctgggtgtgttgagtgctaggctggagacatgcatacaagaaggctggtctgtgggggtagataatgcctctgttgactcttaggatgaattagaggcacaagggtgagagcctggtgtgttcggcaaacaataatcagtgaggggttgacagcgagggagtgattggtaagaggtgaatgtggagggtggaccagagtcagatgctaaaaggccttttccactgtgcccagggatttgcactttatttcagagttgatggtgagtaattgaagcctgtcaagcaggagagtggtgtactccttcatgcttttaaaagtattcagtccatcacttgaacccaggagggggaggttgctgtgagccaagactgcgccactgcactccagcctgggcaacagagtgagactctgtttcaaaaaaaaaaaaaaaaaagaaaagaaaagaaaaagtattcagcccagctgagcacagtggctcatgtctgtaatcccagcactttgagaagccaagacggtaggatcgcttgagcccagaagtttgagaacaccctggtcaacatggcaaacctccatctctttaaaaaatacaaaatgttagcttggcatggtggcttatgcctgtagtcctaggtacttgggaggctgagatgagaggatcactggagcctaggaggttgaagctgcagtgagctataattgcaccactgcactccagcctggacaacacagtgaaaccctatctcaaaaaaaaaaaaaaagaagaagaagaagttcagcccagcaagaatgtagaggatggattagagtgtccaagaggagggactgggaagggacaaagaggaccccactaacgagggttggagagggaggtttaattagagagattttgaggaactaagatgagatgaaatctgaggaaggagtaggagttatkgaggatggtttccaagtttgtggccggtaaatgtgatgcttttcactaagagtttgagggaagacacattttgtcaaatttgtggtgttgatgggatattcatatgcgggcagagcttagaagaacaatgtatggtctctactggacctttggaatggttttatgggctaggagctttcaccagagagtttaggaatgtcattagtggggtggtgataaatgtttaagaatcaattttctcttaaaagagaaagaaaaagaaaaagcacggatttatagcatttgctgatttgggtggtgtaaacacttccgtcaaggttaattttgagctaccaatgtgctatttctaaactcaagagctggcaaaagatgtgggcagctccagcatgtcactgaataagaaatttcactttatcttcaataactgagccccaggaacactgttgttaaccagcctctatataggtagctttcactaaccagcctcggtgtaggtagctttcactgatgctatttaaggaccactgagtactccacattgtcctaacaggtttgaatgtggttttgtcccatagaatgttagcaagaattgtagctatggctgggcgtggtggctcacacttgtaatccaggcactttgggaggccaaggagggaggatcacctgaggccaggagttcaagaccagcctgggcaacacagtgagactatgtttctactaaaaattaaracatgaactggtcatggcagtgcgggtctgtagtcccaccttctctggaggctgaggcgggagcatcttttgaacccaggagtttgagcttgcaatgagctatgatcgtgccactgtactccagcctgggtgacacagcaagactctgtctcaaaaacaaataaacaaagaattataactacaatgtaggaaatattgaaatctgaaaacatgaccaatgtacttgaattatgcgatctgttcctttaaatgccaaaatatttattccaggagattctagtgaaattgaaatttatcagaataattctaatggagaggatcccctgatttatgtaactctttcacatggttttgcacaatcaggattttttgtgagctaaaaatatattaaatactcattgtctttctgagtgataagcaagccaagatttcatgcataatcttctgctatgttatcctgaaacagaaggctcagttaaccttttgtggccttaaactctgacactttcttcttttgaaataactgccttgtctaactttttaagtttttttttttttttggcttgtttttttgtttgcttgttagttttttaaatctagtttcaggtgggttcagtggctcatgcctgcaatcccagcactttgggaggccgaggcgggcagatcattttaatccaggagtccgagacaagactgtacaacatggcaaaaccttatctctacaaaaaatacaaaaattagttggatgtggtgatgcatacccgtggwccctgctacttgggaggctgaggtgggaggatcacttgagtccaggaggtcaaggctgcagtgagctatgatcatgccactgtactccagcctgggtgacagagtgagactttgtctccaagaaaaaaaaaattaagttccatcaaaatcaaagatttattgtgcttgttatataaccacatttttctctaatatcttttacaattctttgagatatattactgccacttttattatcaaactagcagcctgctcactggctttcctgttctgaacattggcatgagttttaaaactatgacacttgtcttgtcttgctgcactttatgtcttcaagcagattttctagcccttactgaatcattactctaagcagcacacattttttagttttattctttttcaggtattgactttcccatttcagaatgggacttgagccaggcttcatttgatctttgtggatttgaatgtggcaggacctcttggtgtcactttttatctgtgccttccaaaaatattttcattatggaagtagtcaaatcaagtccaagtgcagtgaaaggtggatttggtcagatttccttgaggctttggagttttgctttaaatctagaaagtgttcgtggcttctgaattggttctgcactctgactattgcttggtcctttcttcgtcatcatcagagctccataaaagagagcggggaggggataacataaataatgctgaaatagccctgagggatgagacatggcccagcaactgaagccttcgtctgcccgtggccacagggcactttatggttttgcttcttgtcattcaaccacctgccttggggtgcttcactttgcatttccacgcagagtttcccgcattgccaaacttgatcatgtgccttatgtgtagcagtttgcatgaggtggaatttgcataaattatgtgtgcatcacccaggagcatctgtagttaaatactttattgattctaaattttgcccataatcttaattttttaattattttattttcttttcctcttttagagattggggtctctctctattgcccaggttggagtgcagtggcacagtcatggctcactgtcgtcttgagctcctgggctcaagcagtacttccacctcagcctcccgagtagctgggattacaggctgaagccaccgagcctgcctccgttatcttaattattattataattatttttttgagtcagggtcgcactctgtcacccacattggagtgcagtgacacaatcacggctcactgcagcctcagcctcctgggctcaagtgattctctcacctcaacctcctgagtagctgggaccacaggttcaggccaccatgcccaactgttttgtttttgtttttatttgttttaattttttgtggagacgaggtctcactatgttgctcaggctggtcttgaactyctrggctcaagtgattctcccacttcagcctcccaaagtgctatgattacaggcatgagccactgcacctggtaatcttaatttttaaactgttctttcttctcatcaaaaaagacatttattcaagttagattatattgtcttggtttagttttgcttttgctctttcttaatttttattaatttccagtgatgaaattatttatatattgtttaattgtttctcctttgatatcaccaggataggaagaaaagaaagtttatacctggttaattcgtcactgaaaacaattttctgtatccttttatatatagtagactacaagctaaattttttatcatctaagttaacatgtctataaactaaattcattattactagctatttttaataagttattgagatataattcatatgccacaaaattcacccttttccagtgtacaattcactggcttttagtatattaagtgagttgtgcaactatcaccagtatttaatttcagagcgttttttttatcatcccccagaaaaactgctcacttgtaagctgtcattttccatttcttctcaatccctgtggctgtacgcagccactgatctgctttctgtctctatggattgacttattctagacacttcatataagtggaatcatacaacatgtagcatttcatgagctattttcacataccataatgttcttaaggttcatccttcattcttttttatggctaaataatattccatgtgtgaatacgcacattttgtttatccacatctgggaaggttccactcttggaactaatatggataatgttgctgtgaacaccatgcaggtttttgcatgaatatacgttgttatttctcttggatttgctagctgatttagcatgtttactaacatgccattttagttgtaaccaccattctttcacacttgggaactgrttatccctgactcaggatgcctcgttaagtgtattagtgctgttgctagttgggttacttccttcatcatccaattctgacagctgctaatatttgctgtacttctttcaatagctttctgatataccctttcccatcacataaataatagaataataattattcttattatttaaaaattaattttactcttctccaattataaagtaatacttgttcattagagagaatttggaaaatacaggaaaacatagaaactaaggaaaaaaaattataatcccactacccagaaacaaccactgttattatcttggggacttttttgtttttgttttctgtccttttctgctatgtatattttatgyagttgaaacttggttactattatgatgtaaatattccccacaccccctgccattttattttgagacagggttttactctgttgcccaggctggaatgcagggtgcaatcacgcctcactgcaaccttgaactcctgagctcaagggagcctcccaactcagtctcctgagtagctgggactacaggcatgtgccaccatgcctagctagttttctttttaacttttgtagagacagggtctccctctgttgcccaggctggtgtcgaactcctgggctcaagtgacccacttgtctttgccttccaaaatgttggcattacaggtgtgagccaccacacctggccaatttttataaactctgtaaatgcttatttacatatataagagtgttccttagagcagcagcattatttgtgatgatgacaaattaggaaacaatattcattagatggtgagtggttaagtaaatcatgtctgtcttgtggaattctgtggaacggctgaaaatgaatgaggtaaatctatgtgtactgacattaaaagattgcctagaaatattaaatgaatcacacagtaatacaggtggtatgatcccattttagcagaagaaaacaaaactgaaccatgcaggtgtgcacatacatgtaaataagtggctagaaaagtatctagagagaaacacatccacctcctagtaatgtctcacactgggaagggggctgattagaattagggtgggtaagaaaagtggttaagggcagggaccgggagggaagattttgtcttttacattattttctgtgtttgattttttttttaatgatgggaatgtatttctgtattaaatatgtaagttttaaaagtagaaaaaaacacttttttttttttttttttgggacggagtctcgctctgtcgcccaggctggagtgtagtggtgctatctcggctcactgcgagctccacctcccaggttcatgccattctcctgcctcagcctcccaagtagctgggactacaggcacccgccaccacgcccggctaatttctttttgtatttttagtagagayggggtttcactgtgttagccaggatggtctccatctcctgaccttgtgatccatctgcctcggcctcccaaagtgctgggattacaggcgtgagccacctcacccggccgaaaacacttttaatgtctgcatactttgccatgtttataaaccataaagttatttatccagcacactaattaggagtgtttagatggttttcagtcctttactgttttgaatggtgctgcagggaacatcagcttctttgcataaaaagcattttctctattttagaatatgttcttaagctggactctcaggaatggaattaccagatcaaagggtataatgagcacattggaggcttggactgtatttcactaaattgcttcccaaaagacttgtgttgtttgcccctcaccagcagtatgtgaaaatgctctttgccctatatccttttcactggtgggagasttcattcaaaaagatatttgtttgttgaataatatttgctgtggagatacactgtagttcctcattgttgacttaatgcatatttctttgatggccagggaagtggaaggttttcccggaagtatgtcatcccttgctcctggtcttgcaaaatttgtctgttcagttcaggggctttgcctatctggccatcagagtcttactaattttctttgttgatttgtaaaagttccttttaaagcgttccttgtatagaaaagatatttgactggttttaaaacacatttttgttttcttttgacttttaatttggcttatatatttttgcatatggaagtacagcatttgaaagtattgtgctataaggctttccttatatgtgctatgatttcctccactgttttatgtgtaggaagtcctctccccacttcagagacttgataaatattcatttatattttcatctaccaccaatcactttacagacatttgactggtcaagcattaccctcctagcttttccccccacactatcttacaaatatattgtgatttgttttagtttttgttttttgtttttgagacagggtctcactctgtcactcaggctggagtgcagtggcatgatcatggctcactgcagcctcgacctctcaggctcaggtgatcttcctaccttagcctcctgagtgtctaggactacaggcaccactatgcctggctaattttgtgtattttttgtagagatgggattttgccatgttgcccagactggtctcgaacttctgggctgaagcgatccttccaccttggtctcccaaagtactaggataaaaggtgtgagccaccacacccagccctacaaatatattttgaagatacgaattaagctcattaaaaggatgccagcatagaattttcagagtggtcctttaatccccaaattttgacagttgtattctgcaccttcatggagaatctaggtcataactgatgggcagcaggaggggcatgttctgctgcaggtcctccctctaaggctccttcccagaggagaaaatggtcttaaatatgccctaggtttgttccacaccctargtttgttttacagggaactgggtcatcacatggttagctcagcctcagctatatcattttagcagggatctgagatttgaaatcttaagaacctccatttatcttttatgagctcaaaacatttctgccctccaaaagacttgaatagacatttctcaaaagaagacacacaaatggcaaacagacatatgaaaaggtgctcagcatcattgatcatcagagaaaggcaaatcaaaactacaatgagatatcatctcaccccagttaaaatggcttacatccaaaagacaggcaataacgaatactggtgaggatgtggagaaaagggaaccctcgttcactggggcgggaatgttaattagtataaccattgtggagaacagtttggaggttcctcaaaacactaaaaattgagctaccatatgatccagcaatcccactgctgggtacacacccaaaagaaaggaaatcagtatatcaaagagatacctggacccttatgtttgttgcagcactgtttacaatagctaagatttgaaagcaacctaagtgtgcacgaataaggaatggataaagaaaatgtgatacaggccgggtgtggtggctcactcctgtaatcccagtactttgggaggccaaggctagcggatcacttaaggtcaggagttcgagaccagcctggccaacatggtgaaaccctgtctctactgaaaatacaaaaattagctggcatggtagtgcatgcctggaatcccagctactcaggaggctgaggcaggagaattgcttgaatctgggaggcagaggttgcagtgagctgagatcacaccactgcactccaacttgggtgacagagtcacactctgtctcaaaaaaaaaaaagaaaaaagaaaatatagtacatatacacaatggagtactayttggccatgaaaagaatgagatcctgtcatttgcagcaacatggatggaactggagatcatgttaagtgaaacaagccaggcacagaaagacaaacatcacatgttctcacttatttgtggaatctaaaaatcaaaacaattgaactcatgaacacagagagtagaaggatagtttgcagaggctaggaagggtagtgtgagctggcagggaggtggggatggttaatgggtacaaaaaacagaaagaatgaataagacctactatctgatagcaccacatggtgactatagtaaataataacttaattgcacatttaaaaataacttaaacagtgtaattgggttgtttgtaattgaaaggataaatgcttgggggagtggataccccattctccatgatgtgcttattgcatactgcatgcctggaccaaaatatgtaccccataaatatatacacctactatgtgcccacgaaaaataaaattaataaaagatttctgccctggagttgagtacttttccactgcttctggaaaagggccagtattgctgatgtactggcatgttgctttgtgtctttttaggggccacagagggtggaggatggcttctgcttttttggggggcagagagtaggggatgacctctgcattttcagaacgattttcatgaggaaaaactttcttcctcctccagcaagtacagcagcccccactgggagccaccacactgtttcgagattgggggcttgggatttcttggcaatggtgtagaggatggtgaaggtgagctggcctcttcaaggtttgaagctcaattattgaggctgaaccaaagagttgaagactggagctctctcgaatgcctggtttggagatgtctgggattcgcttctcctaatgatcttgcttctctcgcgaaaactgcagatttcttcatcctccggttgaacgttcttggggagccgcggccgacgcgcctcgcactgatggccaccagggggagccccgcgcgcttcctccttccccttgtgttccagggcgcacttcaaaacgctgacgttctccttcgtccctctgggggcgcccgaggggccctcgcagaagatgaggtgcctttccagccaggcttctcgcgtgcagggcttgggaacagtgcatccccatcctaccaagcagtcccttcctcttcatttgcatcgcgtccgtagtcttatttttcagtgaactggagaacagaaaattttaaaatagatttttctaatattccagaaggtcaaacacctttctgcaaagtatctagcatactaaaggggaagtaattttacatgtctggaaggtaccatgtttgcattagaaaggagctcttctattgtactaaagtctccaacaaacctcttgaactcttaagcctgaattgaaaatgtgtcaatgttttcagaaaatctgaggcctagaagctagagcctcagttccctcccctgccatttgtagaagccttataggggatatctggggtttttgaagaaaaacactttctaagtaggctattttgctttgcttgttcatacaaaagacaggggttctgaaagtgagggatgccattgtgagggaagctattcaacattaagaatggccaatatcttttttttttttttttgtcttttgagagggggtcttgctgtgtttgttgcccaggctggagggcagtgatgtgatcatagctcactacagcctcgaactcctgggcaccactacacccagctaactttttttattttttgtagacacggtctcactatgtgctctaggctggtctcgaactcctggcctcaagagatccttccactttgaccttccaaagcactgggattacaggcgtaaggcacagtgtctgaccaccaatatcttttttttttttttgagacaggatctcactctgtcacctaggctggagtgcagtggcgtgatcactgctcacttcagcctctacctcccaggctcaggtggtcctcccacctcagcctcccaagtagctgggactgcaggcacagaccacaatgcccagttagtttttttgtagagacagggttttgctatgttgcccacgctagtctcgaactcctgggctcaagcagtctgtccacctcagcctcccaaagtgctgggattacaggcatgagccaccatgcctggctgtatctttatatgtgatatataatcaggtggaagaactcaacatagaattctttaaaaggatggattggatattaacataactactgctaagtggatctagatctaacacccatttttcattccatttctgatgataaaacacttaagaaagacaagacattggatgttaagtctgtcagtttattttgcctctgcctctatcctaaaattttttcagaggggtaaatgcaagggacttgttttaaattgagtacaagaaagaactattttagtaaagttgcctgaagatctgctcatcagtggaataaaacaggaaggacagaattctgataagctctttcataatgactatgttggaatgtctcatccctctgtcagttgctttggcttgagcttctgattcagagagcatgaaaaggtgagactaaggaggaaattcttttcacagagaagctcagagccgaaccaatccttggctgtagagaaggaggagctttcagagtttgctggttccaagcttttttctgttacttaaatttaaagctggaacagaaggtcaagaaacaggaaggaaaaccgtatcaagatatcaagtcatggtattctttttcattcttacagaaaagaattcacaagagacttgaggaagcttttttatttttattttgttctgtttatttatttattttaagatggggtctcaccctgttgcccaggttggtctcaaacttctgggctcaagtgatctgcccacttcggcctcccaaattgctgtgattacaggcatgagccactgcgcctggccaattttttttttttttttttttttgcgacaaggtctttctctagagtgcagtggcatgttcacagcttagtgcagccttgacctcccagcctcaagtgatccttccacctcagcctccttagtagctaggactacaggcatcactaggactacaggtgccaccaccacgtccagctaattttcgtattgtttgtagagacggggtttcaccgtgtttctcaggctggtctcaaactccttggctcaagcaatttaaggaagcttttcattagagtctaaaaatacatatttgaattgaatgacacagggttgacactagtcrgagaattaggaaaatgtgatatgcgtgttagttccagtgcaaaccggagagcccgttaacctccctgggactgggtttcctcctctgcacagcaaggctcccctgtccttccccatgggagacaagaatcacatcaccagcatgttttcctctcccctttggctgccaggaaactcaagagtcaaattcaaggctttattgaaggaactctgcaggacccaggacgtgatatcttgatactgttttccttcctggtttttgaccttctgttccaacttgcgttttccctgattatagcattttattatttttcatatttagtatgtagtgcacatttttacactacacttctaatcctttgtgtaatgatcatggtagaaataaatggtgaaatgaggaggtcccacttagatgagtttcaggggtccttccagtcccaattttccaggattcttaaggggaaaaagtaattttacatgtctggaaggttccaggtttgcacagaagggaactctcctatcgagagtcctgaggacttcagcagacctccagggaggcctgtccaggatgttctcctacgtctgtaaaggagtgagcactttgtgctagtttagggaaagacagcttttctgttgggattttagacttaccctgcttgaaattggtggaaaaatacctgtctgggatggggctcaataatctgcagctgtattaggaaatgcaagtagttttgatgtgggtggtttcaagacatatttggaaaatgtgagggaaatgtgtatgtgcatttgctgagcgggggactggtgaaggatcaccgatccatttattcctaatgctcatctcagctttttattgtgccgagtaccttgataaggcttgggttattttatgagcgtttatatataaattgatagtgtccatcagatcatgtatatttagaggcatgctcctactttgagtaaatggaaagctttagagatatacactaaataaacatcagttactaattaaaaattccctcctcactttaccaaaggacccaccatgggttccattaaatgtctatttatggtttgttttgacaaagacttttccaagaacacctctgttctgtaaagcagaagagctgtgtagatgttccagagtcgcttggtgtaaatttggttctgatttgtgccgtgaagcccaataacaaactggaggcacacatttcaaagccagtggtaagagtttgagtagtgatcatctattcctgaacataaagtctggagccttctggaatccataaaaatggaatgatttgttcctttcccctctaaccaaattttattcatacctggctataaatagcttctgttttgagttttcactggtcagacyctgctgttttagtgccatcctgttagcttcyttgaacaaggtaatgccacctaacatgttttttcagacttccaggacaatgatcagggggacttctctatgccacactgggaggtgtgaaggtgtaggctttagggcaacccctctgagaaggggtggcaggtggaggagcccattgatcctttctatcagggatggatttgctttctgtgggtgtcaccttcaggggcctgtgttcccactcatcacaggagctcatatttactcagtggggccagagtgttcttcatacatggtgattttactcctcaccataacctccgtggtgcgtgctaacatgaccaccattttgcagatgagaacatggaggcttgcaggggaggtaagttgccccaggttccatgctgaatcagaggtcaagctcagcacacagcacaggaccaagtctgctggttcccaagctcacatccttacctacaactctgaatcaccccacagcagagtcaacaagctggcctggcatgtgaagaagcaagcctgggtgtctcctggctgccagtgccatccctgccccgggaccctaatccacagtttgattctggtccttttgccctctgtccctcaccagaaccctgatatttccagatgaaaacacgagtatagcttatttccacaactcacctgggcccagcaatcaagatctatagctatagggaagtattgagttgattatgagttatataggtcaaaatgagtagcttgcttgattgaagcaggtaattcgtgccatacttttctctttgggaagacctgtaccaacaataacctctgctaaacactttcgcttttttaaatttgcaggtacttttttggggctgtctttggctgcctgtctgttgagagtttgttttctttacagtccatctgatttacagtccmtccgggttgatttgtctcatttgggaatgagaaattttattttaatgcattaagtaatagtgttgagtggccaacaaatgtgaagtttgaaaagctcaaatgaaaaaaaaagtgtgatagaaacacagagttgggggccgggtgcagtggctcacacctgtatttccggcactgtgggaggccaagacaggaggatcccttgagctcaggagtttgagacccctgggcaacatggcaagaccccaagaccccatctctacaaaaaaaatgtaaaaatcagccaggggtaatcccagctacttgggaggctgaggtggaaggattgcttgagcccgggaggttgaggctgcagtgagctgtgatcgatctactggactccagcctgagtgacagagcaagaccctatctaaaaaaaaaaaaaaaaaaaaaaaaraagaagaagaacacaggttggaatttgagggggcctgttaaataggatgctctttcctgccttagttttgaattaattgagaagataaaataataaggcatggagattagagcatcccctttctttttttctttttcttttcttttttctttttttcttttttactttttgctcttcttggccaggctggagtgcaatggcacaatcttggctcaccacaacctccgcctcgcgggttcaagcaattctcttgcctcagcttccccagtagctggggttacagccacgtgccatgatgcccagctaattttgtattttcagtagagacggggtttctccatgttggtcaggctggtctcgaactccccacctcaggtaatccacccgcctcggcctcccaaagtgctgggaatacaggcatgagccaccaggcccggcagcatcccctttcttattgataaagcagatcttggagaatgggagatcctgagcggggttcctaatgctagccttcaacatcaggctgaggctcaccttgtcttcaagtaatgggcagtgctggcctgaaggggagcctcctctgtccagggctcagcttatccttggaaggcttagcacattgargagctgctccaggctaagagggagggactggggtactctgtagaggttgttcttccagtttcttcaatcagatgagccacactgtcactctmgtgttgaaaggagggaagggacagaggtggccaggagtgtgaccctaaaagaggcagaggagacctcagagaaagagaagaagcattctcctaaccagagggagaaggagagaggcctcagttctccctctctgggaattaatttgagatttacatttagtgtctataaacatgtcagcagatatataaacttatttgcttttgctttgtttccatttttagattcttgagtatcagaacaccaccttctttggtggaacctgtatatccatgattgattacctcctctggccctggtttgagcggctggatgtgtatgggatactggagtaagacatttgacattgtggtgttaaattcccggagtcacactgagtaacaatggttaagatggtctgcatgccccctgtagacatgtttcaggatgtctgtgaagtgaatcaggtttctaaaccgcagtgtgtgcttccttgttaaaaacatatgtgcttttccactgctaacttcagacccacactttgcccgcatttctgcagatcagacccctagyccaggagcctcccgcagacttcagagcctgctgtcctcaccagcgcccccacatggccggtctgagagcaagtggagagtcacagtcacagtcacagtgcccaacgcctccacctggtcctgacgggtccccaggggacaccatataaccttagtcatgtctcattgcccggaggaatcttcccccagataggaataaccttataaaaaagatttgtgtagtaatatatgcttgatattggaacatacaaacaaaatggcagtgacacactatggaagtatggaagtgcagggacattaaaggagaagaaatagctgtgtaggctcctgggcagagcagtgctgtgttacttcaaagctcagtgaagctggacgtgtgcggacgtccaccctaatccaagccaccctcatggtgggtgctggacatttctggcacttggaaatccggccctgctgaagcagaactgtgtctgcaccttcataacccgtgggctggagcccaaccagccactgtctcctgcacttccgacttcagctctctttgtcaggatatttaaaactcaatatcaaacataaaatttacaaaaggctgtatcctctgaagacagagcatggagtcacaggttaggaaacctcacttctagtcctggattcccgacaacccattcatattatcttcagcttattgctttataaaccccagaactaaatatcctggttgagctttgaaagagccctgtcggctccatgacttcaaggtttcatccttgttttattcatttaaaaaatgttttagaarttatttgtctttatttttttatatctcctaaagtaaaatctgagaatgacccaagaatatttgtttcagagggttgtctttttgttggcaagcagtgaagcacatgtaagtttctcaagctttagaatatatatatattaaaaaacaaaacaaaaaaaatgaagcacagacatgttattttcccagagccatcagtccaaagtatttcactgtattattagaagcaacaacttctaaacattcaactattccaaaaataagattttcctccagtaagttatcattctcacttgataataagataactaagataactycccaaataaacycattcttcatatcttgcaaatctaaaaagcaacgtgcatcscctttcctgatgcctacccctgcactgtgctgaygcttctttcctgtcttgcagctgtgtgagccacackccagccctgcggctctggatatcagccatgaagtgggaycccacagtctgtgctcttctcatggataagagcattttccagggcttcttgaatctctattttcagaacaaccctaatgcctttgactttgggctgtgctgagtctcactgtccaccccttcgctgtccagaattccccagcttgttgggagtctacgtcacggcttgtcttgggaaccaatccgtctytctttcttttctttgaagttcccaataaaatgaaaacaggaaatgtattcttctgataatcatttgtctgactcctctagcctgtagctgctgctactgctgcttttttttcctttttttttttgaggcaagatcttgcttcgttactcaggctggagtgcagtgggacagtcggctcactgcagccttgaactcctgggctcagttgattctcccgcctcagcctcctgagaagctaggactacaggtatgtgtcaccacgcccagctaatttttaaaaaaatgttgttgagacagggtctcactatgttgctcaggctggtctccatctcctggccgcaagccatccacccaacttggtctccaaagtgttgagattacaggcatgagccacctggcctgcctagcctgtagcttctaactattttctagaaagtgcctggtgctaatgtcagagcacattttgggagcctgtgtgcctcctaactccttggccttcagcctagtttgatctccagattattggtgcagatgctgatgctgaggttcagggtcaacctatgactgatgcttgtcactacagaatggcaccctccaaagacctccctggtgaaagcttaagaagagggagaaggaagaagaaaacactccaaacctaaataccttccatttggcaaatgaatgtcgctgtccacgtgggcgagtatgagtgtaattctccaaactttggccatgggcctggagacaccgagggtcttgtgactggaaagaattccaaagcaggaaatgaaacaccggtttatcacccaggactaactacgtcagaatttcactggtgctgtcagggctcaggatgtctcacaaaatgttctatagccggcatcctgccttaaaaaaatacacacgccccaaacccagccacaagcaaaggtcattccgttggatttgcgtcacactctcttccaattcatctcaacaaatgcctctggttgcctgttgtgtaccaagcccaggggcacactggggataaagttgaaaaagacattggctctgtccctgggagcccccatctctccacttatcttggttgaggttttaaacctagcgctttggagctgcttgtctgttgtagggatgcttgtctctgatgtggcccctctgccagcttcgccaggcagtaccaccccactgaagacagcaaagagctgaggatggctggtgccaacaggtcccttgggctgggagcatctactgcctgcactatgggagggggaccaagtttgtccaatgctgtttcatctcagtgtctgaggatcagcctgtgatcatttcagctttgctcatgctggatcctttcccatcctcctagctgtgctgagacaccaggcagcaacaggagcgatgttttgccttgtctgtgctccctaaggagctgtctgccacctctgcctctgagacagcccaaatcagccctcctctctccccacgtctcagtctggccctgccatctgctggctctgggtatattttgacccatgtaaatagttaccaggtgttactctgtgccagctggacagaaacaagcctgcttggtgaggtggccagaacttccagaagaggcagcgcatgacaggggcagtctgccgcaccatctgctccggatgtggagccctgttgccatggcaccctagttaatgctgagtgaggtctgtgaatcaccgttttcctgggatctttgctccaagaagaggggaatcttctcctgtggcctctcataggacttaggagattgatcagccttttgccggtacaaatcctgcatgctagtgagtgcttgtcataagaccaaagttaccactgatgcaacaggaaatggcatgcctctggctcaccaaaatgaaggtgttctcttttggggctccgcacactaatttagaaagcttgaagaaccaggaattatagaatggagaaaagcactcatgggggaggtttgcagcctggtggcctatagcccagtttgggatttgagtgcctcttggccaggcatgctccctgctgtttaccagggtcctggtcacctgcacatccttacacttcctccatctcgcttctttgtcacttgtctgacccacagagaaaactgagttatcaatctttgaataaaactagaaggatgtggcctggagaaaagagggaaggaggtaattaaataatgctccatgaagaactttaaaaatatgcttcttaattaatacatgtggaaagaatacatatgggttaaaaatacaataatgtaaaagaatagaaaatcttccattatcttgtgtcctagagataaccacttttagtaattggtgtctacctttttttccccttttcttttaaataatagagatggggtttcgctatgttgaccaggctggtcttgaactcctggcttcaagtgatcctcccatctcggcatcccaaagtgctgggattataggtctgagtcatcatgcctggtgggtgtctatcttataaaaagcactaaacttaaagatttaaaggtgagagcctgtattaggccattctcatggtgctataaagaactgcccaagactgagtaatttataaaggaaagaggtttaattgactcacaattccacatggctggggaagcctcaggaaactttcaatcatggtggaaggggaagcaaacatgtccttctgcacaaggtggcagaagagagaagtacagagccaaagagggaaaaactccttataaaaccattagatctcatgagaactcactcactgtcatgagaaaagcatagggaaaacactcccacaatcgaatcacctcccttgaggtccctcccccaacatgtggggattataattcagattaaaattgaagatgagattttaggtggagcacagccaaaccatatcagagccattctctatcttttgcagattggaaaaataaaaaaattagtttaaaccacagcatttaaaagaaatggtcatagatgatgttaacatcagaatggaggttgtgtggagttcccctccttggaggttctgagctacagcctagcctggactcagtccagttacaatctaacatggctagggggaggagggagcatgatggggcagggcttgtgtggctgggacagctggctatggtcgtggtgctggtgactaaatggtacttgaaatttcttttagatctaaaattctgtgatatggtttggatctgagaccccaccaaatttcgtgttgaaatgtaatccccaatgctggtgggaggtgattggatcatgggggtagatttctcatgaatggtttagcaccattctcttggtgctgttctcatgatagtgagtgagttctcatgagttctggttgtttaaaagtgtgcagcatctccctgacccctcttgcgccagctcccaccatgggagatgcctcgctccccctttgctttttgccatgagaggaagcttcctgagggctctccagaagcagaatctactacacttctcatacagcctgcagaaccatgagccaattaaacctctttttaaaaacacttttattttaagttcaggggtacatgtgcaggatgtgcaggttcgttccataggtaaacatgcgtcatggggtttgttatgcagattatttcatcacctagatattaagtctagtatccattagttatttttcctgatcctctccctcctcccaccctgcaccctctgataggcctcagtgtgtattgttaccctccacatgtccatgtgttctcatgatttagctcccacttataagtgagaacatgcagtttttgtaaacctgttttctttagggaaagtttagaattttctagagactggttgtatggttgtgaccaaaatgccagtagtgatatggacagtgaaggccaggctgaggaggtgatggaaatgaggaacttactgggaactggagcaaaggtcacttttgttatgctttagcaaagaacttggctgcattgtgctcctggcctagggacctgtggaagtttgaacttgagagtgatgattttagggtatctggcagaaaaaatttctaagcagcaaagcattcaagatgcgccctggctgctttcaacaacctatgctcatatttgtgagcaaagaaattatgttaagttggaacttatatttacaggggaagcagagcgtaaaagtttggagaatttgcagccagctatgtggtagaaaagaagagcccattttcagggaaggaattcaagcaggctgcagaaatttgcataagtaaaaaggagccaagtgctaatggccaagaaaatggggaaaaggccttgaaggcatttcagagacctttgtggcagcccctcccatcacagactcagaggcctaggaggacagaatgactctgagtattaaagtagatttaatctaaatcataaagtacaagctagagcaatccctccagtgctgcagaaactgcctgcatgtggctcccacattgtttcttggagctttggtggtggtaggggtggcaggggcaggtgttatgtttcttggtttctcaccttcaggtctccttacccatgtttcctttgtcagagtcattggccttgatggaggggagactgggttactctgagttgagaagcaagcttgactgccctgtggtttatatcagcctagcttagtttgttttctgaagtcttcacaaataaccaaatatccagcccagtgcagttctcaatgagtagtctccagttcccatcccccaccacacacacacaccaaacactgtgcccacctgggagacccattttcatttatcttcttctttgagtgcctggaaggctgaacatttgatcttttcaaacatttttctctcatctggcctgttagcgctcttgagcctttgaaaatgccatttcctctacatactattcttcctcagagcagccctctgtttttttttccaaccagtcttttctcttgcaaagttcagatcaaaattcttctttatgtaaagagaagtggcgtgccataggggttacaaacagggcttcaaggttagcactgggatcaaattccgactttgcaacttaactttcttgagtaagttgctacacctctattagcctcagtttcttatctgtaaaatgggacggctaagtacctatttcattgggctgttgaataatgatggtctcatctatgcaagggcttagtaccagctgggtgaaactcagtgaatggcaggcaaccctattatgactaggcttctgccaatgatcagacttgaaccctgtgctcatccccccatcactttgtggaactagatgtcctacgttgcacatggcttgattcatggtttggagttgttttctggttgtttcctgtgtgcaggtttaatctcaacctgtgatcccttgaaagctgcaattttatccctccccgtcctcctccctctcaccccaaggccaagtttaatactgtgcattctgaaatcttgcaatgttgatgatgtaaaataaatcttctctcctgtgtttctgaagaatactcagaatctcgctactctgttaaagaaaaaaatcattcactgacacttgtttaaagcatgtgaaggaagacttcctcataaccatcacggtaggtatcggggccgctgcaatgagacttctgcagttggggagggagattgggctcaactctgagtacaagacgaacaagtgggtatttatagcccagaagtagagcagaggtcagtggattgaaaatcactcggaggaaacgtcagggataaggaggattctagctaaactgacctaacaggattcttgctgaagacaggccaggatgatcagacatcaccagagggctggcggaggacaaggaacttgatcagatatcaaggatgatctgatactgaggtgggggagttcttttgccaaactaacttagcagggttctttgctaaaacaattttacaaggacacgcacagatgaacctaggaggaggttcaggagcctgactaaagtttggtcaagcagagaatctttgtctcctcttggagcaggttatctctttccaagggttaaaatgtgagggatttgaaatgcctgcaggcctgcccagttaccaatcagcttggatgctgaatggaaaactaaagcacaccagtaccatgctgcgcatagacaggatggttacacatgtgctccagggacaagaactgtgcaatactctgccctgccatttcctcccaaggattcctgccatgcccaggaatccccttgcagacagcaagggtctctggcctactttgtcattagcagacagccccctccagagggagcagttgagcagcaacagtcagctccctgctatagaagccaatacgaagagccatttccagtcctgtcctgg

SEQ ID NO: 94163 - DNA, 8197 bp, Homo sapiens
cattctggcccagggacttgtcattttactgtagacttggctcttccctctggtgccaccagcgaagccaggcttttccccgtctgtgagtggggtctgcccagtctcctggtgtgggcaggcgcggggatggaggactcctgcccggagcccagccagtggggcacccaagctctcctggggccctgctgctcccctgctcttgagctcagtgttgccacctatgcacgggtcccccttgtggtgctcacgccactctgagccgctctagaggagacccctgcgtgcccagggcacagtacgcgacgcagccccatggcacaaggcccagtgtgcgtggccagccgctggcggctgtgctgctcggagggcagagttccatttgcattccactcactgccgggagctggccctcctctcctgctgcctttatttgctgcgtggaggctctttgtgggctttttgggtctgagtcactgaacactggctggacattcactgcctgggagatctctttgccagcactgcggtgcccggtgggaagaggttgctggaatctctttccagctcgggtccttcaacctcatggatgcagagtgtgtgtgtgtggcggggatagggtgtccccacatgaggtatcttcctaaaagtgttactttccttgaagactttttgggaaaaaagttgggggggatttttggctagaaagtctgttcttctgctctgagctggctgctacccagcttgggcatgaggctagaccctcacactgtctgtccctggacctcagacaactcctaaaagacccgcaagtgctatttgctggctacaaagtcccccaccccttrgagcacaagatcatcatccgagtgcagaccacgccggactacagcccccaggaagcctttaccaacgccatcaccgacctcatcagtgagctgtccctgctggaggagcgctttcgggtgagggcggggcctggaggggcagacggggtgggctggacactggcccgtgtgcccaggcctgggacagccctggcctgtttcttcggaggtcctgggggagaggcggcagtgatggaagagcagggacttccaccacaggctccaggacatgtggactgaggggctgtggagtctgggcctgtggctcccgtctgccccatgggacttctgtagtgctgcagggtccctcgggtgctgtgggccagatcsgggcggggacctactgtcctttgggggtgctcttctacgtcccttgttggtgattggcaaggcctggtccttccaggtctctgggaggcagctcaccccarggtggcccacacctgttcctggcagggcgcmtgggaatctagaacagtttagaggggaaagagccacagcttgggggatttcaacgtctgagtcgtctgctcaccaggaagcctctggggcctctgactcctgccggggctgccatagagaatggctggattgggccagctgggagggccctttggctgctccactgtcctggggagtgtggcccatggctgccctccaggaagggcctggcgggggggatgctgggcatgtgtttccagcgtccttgccccagctgttccagctcagtctccaccaccttcttctctcccaggtggccataaaagacaagcaggaaggaattgagtaggggccrgagggggctctgctcggcctgtgagccccgttcctacctgtgcctgaccctccgctccaggtaccacaccgaggagagcggccrgtcccagccatggcccgccttgtggccacccctcaccctgacaccgacgtgtcctgtacatagattaggttttatattcctaataaagtatagcggragagacctgkatgtggacttgagcagcggtgacttcgcaagcaaatggattgtcaggcttgatgcagrcagatgacctgtttcaggggcgtccggctggcagggatgaattcattctggaccaaagatccggggtccaggggctgctgcgggggctgtgctsagccggagagaagtgtgcaaacccatgagctcccaagagtctctgctctagaagcctcaactcctgggcctgcctgtcagtcaaagcaggaacacttcttcctgcataactcgaaacacctttccacaggcttcttgtccacagtagagtttaataaaaatattcactgaaagaccccccccacccccatcggcccaaagctgaataagttagttagctgtgtccctggtcctttgcgatggtgtgaggctacatcctcccccagatggctacgatgttggagtccgtcagggcggtgaggtaggtgaaggaggcattggccaccactgtgttcaccatggtcttggtcaccacctggccaagggcccagggctggggccacttcaggatctggtggggagagaggggagggctgggctgggctcctgctgaccaaaggcagggcccctgatgccttgccagcccaagcctgggcagggtgagccgggcagtacctgtgtgggggcctgcagggctgccggcagcaggggtggctgcttcaggatgttgctgacgtcgtagagccacacgttgccctcctcatccccacagagcacaatccccttatctgccgggacagaggtggagtctgagtgggggcagagctcccggaggcccgcgggatggggcgggcaggggggcaggctcaccagggcaggcgctgagcgagaagtaggccaactcggtggacgaccattgcagccgcgccaggaccaccactgccactgtggactggctgccccggcccccccacgtctgcctccagctccacaggcagatggtgcccaggccgctccccttggaggctgtgggggagaagggagagctgtgcagggtggcccctcccagacaccttctcccactagagatcctcagaagcctagcccagggacaagcggtccatctgtgtgcccggaggccaggctgtcccacaagctgagctcactcacccacgatgtcctcattcacaaatgccagcccatccactctccgtccagatgcctcggagccctcagagaagacgaattccacttcacacaccctgtggggcagcacgagatgctagttggccattccttgcagatagagagctgcccactcacccaggcatctgcagcgcacctgctggggaccctgccctgtgtgaaggctgcacagaagatgccaccaaagagatacattcttggccccaggaaggttcagtttgccctggaagggggagccagcacctgagtgtcccgagtcacagtagtgacccagaggcacgaggggtggctcttccaggacggggctaggccagggggttggaaaaggctctgaagcgagccagtgcctctgggaccgagtgtgagatgaacaggggcctcctggcagccaagtagagcaggtgtttccaggccatggcccagggggctgttgggggcatctgctctgactcaaaagacgggggaatggggggccatggcccagggggctgttgggggcatctgctctgactcaaaagacgggggaatgggggaatgagggaatggctgctgcatggttcagagctgagagtgtgtgggagtgtctgcttggagaagtgtcccggcagctacctgactctcggaggctagcctggagccaggagagtggcccagcagctaaccatgggccaggcctgagccagttgggcagagggtaagagaagaagcatcttagacacagggaccagacatacgggcagggagggaggcggcggcccaggggctgctggtgagaaagagaagcccataactaccgccgccaccacctctgccgccaaggcccctgctgctcctttcaacacagcagctgctgtgtcgaagctcctcctgggctgtttgttgtaggtaagctaaaaatccaaatcttggcccagggcagtggctcacacctgtaatcccagcactttgggaggctgaggtgggtggatcacctgaagtcaggagctcgagaccagcctggccaacacggtgaaaccccgtctctattaaaaagacaaaagtcagctgggtgcaatggctcacatctgtaatcctggcactttgggaggctgaggcgggtggatcacctgaggtcaggagttcgagaccagcctggccaacatggtgaaaccccatctctattaaaatacaaaaataagccaggcgtgttggcgtgcacctgtaattccagctacttgggaggctgaggcagaagaattgcttgaacccggtgggggggtggaaattgcagtgagccgagatcgtgtcattgcactccagcctgggcaacaagagtgaaactccatctcaaagaaaagaaaattagccgggcatggtggcgtgcgcctgtaatcccagctactcgggaggctgaggcaggaggatcacttggaccctggcggcagaggttgcagtgagccgagatcgagccactgtactccagcctgggtgacaagagggagactctatctcaaataaaaagtaaataaatagaaatgcaaagcttaccgtggctgacaaagcccggcgtgccccgcccaggcacccttgccaccttgttctgggctgggtccacccagctgtggccacatggtggagcaggccagctggctcccctgccactgacctttgcacgtaccatttcctccatgcaagcacctccccaccctccgcccgctgactccctcaccaggctcccagggaggaaagcgtgagccccagaatatccatctgccgctggtcacctcagcagagtcccctgagacccccacgctagtgtccctctgcccgttactctttttccgtctcctttgtagctggcatcacactgtgggattttgattggccacctttgctgagcatctgtcttccccagtaggctgggggccccaagaggacagggaccccttgccaagccctgtctcagaggccttccaggtgggacagatgagccagaaagcctcaacgtggcacttccaaagcctgcctgcccagacaccacctcacctgccctccgctagccatcggcccctctttacagatgaggacattacgccagcacagaggaccatcacactgctgatgagtggcaggagtgggctggatcacgtgggcacagcatggtgctgaagccccaggtgaaggggaggtcatcatggcccagtcccacagctgaacccagggtgagagcagggtcagagtcctttcctccagagcctggcagaaaggtgggacaagccagctctgcgaagaggcctctaaaaacaacccttatggttacccgggtgtgcccaggctgctgtgagcccatctgggccaacagccaccctctgcagtggcctggcttccaaggcgccccctgcccagcctcacctcctcttttggggctggtccagccgcacgtcccagcagcagcagccgccctcgcagccggccagcaggcgggcgtccgggcaggaggcgacagggcagaggcgcagggggatagaggtggtgtccagtgtgagcagctggctgccagtgggcaagggggaacagagcatcagacccagaccgaggtgtccctgccccagcagctggccactccccagcctcacccgaagcatcacctggcctggaattcgtagtcctggttgggcaccccgatgtcccagaggatgatccgcttgtcataggaggccgctgaagagggggtggggtaggggagaagtggccctgagatgaccctgctccctcctgctggctgcatcccaggctgagcccacggtcccaaggccagcccctccgaggcggggagggcgggccgaggctaggagacaggaacactcctgggcccccaatccctgtttcctccatctaacctgatgcggtggctccagcggccacttcctgtggctcatccatcccccttgacaggggcgccacacccgggggcaggggcatccccccaggtcactgacaggggacagagtggcccaggctgttggaaaactccgaggccacagagcaggctgtggataaagccagggttgaagcgacatggcttcctgccaaagctagagtcggagcggtgcagactggggcccggcaggcacccgagctcacagccatcccagggaggggagcgtggaggctactggggcagcaggacaggggtgcttgggggtcccaggggtgaaggggaggggcttactgaagagatgggtctcgtgggcggggctgaagcacagggtggcgatggccttcttgtgggctcggatgaccccgcagcagaagccggcacgcacgtgcagcagccggaccaggccccgtaggcctgcagccgccagcacactccagcgcttcttgtggccagcctgtgtgaccaccatcagagcggtccaggccacagaaaagaactcctgggcgggggttagagtaaacagtcactggggcagagctattggtgtgaacacgcgggtagcccgggcctgggggagggagccccagcatgaaagaaaaaggccatggggcagggggccgagcctgcatccatccccatgctgctgttcaggagtcagtcgggcacccttgcccagcagggacagggccttgcactcacctcgccgggtgccttgtacttgtggagcacgatgcccgtctggcaatcaattacgcacacagcctccccgccgcacgtggccacggtctgggatgtggcccctgagtgcccggttttgagaggtcggatgagcagagacatttcccatctaggtcctccctgcagcctcctcctcccagccttgatggcgccttttaagctctgtctcctgatcccccacccatccaggcggccctatttccagcggcccttgccccgcctgcccgccaccatgtaccctcctcccaggccggctcgaaggcacaggcccacagctgggtctcgaggtcctgggggctgttgttcttgctgtggcactgcaggaagtgcaggggctccagcttcacagcaggctgtggggggagagaagggtcacagctgcccagccccgactcatctgccacctgctccttgccacctcagctcacctggctgccatcggagcctgccacagggctgccctccacctgggccgacggggaggcacacgcccgcttgctgggagagaggctgagtgggacgtcgtctggccgtttcaaggccgccagtctggcctgtggagggggccttgtgaccatgggcctgtctgcctggggcttccttcctccccatcacaggctggaccccacctcactgcggatgcaggaggcccaggctggcccggggtcacctagggagtgagccaggacctggggtgcttcctgggcacatgcccaggacgccttggtctcctgaagcttctccagggaggagggactgggctggcctcagagccctgggagctgcactcaccctgggcttgtgggcagctccagcttctgggggcttctctgggctgttagccttttgcacctgggtcctactggcggccaccagctcctcagagatcatccgcacctgggtggggccaggccatcaggaagctgggcagagtcccaggtgcccccagccctgccgatgcatagtcagggggagcttatgcttccagagttggggaagggcctctccagccaacagggctgcccaccctgactcaccccactcccacagcccctcagcccttcatggccagggacctccaggcagctagagatacgagagccagtgactccctgcacattgggacagggacatacccgccactgggtgaactcgctgagggactcgggcccgtagcggacatccctgacagccgacttcacaaagtccgcctgggccttctcagcctcctcttcaggacccagtgtggccatgaacttctcccagtgagctgtgacctggtgcaagagggaccagatccaggcccggcccaccccagctcctccggacccagccctccatctcagggaatctcaatcccgccacgtgctggaagcctcctggaatcacagcctcataaaacacacacacacacacacacacacacacacaccccagcaacacacacatacacacacaccccacacaccccagcaacaacccaggtgc

SEQ ID NO: 94164 - DNA, 18782 bp, Homo sapiens
ccctatgactttctttgagtttcccccatcacagtaactttttaaattcttaccaaaaaaaaaaaaaaaaaaaggcttaggccaggtgcagtggctcatacctgtaatcccagcactttgggaggctgaggcagatggattgcttgaggccaggagtttgagaccagagtgggcagcagggagaaaaccaatctctataaaaagcacaaaaattagcctggtgtgttggtgcacccttgtagtcccagctactcgggaggctgaggtgtgaggattgcttgagcctgggaggtggaggctgcagtgagatgagatcatgccactgcactacagcctgggtgacagagtaagaccctgtctccaaaaaaaaaaaaaaaaaaaaaaagataaagaaaaagcttaattgagatgtaattcatgtatcatagaattcacccatataaactacataaatcaatggtttttagtatatatccacaaagttttgcgaccatcatcacaattttaattgtttatatttcaatagttttgggggtacaggtggtgtttggttacatggataagttctttggtggtgatttttgacattctggtgcttccatcacctgagcagtgtacactgtatccagtatgtagccttttatccctcaccccctcccaatcttaccctccagtccccaaagtccattgtatctttttttttttttttttttgagatggaatcttgctctgtggcccaggctggagtgcagtggcacaatctcggctcactgcaacctccatctctcgagttaaggtgattctcctgcctcagcctcctgagtagctgggattacaggtgcccaccaacatgtatggctaatttttgtatttttagtagagatggggtttcaccatgttggccaggccagtctcaaactcttgaccacaagtgatctgcctgccttggcctcccaaagtgttgggattactacaggcgtgagccacaatggctggccccattgtaccattcttatgtctttccatcctcatagcttagctcccacttataagtgagaacatagggtatttgattgtccattcctgagttaattcacttaaaataatggccttcaggactgggcgcagtggctcacgcctgtaatcccagcactttgggaggccgaggcgggcgaatcacgaggtcaggagttcgagaccagcctggcgaacatggtgaaaccccgtctctactaaaaatgcaaaaaattagctgggcttggtgttgggcgcctgtaatcccagctactcgggaggctgaggcaggagaatcgcttgaagccaggaggcggaggttgcagtaagctgagatcacaccactgcactccagcccaggtgacagtgcgagattcagtctaaaaaaaaaaaaaagaataatggccatccaagttgctgagaatgccattatttcattctgttttctgttttatggctgagtagtattccatggtgtatatataccatattttctgtatccactcattgggtgatgatgggcatttaggttggttccgtatttttgcaattgcaaattgtgcttctataaacatgcatgtgtatgtgtcttttgcatatgatttcttttcctctgggtagatacccagtagtgggattgctggatcgaatggtagatctactttcagttctttaaggaatctccacactggtttccatagtggttgtactagtttacattcccaccaacagtgtaaaagtgttccctttttaccacatccatgccaacatctatttttttttttttaaattatggccattcttgcaggagtaaggtattatctcattgtggttttaatttgcatttccctgataatgagtgatgctgagcagttttcatatgtttgttggctgtttgcaatatcttcttttgaaagaattgtccattcatgtcctttgcctactttttcattggatcattttttttcttgctgatttgttagagctccttgtaaattctggatattagtcctttgtcagatgtatagcttgcaaatattaaaataatggcaaaaacctcgatttattttgcaccaaccttaatataaggtgagcgatgaggatccagtttcatttttctacatgtggcttgccatttccccagcaccatttatcgggtagggtgtcctttccccattttatgtttttgtatgctttgttgaagatcagttgattattgtggcatgagagcagaggaaaaacatggttaacagagagtattccctacctaccacaacatgtagttccttctaaaataccatgttttccttatttattatgtttcatttttggttctgtcttcctcaactacagtaagccctttgtctatctgttatctgatgcatcccaaggacaaagatctttgtctatctgatctctgataaatcccaagcacccagattggtgcctggcacatagtaggtgctcaataaatattggttgaatgtataacatcttcagtctgtctggcgccctgctagggactgaggacaagatccctgctctgctggggctaatcttctagttgggaagagtcaaacacacaatcaggcaaataattgcaaatcctgatagatcatgaagttcaaagaggatgaagcaaagagagcatgggaggggaggaaagaggagagaagctgccgtgaaggggtgacgagttagggtaaacctaggagatgagaagaaggaaaggggaaaagcacgaccggcacagagaactgcctgtccaactgtcctcagggtaaaaagcttggcgtattccaggaacaaacagaaaaaggcaaggaagcctcaggagatggtgcaagggcttatgggtttttggggagtctggggcttatgcaaaatgtagtggggaggaggactcttgagttttcagctggggtggggcacgtgggatatgtgtaaagcagggagcaaactatagctcaggggcctactttggccactgcctgtttttggaaacacacccattagttttcttaggagctacaagggcagagtttagtgagttggaccagagaccaatggaccacagcattggaaaacctttttggaaaaggtctgccttcccggttttcaggtgattatttagggtacaggtgatccctcccgctccctcaccccaagtccaatctataccagttgctgttgacatcatctcatcacttcccccattcctaatgccaccaatcctgcttggagccaccatcatcccacctgaacaaaggtaatcacctcctcattggcctccctgtttctgttcataagtctgaaggagtcattctctgctcaaagccaccaatggctccccattgctcaaaaaacagacatacttttcaccatggcctaggaggcccaccagcagcccctcacctctcccacctcagagccctctacttgctctgcctcactccaatccagcctcgctggcctcctaatgttccctaaaagcaccaagcacaatcttcttgacacctgctgttccctttgctcaaaatgcttttcccatagaccttccaacagcccaaatgacctttcctcagacagattctccctgcccagccaaggtaaaatggcagccccatccctccctctcaaacctccccctcccactaattgttcctgtctttatcacttgctgattgttcttcagtctttatcacttgctgacatgatggtatagacttacttgctatctggctcccgcaccaggatgtaagatccatgaaagtcgaggctttgtcccttttattctctgctgtatcccatagcatcctgacagctagagtgtagacgctaataaagaagaacaaatgtattgaataaatgcaggtatccagaggggatcataataattaataatatccacccattatggttgttacaaggattaaatgacatcaagcatgtaaagaaactagaacagggtctggcacacagcaaataatacataataaccattagtattatcatcattattgttatgtcttttgggtggatttttaagatcaagacgaatttagccactagctttgccttgtcccagctggggaaccccgagcaagtcactttacctcctgctccttcagcttccttgtctgttaattgggttggaatcctccacacccagcaggctaaaattgaagatcagcaaaatgcttatcggcaaaatgggatgacgttgactctaagcaggactggtggcatagcggatggggggacgtgatgagattcagtagatgacgtcaacaggaactggtatagattggacctggggtgagggagcaggaagggatcacctgaagccatttctccacaaactagttatgatgatgactttttatgctgtagctgtttcttcagttgttttgggtttgtttgttttgtacatattggtgggggtctctcactatgttgcccaggctggtcttgaactcctgggctcaagtgatcgacctaccttggcctcccaaagtgctgggattatgggcgtagtcactgtacccgaccatgtaggttttgttttttggttttttttttttttttgcttttttgttttttgagacagggtcttgctctgttgcccaggctggggtgcagtggcgagatctcagttcactgcaacctccacatcccggctttaaccgattctcccatctcagcctcacgagtagctgggattacagggctgcatcaacacacctggctaatttttgtatttttagtacagatggggtttcaccatgttggccaggctggtctcaaactcctgacctcaggtgatctgccagcttcagcctcccaaagtgctgggattacaggcgtgagctaccacgcctggccttggccatgtagatttctttcacaccttccttattccttcttcagaagctgaggccccatgaggggaagctggtagccaggggtcttttcaggtacctgtggccaaattaggcccagatgttaatgctctcatccatggctgaaaaaggccaagaaactaagaagagctgtggacgcacagactggcagagacaccgagagggcactgcgaccgcactgcacagatgagcaaaggaaggccaacttcagcattccctcctcctctctaagcccctccaaaaggcctgctcagggagctctggccaccgttctcaagcaattgcctgacgtttttactgacactgagggctggagatggtcccttttccaggcagctatgtgtccatttcctagagagggaaactgagtcccagagaaggcgggtgtggctggaggccatgggtcagtcataggcataaccatgccgtgaataaccgtcttggcactctctgacttctttccctggcaatacaacggatcccagtgcccatttgtcacataaggaaactgaggctggcgtcttcgatgaagcctggcaggagtgggggtcacacacggagtgcaaggctgtccaagccttcaaggtcattctgactgatctttgagccttagcaatacaggacgtgggtccaagagcatttccagcacaaaatggcgcctcatagaaaaatgtagtcggagttccagcgcccacctccaccacggctcaaaggagggggcgcgggcggcagcgcacacttcatttgcatatacaaaaatcaacggatttcgttggctggcagcggtttgatctgcacgaaactgggtcgccctctgaccggtctctatcagtcattggcccatgcgagtctcgtgacccaccagtcactaaagcgcatccctattggcccgagcgccttccatcacgcgtttaaaaccccgagtcccgcctcccctcgccacgctccggcccccaggaagaccgttagtcgcgtgcgcgacttcctcagcgtcagggcgcgcccgcgcgtatgccgggccgtggcggcgtctcattcaaacggtccaatcagcggccgcgtcgccttccccgtcccccttcctctcttcytccccttttcagcccctccgttctttgagaaccctcccgacccccgcgggcccccattggccggcccgctacccagccctctccgccacttccctcgcttctgaccatagtttgcggggaagggagcgagcgcgtcgaaaaccaaggaacgtgcgcgctgacgtcacggttgaggctcggagctgaggggccgcggagggcgtggcctgcgggcggttataaagaggcagtggtgcgcgcgcggccggctcagtgctgccgggcaccggggcggcgggttggtctacgctgtgcgcggcggacgtcggaggcagcggggagcggagcggggccgccggggcctctccagggccgcagcggcagcagttgggccccccgccccggccggcggaccgaagaacgcaggaagggggccggggggacccgcccccggccggccgcagccatggtgagcacgggcgatgaggcccatgaaggtggtcgggggtgtccctgagggaggaggtggagtctcaggggcctccgacgggcggccttgaggggtttgagggccagcctgggggtccctgacccgggatgggcccgagggccttcccgcaggcggagcaggagctcgggcggcccgcagtctccctggcggcgagggctccgggcgctttgcggcccgcccatgggtgttaccaggagcaaggacgccccgccgccatctccagacctgagccggggtttcaaggatgctctaaccaaaaattagtggagaagggggagagagtagatctctggcctacgtggaaccactggggaccaagcagggttaggagcgggctttggggggggggttctggggtgggtggagttatctgcaagcccccccgtgaacccgcccccatttctgttggaaactctgcctgggctgatggcctgaagcatcctgggtgagggtctgggagttcaagggtgattgacagcctggggccactgagtcaagacttgggcagtctcagcatctttaggccctgcgggaagcccagctcttaacactcgctcaccctgctctcccatccgtgcccagaactccaacgtggagaacctacccccgcacatcatccgcctggtgtacaaggaggtgacgacactgaccgcagacccacccgatggcatcaaggtctttcccaacgaggaggacctcaccgacctccaggtcaccatcgagggccctggtgagtttggaaggaaaaagagaaggggctgctgcttagatcctccatcaccctgctctagatcaccctagcgggaagtacccattacaggctggcctcgtgtcaggtgttgggatgcattggtggacagggcaggacgccacaaatgacaattatgtactcttttcccacaagggttgagaaatatctggtcattgagttagtatatcatgggacggtactctagatttgaagcaaggctttcagacatggcttccctggacctgagggtgggtaggaattaagtaggaatgggaagagagctccaggtggtgggaatggtgtcagcaagggcctgggagggtgggccaggtgatctcaaactccatcctgctgtgagtgtcagggatgaggaaacaagccagatgcagatcgtggggagacgggtcatgaatgatttgcgggtcacatgatttgcggagtgatttagaatactgtttcatgcaggctacatttctgttatcaccagaattcctacaaagtcaggatttgagcagagcctgtgaaggaatggtctagtccacggtggtgatggtggtaggtggtcaggaaagacctggcagcggtgacagttgaggtccttcatgccttgctgcagagggcgcgggatcatgacaataggaaggctccagaaaggcccttgggcaggtggagctgggcgcttggtaaaaacacatgaagaaagttgatgatgaagctgccaagctcttttagggcttctaggcctcttcaaggagtttgtagaggaagctggtggaaggtttaaagcaggggtgtgacaaatccctccaaagttcctattgactgtagtgaggagagccggcctggcagggggaagaacccagaggccagccaggaagctagccttggagatgggatgagattcaggggaggacctagcaggccggtgctcaggctgctgatgggctaggggagggacagtattttgacccaagcaagtgggtgagtgggagaggcgttcactgggttgggaggctgtggaattaacagacagttggatccttgatctgaaaggcatataaatgggcatcttataggaaagtgcgtacttgggtccctgccacctgggaagggcctgtgactggagtggtcagttgggctgagacgggggatccaggagggtgcagacgagcttgatagtgacacaggtgggggctgcaagatgggcatcatctctgaggttttgrgggaggtcctgtggccccctaggaacccagccattcttgctcttttttttttctctctctaaacggagtcttgctctgtcgcctaggctggagtgcaatagcacaatctctgctcactgcaacctctgcctcctgggttcaagcagttctcctgcctcagcctcccaagtagctgggattacagacgtgcaccaccatgcccagctaattttttgtatttttagtagagatggggtttcaccatgttggccaggctggtctcraactcctgaccttgtgatccgcccgcctcagcctcccaaagtgctgggattacaggtgtgaggcaccgcgcttggctttttttttttttttttttggaaacagagtttcgctcttgttgcccaggctggagtgcaatggcgcgatctccgcacactgyaacctccccatcccgggttcaagggattcttctgcctcagccttccgagtagctgggattacaggcatgcaccaccacgcctggctaatattgtatttttagtagagacggggtttctccatgttggtctggctggtcttgaactcctgacctcaggtgatccacccgccttagcctcccaaagtgctgggattacaggcgtgagccaccacacctggcctcttgctcttaagaattctacagcctgactgggcatggtggttcacgcctgtaatcccagcactttgggaggctgaggtgaacaaattgcttgagcctaggagtgcaagaccagcttgggcaacatagtgagaccctatctcttaaaataaaaaagtagccagacctggtggcatgcccgtaatcccagctacttggcaggctgagatgggatcacctgagcccaggaattgcaggctgcagtgaactgagattgtgccactgcactccagcctgggtgacacaagagaccttatttcaaaaaaagaaaaaaagaatcctccagtctgttggcagagttggcggggcacccacctgcatcacaatcagaccgtggagactggactttggggtgttgaggtgccttgggactcctgagtgccctgaccctgtacccctccctccactccagaggggaccccatatgctggaggtctgttccgcatgaaactcctgctggggaaggacttccctgcctccccacccaagggctacttcctgaccaagatcttccacccgaacgtgggcgccaatggcgagatctgcgtcaacgtgctcaagagggactggacggctgagctgggcatccgacacgtactgctggtgagttctgggctggggctgggcctcctgcctcctgcctctggaggtctgctggtgtctgagccatagcgctttgtttagtttttctgaatcaactctgaagtggttgaaggtttccacataaaaatccatgttgctagctttcctggaaagacaaacagtgccagacccaggacacccaagtactgttgagaagtgcccaggagcaccttactatgcaacgagtggtgagtttgtattgtaggatggtttttctcttctcccttttttttaaaaaacaaggatagggtaggccaggtgtggtgggtcacttgagctcaggagttcgagaccagcctggccaacatggtgaaaccctgtctctactaaaaatgcaaaaattagccgggcatggtggcacatgcctgtaatcccagctacttgggaggctgaggcaggagaatcgcttgagcctgggaggcagaggttgcagtgagccgagatcgcgccactgcactccaagcctgggtgacagagtgagactctatctcaaaaaaaaaaaaaaataagataaaaaataaaacaggaatggggtctcatttgttgcccaggctggtgtcaaactcctgaactcaagtgatcctcccacctcggcctcccaaagtgctgggcttataggagccagccactgcgcctaccctgtaggacagttttctgacaggtggaggtcaagggtctagttagaagctctttctttcttttctttcttctttctttcctttttctttcttccctttctttcctttctttctttttgttttaaagatactggctctttgttgcccaggctggagtgcagtggcgcagtcatagctcactgtagccttgaactcctgggctcaggtgatcttcctgcctcagcttcctgaatggctggtattacacgcatgcaccaccatacccagctagtttttatatttttatggtttgcagagatggggtctcattagaggcttttttgctaaagctgagcttacatgccgtaaaactcagttccaaagtatacagttcagtggttttttaatagcgatagggttcataaaccagtgtttctcagccagaggtgattttgccccccaaggggtattatgcattgtcaggagaccagaaagggttgtcacaactcgggggtgccactagcatctagtgggtggaggccaagggtgctgcccraatcctgcagcgtacgagatggctccatgacacagaatgacctggctgcggtgttgctgaggtggaggcatcctggtctaggctggtgctccaggctgcttacagcctgctgcctcccaacccttcccgcaagctgaaaaaaaaaaaagttaaccaaatttctaatgagtccctggggcacatggcagagagggtggggaattggggtttcctgccatggggagggagaggattgagctccaaggtaaacagaccccaaacccttccctcccacatgtaccgcctcccttcccctggggtgtcattggaggctgctggggacattggcaccgagctccaggcctacttgctgctaggtcagcatctgggcctgtcaggggctcagccagcaagaagagcagccagacctgcagtttgggtgcagtgatgagaattagggtgggaacctgtgtcctggtcaccatcagtgatatctgctgagcatctgctgagccaggtactgtgtatgtgtcatagtggccccagggagcaaactgctgtggccagtttgcccagacccacttcagaggatccagctggggctgctggaggcctggctgcaggtcacacctctgcactccaatttacccctcaggacgggctgtgaagggggttgagaggaatctctggaccaccctcgaagtgcacctcagccagcagtcctggtgtcttgccctcttgtgtgtggtccaacccagctagagtcttaggctgtgaacttcggatttctgataaaagacagaggtcaggatttatgctgtatctggaaagatggggagctttagagtccaacacgcaggtgtgatttcctcaaatcctgaggccctggggaagtctcttctctctgtccaggctgcaggcctcactcgttgaaccagagggcctctaaggtcatgctgaactgcatggaggcaaattcaaaaccataataggactcaagtctggggctcaggcaagtaatggactcctgagagggggccttggcgtttcccccgttacccagcaagttccacggaggaccagggacattttaaaccattgggcctatggcatcgtgtccttttgggaacatctgctgtgaggcaggtcacatgaaggtggcctctgagggagacagggagcaaagatgagggaggatgcagcataggtggggcctggatctgcagctgagttgggagcagaaggaacagccagtgcggaggccaccctcttgtggaggcctgggggtccctgtaggttgcccgacccactgtgaccctgagcctcttcccacagaccatcaagtgcctgctgatccaccctaaccccgagtctgcactcaacgaggaggcgggccgcctgctcttggagaactacgaggagtatgcrgctcgggcccgtctgctcacagagatccacgggggcgccggcgggcccagcggcagggccgaagccggtcgggccctggccagtggcactgaagcttcctccaccgaccctggggccccagggggcccgggaggggctgagggtcccatggccaaraagcatgctggcgagcgcgataagaagctggcggccaagaaaaagacggacaagaagsgggcgctgcggcggctgtagtgggctytcttcctccttccaccgtgaccccaacctytcctgtcccctccctccaactctgtctctaagttatttaaattatggctggggtcggggagggtacagggggcmctgggacctggatttgtttttctaaataaagttggaaaagcagcttctgtgtctcacagatgccccaggaccgctgcatggtgccatgtggctctgggagtttggctcccctgcacaggccctgggtccttgtaaagcctcatggactgcagcagtgggtccatctagctcaccagccttgctgtttgaggtttgggtccacctctttgttctgtggaggtagagcggtcacaacccctctttggagtcagatttccaatctaaaatggggcgaggacctggagctgctcctggtggcctgagcggcactgccctatacttctccctctagaataatggccacgttggtgtggcagtggtattcctgctcaggacggccaggtgccagcagtctggcatgaggctcgcctcgtctgtctggttctggactgggccaaggttcggtccccttgaatcatctgatcctgctttgtgctaaagattggtttttcccttgtgggcagcaaagcctgttcccacatgtatttctgcacaacagatcacaaagccagcggcttaaaacaacacccacttcagactttgtgttggaagtctggacacggctgagctagtctctgctcagtgctttgcaggctaaaattgaggtattggttgttggtgttccttagtctgggtcctcttccatgctcatggttgttggctgatttcagtcctcgtagaactagggtcttagctccaagaagctgcccctccttgggccctggcaggtctgatttaagggcccattccctttgaggtgctcaccggattaggtcaggcccatccagatacttaagtgataatgactaaatcacaggggtaagatcccagcttagtcttagtttctgccctcaaggggaagggattaacctgggtgtgcacaccagggggtggggaaacttcccattctattaatgcgtttaggttatttagaccaatgtctcattaattttaaaaaaattaaaaataggccaggcgcaatggctcacgcctgtaatcccaactttaggaggtgaaaggatcacttgaggccaggagttaaagacgaacgtgggcaacacagtgagatcccatctctacaaaaagtaaaatacatttacaataaaaatctacaagttctgacccataggagagtggaaaactcaaaggctgcttttgtcctgaaagaatttgcctattctaataaaacagctgaggttgaaacggctcagcctctgaaaggggtctgacccttccttgagcccttgcctccagtgacaatctcccaagctaagggagaaaaggaaccaaaagtctgcactcctctctacctctagcagtgcagggagcgaaggaaagacaagggaagaaacccttcagattttcagatcaaattcacatcactggccatccaagaaatcttaagctctgcgtttatcgtcaaccatttctgcatgagggaagcaaacagtccttgctgaaggaaggtgcctgcatcctgggcctcggaacccactgaaataatttagcgaagtgcataataaaaataatatttgcccttagccctgacagagttcctcaatcccttggaatctcctgggtattaataggagcagtctttgtcctaatgaagccatctgtgatgggcccctgcgtagcttcaggaagggggttggtcactagaaataccaagaccgaattagacagttgggaatttcagccccacccatacctaccaacctctgggaagagaggggctgaaggttgaggtcaatgaccaatggtcaatgatttgtctaatatgcccatgtaatgaaacctccgttaaaacactaaacaaggttgggtggggtggctcacgcctgtaatcctagcactttgggaggccaaggcgggcaggtcacctgaggtcaggagttcaagaccagcctggccaacatggtgaaaccctgtctctactaaaaatacaaaaattagctggacgtggtggtgcatgtctgtaatcccagctacttggaaggctgaggcaggagaatctcttgaacctgggacacagaggtttcagtgagctgagatcctgccactgcactccagcctgggtgacagagcgagactctgtctcaaagaaaagaaaagaaaagaaaagaaaaaaattagccaggcatggtagtgtgcgcctgtaatctcagctcttcggaggcggaagtgtgagggtcacttgagatgggcaggttgacgctgcagtgagctatgatcgtaccactgcactccagcctgggtgacagagggagacccttcctcaaaacaaaccgggcacggtggttcacctgtaatcccagcattttgggaggccaaggctggtggaccacttcacgttgggagttcaagagcagcctgcccaacgtggcgaaacctcatctcaactaaaaatataaaaatcagccaggcattgtggtgcatgcccatagcctcagctattcaggaggctgaggcaggagaattgcttcaacccaggaggcagagactgcagtgagccgagattgcaccaccgcactccagtctgggcaacagagtgagactctgtctcaacacccccrccactcccctcaacacacgcaacaaaatgtataaagagttcctacaaacgaataagaaaaaaacatgaaaaattggcaaaaacacttgaacaagcacttcacaacacaggaaatccaaatggttactcaacacatgtaaaggtactcaacatcattagtaactggaaaaatgcaaatgtaaaccaagattgatgccattatactcctagaaaaacaacaattaaatctgagaataccaagtgttggcaaggtggcggagcactaggaactcctatagactccagttggaacagtgagatggtaaagcccattttgaaactttgtagtcaagtcaaaagaactcaacttattactcaacaacctttttggtttcggtttggttttcatttacatcgaggttccctttgtttctatttcttcacaaccatccatgccggggtaactccttcctgcgtctcaagcccaaatcccactctagaaattcacattcccatttctttctttttgtttttttgagacagagtttcgctgtgtcacccagcctggggtgcaatggcacaatctcagctcattgcaacctctgcctcacaggtttcaagcgatttcatgcctcagactcccgagtagctgggattacaggcgtgtgccaccaagctgggctaatttttgtatttttagtagagacagggtttcaccatgttggccaggctggtcttgaactcctggtctcaagtgatccgcctgcctcggcctcccaaagtgctgggattacaggcatgagccaccacgcccaacctcacattcccatttctgactctataggacacaggttgttttctttaagaagatgcggtatcactatgttgtccaagatggactcaaactcccgggctcaactgatcctcccacctcccacctcccacctcccacctcccacctcagcctccctagtagctgggactataagcacgcaccaccatgcccagctctcatgtacttggacatacacaacaggtttaaaacatttgtcctggccgggcgcggtggctcacctataatcccagcactttgggaggtcgaggcgggtggatcacaagatcaggagatcgagactatcctggctaacacggtgaaaccctgtctctactaaaaatacaaaaaaattagccgggcgtggtggcgggcgcctgtagtcccagctactcaggaggctgaggcaggagaatggcgtgaacccggaaggcggagcttgcagtgagccgagatcgcgccactgcactccagcctgggagacagagcgagactccgtctcaaaacaaaaacaaaaacatttgtcccgattacaaacagcagaaacatgcttgtatatttaagaaacaataccatacagcacaaacataatcaaaactaagcaagtcacaaaagatactacagcttgaatgccttcatacacaattcaaaaataggcaaaaataaattctcctgctaaacatacatatggtggtggtaaactataaaagaaaacaaggaggccgggtgtagtggctcacgcctgtaatcctaacactttgggaggctgaggcaggcagatggcttgagctcacaagttcgagaccagcctgggcaacatggcgaaaccctgtctgtacaaaaaacacaaaaattttctggacgctgtggtgtgcacctgtagtcccagctactcaggaggctgaggtgggaggatggcttgagcctggcaggcagaggttgcagtgagccaagattgtgccactgcactctagcctggacgatagagccagaccttgcctcagaaagaaagggaagggaggccaggcaccgtggctcacacctgtaatcccagcactttgggaggccaaggcgggcggatcacaaggtcaggagatcgagaacatcctggctaacacggtgaaaccctgtctctactaaaaatcaaaaaaattagccgggcgtggtggtgggcacctgtagtcccagttactcgggaggctgaggcaggagaatggcgtgaacccgggaggtggaacttgcagtgagccactgcactccagcctgggtgacagagtgagactcgtctcaaaaaaaaacaaggggagtggaggggaggggggagaactttcctaaaagtgagaatactgtttacctccagccagggttgaatacttgggtggtttgagggtctggtagtcttccatttcctgacctgggtattggttacataggtgttttatgattttttaagtgtataaatacattttatgcacttttctgtgtgtatgctgtatttcagaatttttaattttaaagtttttttttttttacaagtttacattcttgttgttcaggctggagtgcagtggtgccaacatagctcactgcaacttcaaactcctgggctcaagtgatcctccaatctcagcctcccaaggaactggaactacgggtgcacactaccacgcccagctaatttttttgtacagatggaatttcactgtgttgcccaggccggtctcaaactcctgggctcaagggatcctcgcatctcagcctcccaaagtgcaaggataacaggcatgtgccaccgcgctcagacaaaggttactgttaagtcaaaaaagcaaggtgcaatatgccttgtatgggacactaccagtcatgtaaggaagccgggggcaaaagaatacatatataaatttccttgcatttgcatagaatttctccagaaaaatacacgagaacctggtaacattggttgtccctgatcaagggaactggttgtcccagatacaagaatgaaagggagccatttcattatagaaatttttatctttaaaatgagaaaaagaggctgggcgcggtggctcatgcctgtaatcccagcactttgggaggccaaggtgggcagatcacaaggtcaggagattgagaccatcctggctaacacagtgaaaccccatgtctactaaaaatacaaaaaattagccgggtgtggtggtgggcgcctgtagtcccagctactagggaggctgaggcaggagaatggcgtgaacccgggaggcggagcttgcagtgagccgagatggcgccactgcactccagactgggggagagtgcaagagactctgtctcaaaaaaaaaaaaaaaagagaaaaagaaggccaggcacagtggctcacgcctgtaattccagcactttgggaggccaagatgggtggatctcttgaggtcagttcaagaccagcctggccaacatggtgaaaccctgtttctacttaaaatacaaaattagctgggcatggtggcgcatgcctgtaatcccagctacttgggaggctgaggcagaagaatcgcttgaacccaggtggtagaggttgtagtgagccgagatcgcaccactgtactcca

SEQ ID NO: 94165 - DNA, 30971 bp, Homo sapiens
  misc_feature (1)...(30971): n = A,T,C or G
tgttttcctagctgctgatctatactagaatgatgtcaataactgattttcaaagaatcatggtacatgttccaaagtgttctacaggagtgtgatattgtgaaatatatatttgatcagttgaacagtggtagcagccccgtgtttgggtttttactgactcctgggcagtgaccagtgtcttggctgtacactcaggcaagagggcaatagctacctggcttattaacgggacatccatgtggggcagagccctgtggagatgtgaaagatgtcttgaagtagaacaggttcatgcccatcagaaaaactcccttccaggctcaggagatggctggagtcaccaagtgagttttttttgtgtgctcctgtgaggtggtcgcctgggtccatgaaatgagtgaacaaggcggttctgcagcagtgcagagatgggctgaatctagccatgaccctcgggctcaaaatgccaataactattctgtcgctggttgcgctggctcaagcctgtagttccagcactttgggaggctgaggtgggtggatcacctgaggttgggagttggagaccagcctgaccaacatggagaaaccccatctctactaaaaatacaaaattactgaggcgtggtggtgcatgcctataatctcagctgaggcaggagaattgcttgtacccaggaggtggaggttgcggtgagccgaaatgacgccactggactccggcctgggcaacaagagtggaacaacgtctcaaaaaaataaaaataaaaaacaaaaaaaactgttttgtctcccagcaagagaaaagagactgcccatggctgtgaggcacattcccttgtgggaaagctcttaacataactggcaaatgagttggatgctggcagccctggggttctacatctaggtcttgacaggaatagacactgtctctggactgggctttgtttgcatggtagaagatgcaaacactcagagtgccactaaaaaaaaaaaaaaaaaaaggccaggcacggtggctcatacctgtaatcccaatactttgggaggctgaggtgggcagatcacctgaggtcaggagttcaataccagcctggcaaacatggtgacacctcatcactacaaaaatacaaaaaaaattagccaatcccagctactcgggaggctgaggtggaagaatcacctgaacccaggaggcggaggttgcagtgagccgagatcgtgcctttgcactccagcctgggagacagagggagactctgtctcaaaaaaaaaaaaaggaaaagaaaaaaaaaaaaagaaaaggaaaaaaaaaaaccagaacaggagatactgcatgaatcttgatggccaacgtcattgcttcagaaaaaggagcactctgtacagcccataatgtccaacaatgggcagagaggcatcctcttcagagtcataatttggcacagaagtggaagaggcaattcaaacactgattgtctaaaacgggggaggtgaaagcaggagggctggtgatagagtttggaactgtatctccacccaattgtgtgttgaactgtaatccccagtgttggagctggggcctggtgggaggcaattggatcatgagggcaggtttcccatgaatggtttagcactattctctttggtattgtactcaggatagtgagtgggttctcatgagatctggtcgtttaaaagtgtgtggggccgggcgtggtggctcacgcctgtaatcccagcactttgaaaggctgaggtgggtggatcacctgaggtcaggagttcaagaccagcctggccaacatggcaaaaccccgtctctcgtaaaaatacaaaaagtagccagcgtggcggcgggcgcctgtaatcccagctacgtgggaggctgaggcaggagaatcacttgagctcaggaggcagaggatgcagtgagctgagatcacaccattgcattccagctttgatgacagagcaagactctgtctcaaaaaaaaaaaagtgcacggcacctcccccagtcattatctctggctcctgctcctgccatgtaagaggactgctcctcattcatcttctgccatgattggaagcttcctgagacctcaccagaagcagaagttgctatgcctcccatacagtctgcagaagagtgagccaattcaacctctttccttataaattacccaatcccattgcttctcagccttttggctaagatcaagtataaattacctagtctcagatatttctttatagcaatgcaagaatgaactaatatagctggcttgcacgctttgtgagtgtgcactcatacttagcatgagtggtctaaaggagtggccttccagatttttctccatttttttggttgatctggggaaggggggggtggggaggatgctgacatgaccatgcaattttttttttttcccgagatggagtcttgctctgtcaccctggctggagtgcagtggcgcaatctcagctcactgcaacttctgcctcccgggttcaagcaattctcctgtctcagcctccagagtagctgggattacaggcacatgccatcagtcccagctaatttttgtatttttagtagaggtggggtttcaccatgttggccaggttggtctcaaactcctgacctcatgatccacccgcctcggcctcccaaagtgctgggattacaggtgtgaaccaccgcacccagcccaatgaacagttcttgaatgaatgacacaatgaagaacactaccagaacaagagcagatcaaaggtgaataagtgagtagtagcttctattaatcctcatcagcaaccaacataacccagggcttatagatttctctatgtaatatgctacacacacgtctatggaaagagagagagagagaagcacatcagtcaaccaattttaaaaagttactctaaatgtgttggtcttgtattacaatctttagattacactattattttatttcaaacaggactggtagaaacttcttcatgccttttcaaccaaagaacttcaatacggtgaaacccctaaaaatacaaaaaattagccaggtgtggtggtgggcgcccgtagtcccagctacttgggaggctgaggcagaagaatggcatgaacccgggaggcgcagcttgcagtgagccgaaattgcgccactgcactccggcctgggcgacagagcgagactccgtctcaaaaaaaaaaaaaaaaaaaaaaaattcacactttgttctttgataaagtaccaaccttagaaaggtacgcagcgaacaccatctgacttagattaattgaaaagtaactggatcaatccccctttaccccaagcatctaaacggaacaattttcttttcttttcttagggatgcagcgtccctcaaactgcagagccacttggcgatgaagccaggatcgcagtgcatttgataacttaatgcaaatttttactagcacttaaaactcagatatgaaatctatacttgatcttttctgcttggaattggtcagattagtggttctgccccggcatacaacaaaaggctctcagaaacactcatggtcgctaaccaatcagaaggaccaacagagctcgacaaacagacaggagggtggaagggcaccgccttccaccccacccgcttagacagcctttcaactctgcccactttgaggatctgtaggatgatccaggtaagcatgatacctatcttaacttcaaggtagaaattaaggcttgagtgcacttatttggtgccttattcatttaattggaagattatatggtaatttcactgctcataataattaaaccttttttttcactttggggatgataatgacatttggagagtagcactataaacctcaaaaatctattttgaagatgactggacttaagagcgggacaggtttgctgtacacttgagcgaacatgctttgttccccaaagcagcaaaaaagccagagcctggaagtttctaaaacttgaagcagatgcaagtggcagatccaaaaagctgtgcctagagaacagatcggttgaccggctgtatctattccatcctccccagtgactcagtggaggatttcggacaggtctctcagtttccccttctttggtttcaccttagagtgaggggaagtcacagcatttcttcctttatatttcacagaaacacaggaggctggattgacagtcagcaaatgtaaagaaatacagacgcccacagggcaattatgctggcctggcctcaagcttcatattcatccttaactgattccctggcacactcgccagtgacctggctccacttcaccgaatggacccaagggcccacactttcttaattctcctgtagaccctttattcactccccttcatccttcctttgctgacggtggtcgcttctgactgccccaatcttttttttttttttttttttttttttttttttttgagatgtagtctcgctctgttgcccaggctggagtgctgtggtgagatctcagctcactgaaacctccgcctccccagttcaagcgattctcctgccatggcctcccgagtagctgggattacaggcatgtgccaccacgcctggctaattttttttgtatttttagtagagacggagtttcaccatgttggccaggctggtctctaactcccgacctcagatgatccacctgcctggcctcccaaagtgctgggattagaggcatgagctaccgagcctggcctcaatcttatgcttactattcttcatctgttgtctcattttatagccagagctcaggtgacagctgagggattacattcatctgtctctgagcctctgagacttctattttcttcaccaccctccaggaatccttttttctagctcttgggtgctggccatctcctggaaggttaagttgaaaatctgacctccagttcattggtgcatctacaatcaatccgcattacctgcagattctgtagctgcaaattcacctacttgataatgtttacttttagcccctaaatcaatcccagcggggcttttctggatgtgcgccgggtggtgaagaggttgaatggctgataagcacggtcccagcagagatccatcgaggaacctctgccttttggtttccgctcttataccataaatgaatgcccttttcttggtctttttggggtttttgtttgagacagtctcactctgtcacccaagctggagtgcagtggtgtgattgcaacctctgcctctcagattacagtgattctcctgccccagcctcccgagtagctgggactacaggcatgtgccaccacacacagctaatttttgttttttagtagagatggggtttcgccatattggccaggctggtctcaaactcctgacctcaggtgatccacctgccctggcctctcaaagtgctgggactacaggtgtgagccacaatgcccagtctgggttctcttaaatgtaatggaaagaggagaattggaatggccgagagagagaactaggaccctgcatgaatgaatcaagttgacttggagagaaactgtatttataggaaagtcaaagctctgagtttggaggccaagcagggtgggggtgagcaaagctgtgggaaggaaagcagggcttcaaaaaacagctgctccttcttgatagatgcagggaggaaacaggaaagaccgggggccatgtggtgttatttgtagcacttgaatagcttggctcttagagtcccaaggcctccagctagtgatccgcagatgccattagagggcaaaagtgctcgctgctctctcatttgtcaacaagaagagctggtatggccctggccttaaggataagttagtcaattgcttattgtacgtcacgagatgaatgctgggagagaggaaacacagggtgtgtagggagagggcaaaaacggctacatctgacccaccccagagatgaggaaggcttccaggtgggaggtgacaccaggaggtaaccaggtggaaatcaccctcaagtagcagagacaggtgtgcaaaggctcagagggagcttctccaggatcagcagagctcgattgtagggtgtgaggctgtcacagaggctggagaaataagcagttccttgctaagaagtctgaattttaacctgaagggacatgggagctactgcaggctggtaagcaggggggtggtgctggttggattgcaatgcagagaaaccctgggttggcctgcgtctgatagactggagagacccttgaagaaatcagggtacaggcagtcctccggagtagaaatgaggaaggtgccaactgagaccacagcagtggggaagagtgtgagagggatggaaattgagatgaattcatgggtgtttggcctgtgtagtcacacagggtcccgagctgagagggaccccgagcttggcttaatgctctgctgtcactgtcttaaaattcctcctcattttatgtgtgaatctatgttttgttttgttttgagaaagagtctctgtcgcccaggctggagtgcactggcaccatctcggcttactgcgacctccacctcccagactcaagtgattctcctgcctcagcctcccaagtagctgggactacagccacctgccaccacgcctggctaatttttgtatttttagtagagagtgggtttcaccatattggccaggctggtcttgaactcctgatctcaagtgatctgcccatctcagcctcccaaagtgctgagattacaggcatgagcccctgcagccagtctgaatctatgttttatcagtgaaatccaatggggcaatagaacacgtgcgtgggcagacgagacaccaacaatatgagttacccccgtcccttgccaccgcactccccatggcgtgtctgctgtgccctgagcatagaatcttggggggtccgcagtgcatgggagcccagcaaggctccaagtgagcataagggaagcctactatgtccacaacggagtctgcaagagatgctgacagcaccaagaggttgcactttctcttattatagaatcagaattgaaaaccaagtcaatggcattctaagaaacaggaacaaacaaggaaccctctcccagccttttctactcatctgattccctgtagtaaccaaccacttccactggaactgatgacataggagaggcaaagatagcagagtcatagttgtttttcctttcaattcttccttatgcatcagtaagccaaaggtagagagtggtggtagattgtataggtgtgaaaaagtgaaataaaaacagctgaatggccaggtgtggtgcttcatgtctgtaatcccagcattttggggggccgaggtgggtggatcacaaggtcaggagttcgagaccagcctggccaacatggcgaaaccccgtctctattaaaaatacaaaaattaggccggtgtggtggcaggctcctgtaatcccagctactcaggaggctaaggcaggagaatggtctgaacccgggaggcagaggttgcagtgagctgagatctcaccctgcactccagcctgggcaagagagcaagactctgtctcgggaaaaaaacaaaaacaaacaaacaaacaaaaacagatgaattagtttcctgcaacgtctcactgtttctgtgaggcaaaaaaatgccacatacaaagtacaaattacgtcatttctgtgattccacatttgagtccagtgttcctatttaaatctggcattgcacaatgtaaagaggaacagtataatccatgctagtaatttaaaatgttaactttttttttacttggaaggacattaaataacaaatgaaagcatcatgataaattgagacacagacaccacagaagaaagaaaatgctttatatgttaatacttcagcagtgctttttcctctgatttttgaataagggggcccatgttttcatcttgcactgggccttgcaaattctgcagctgctcctgactgtaaagaggggatttagccataaaatcagcaagggttggtcgtggggatgtggggtacaggaagatagaggatttaggcatggctgcagggttttaagctggtggtactgttggctgggaaatctaggaaatccagcattgaaggaccggctttgtgaatctgttgtggatgggctgagcctgcagtggccatggggcatcctgcctgggaggagggcgagcagcaattcatcagcacagatggtgactgaggctcaggaggggctactgaggtaggaactgtgggcagggatgctggggaagcagacattgaggagatgggacaacagctgggtatggtggctcacacctgtaatcccagctactcaggctgagacagtaggatagctcgaggccaggagttcaagatcagtctgcacaacatagcgagaccccatttccccccctcaaaaaaaattaataaaaagtaaaaatgcaaagaagagatgggacagcaaagaaggcctcataaaggagatggagaggaaggagacaggaggaaaggggagagggaaggtgacagccagaagcaggcatgagaggttccctagagtggggttttattatctcaagtgaccatgagcaaattactgaacctctctgtgctgcagacatcatggataaaaagaagmtaaaatgaagacaataacarcagcacttatgggcggggcggtaktggtgaarattaaatgaaragtttataygggaagggctcagaatgctgctgtattaaatgcctcagtctgctataaaaagataccacaagctggatggcttaraactacagaaatgcatyrtyttacacctgcaggccagagggctgagatgaagggattgtcmgggccaggctccctctgaggatgctaggggaaggatctccctcccagcttctgccaactccttatcttgtggagcaraagtccagtcttcacgtggtyttctccctgtgtgcatctgtgtccaaaatttcccctttccatatatctatgtctatatctacacacaaaaatacacatatatgtagtgtgtgtgtgtatatatatagagatatatataattttatttatttatttatttatttatttwgagacagaatcctgctctgtcaccctggctggagtgyggtggtgcaatcttggctcactgtcacttcygcctcccgggttcaagcaattgtcctacctcagcctcccgagtagctgggattacaggtgcccaccactgtgcccaactaatttttttgtatttttagtagagacaggtttcaccatgttggccaggctggtcttgatctcctgacctcaagtgatccactcgcctyggcctcccaaactgccaagattacagacgtgagccaccgcacctggcctcttttattattttttaatagagatgggggtcttgctatgttggccaggttgktcttgaaccttggcctcaagtgatcctcctgcctcagcctcccaaagtgctaggattacaggcatgagtcactgtgcctggcgtattttatttataatctttttaatagagataggagtctccctatgtctgccaggttggtcttgaaacttggcctmaagtgatcctcttgcctcagcctcccaaagtgctagggttacaggcatgagccactgcacctggccaatttcccctttccataaggacacgcattatactggataaagcccactctatcaacctgattttaacttgactacctttgtaatgactatctccaaatatgtcacattttgaggtactgggggtcaggactccaagaagtcttttgtgggagaggggatgcaattcaacccacaacagtgccctgctctgtgaaatgttcacytttatgaataagacgacctccacgagttgttttcttcaaaggtatgaggcagagaccagtgaggggcaacctgagggtggggaacctaaatttgctgtggccacaatctccgcaaaaacgcaatgtttctcccgcagcacttagcagcccaggtgaaggtaaatacaagaaggagagggaacaaagatgagggagtgacacatcctgataatgtgccaaagacaaccacaggcagacatactgatggcagtgaggcagacgaggaacactgctcattgctctgcctgcctcacttttgttcaygggccaccaggaggcctgaggtcccaggtggacaraaatcaccacgatcccctcttggccccaaccaacatacgcacaggaggcaaacyaacttttgatcatttattaaaacaaataagaggttaatctgtgggtaaaaaggccttgtttgtcagcagctcaggggatgccttcmagctgacaggcgctagcgcactttgaagtaggaagcatcaaatgggttctggagataagcaatagataaacaacgggagttaccacaagtgtcaagccaggcatcaccttcacagaaattattcctggagcgaatgtggaagtcattaatcccaagagaaaagacagaggtgggcgtggtggctcatgcctgtcatctcaacactttgggaggccaaggcgggaggatcccttgaagccaagagtccaagatcagcctgggcaacaaagtgagacctcgtctctacaacaactaaactaaataaaataaattagccaggtgcagtggtgcacacctgtagtcccagctactcaggaggctaaggcaggaggattgcttgagcccaggaggtcaaggctgcagtgacctatgatcacatcactgcactcctgcctggtccacagagcaaggccctgtctctaaaartaaragaagagaagacagatgaagcaaagtgggccaaaacgtagaaaaaggaaattgctctgttttagatgaaggattrtgaaacaaaattttcaaaagcagcaatgaaagacctgtctaccacagtgtagccctcagcaaaaccacaagtgggcagactctgactctcccacacccctctggctaaccccaaaccccttctagatagaatgttctccttcctcttcatcctaatgccaggagcaactttggtggtgcgttccccacacctgccccytttgccaaagctccaggttccagarccttcctttctttcttctcttctgctttaaggcttgcttaccctgagttcaagayccttacagccttgttagataaatggctacataagatgaccggttaaccagagcgagtatggctgatgatggcttctgcaatataatgaaatgaacctgctcccaccttcactgaacgatcaacattcactttggtgtaatggggtaaaccatcaacatgtccctcctgatgcaatgcacagagaacatgacaccattgctgtgatagtcccaccccaaatgcataagaatatcaccgccaagaaacatcagccaaatccaaagtaagggacattctatcaaataaccgtcttgcgttcttcaagaatgccaataccatgaaagataaagaaaaactgaggatctgttccaggctaaaaggtacctacagagacayaacaactgaaaataatgcatgatctgggatgatcgtttgctccaatgtacatcattgggttaactggcgaaatctgaatgaggtccattagaaaaccgtattgtagcagggttagtttcctgattttgatcattgccttggttatataagagaaagtccttgttattaaggaatacacaggaatatttaggggtaaaggataactcttctgccacttggaaaataataaagcaaatggggtaaaatggtagcactggggaatctcagcgaagggtataaaggatgtctttgtactatttttgcaacacttccatgtctggaaaaataataataaatattacatatttaataattaaatgaatgaaaaagtgtgcaatgtttctgcaggtgtcgaccttggcaatgcaataggatcatctcagaagctctgcatgaacatcagtgcccaggccccaacccagagattcatagtcagttagctgggggtgaaactccagacatcggcatgtgtaaaacacaccccaaggtcattctagtgtgaatccagaataataagcagccagcttagcctttagtgtcattgggttgacaggaaagttctaggctggggactttctgagcccccatgtctgcttgttttgagatctgatcttgggggccacatggtgactcaaaacaggagcacagttgtgggtccagtcttggtccttccactaataagatgggagacgttgsgtcagatcccttgcctgtgccaagcctgggttttcttagctgtggaatgaggttaaccaggaagtgcctcagtggccaatatgcattcaaggaagaagatgcccagctcagtaagtgatatggtgtggctgtgtccccacccaaatctctaattgtagttcccataatcaccacatgctgtgggagggacctagtgggaggtaactaaatcacggggtgggtctttcccctgctgttcccatgacattgaataagtctcacaagatctaattctttttttctttttctgagaccgagtctcactctgttgcccaggctggagtgcagtggcttgatctcagctcactgcaacctctgcctcctggatttaagcaattttcgtgcctcagcctcccaagaatctgggacaacaggcatgagccattacgcctggctaatttttgtatttttattagagatggggtttcaacattttggccaggctggtctcaaactcccgatctcaggtgatccacgcaccttggcttcccaaagtgctgtgattagagatgtgagtcactgttccctgcctgatctaatggttttataaaggggagctcccctgcacaactctcttgcctgctgccatgtaagatgtgactttgctcctcctccaccttctgccataatcatgaggcctccccagtcatgtggctctgtgagtccattaaacctctttttctttataaattacccagtctcaggtatgtctttattagcagagtgagaatggactaatacagtaacccttacatccccagaccccaaaatggagttgtcacaggatggcagtctgaaatccttgtgatgtccagctggcagaagggaatttggatgagtagggctggccaacttctggtattgctggtgggtcctgtcattgtgcttgcaccccctggcccttcataggacgaaattctgggagggttcttgggaaaggggctagagaaggcaagaggacactaatcttcttccaggcagtaggagggcaagctggagaggccaagctcccaagtaaactgaggcacctccactggtccctttgtgaggcacgcttgacctgggttttatggaaagaaaatgccctcaccaaagggtgctaaacaaggccccaggctccgcacctcatcccaggtgcccccctctgccctgccctagactcacctaaagctgtactgcccagagtcatggcctcaggccacatgtggctactgggcacttgnnnnnnnnnnnnnnnnnnnncttcctctctctctcttcctccccccccctcctctccttcccttccctctccccccctccttcctctttctccccttctttttcttcccttcctttctctttccctcctcctctttctttcttctttccctttttctcctctcttcccccccctttcccctcccctcttcttttctcctctttctcctttctttcggctccctccccttccctcttttttcttattccctctcctcctttctctttttttttctctcctctccccttctcttttttccttctcttttcttctcctcttcttttctccctccttttttccttcctctctccccccccccctccctctctcttctctccctttttcctcccccttcctccttctccctctcttccggtcttccttccctccttccccccccccccctctttttccccccccctcttcctcgtcttcccctccccccttctctcctccttctccctgtccgttgctctgccccccccccccccccccctcttttttccccccctcccccccttcctctcttcttttcccctcctccccaaaaaaaccccgcccccattccctgacccatttccttctggctaatttctgtatttctattagagatggggtttcaacattttggccaggccggtctcaaactcccgatctcaggtgatccacgcaccttggcttcccaaagtgctgtgattagagatgtgagtcactgttccctgcctgatctaatggttttataaaggggagctcccctgcacaactctcttgcctgctgccatgtaagatgtgactttgctcctcctccaccttctgccataatcatgaggcctccccagtcatgtggctctgtgagtccattaaacctctttttctttataaattacccagtctcaggtatgtctttattagcagagtgagaatggactaatacagtaacccttacatccccagaccccaaaatggagttgtcacaggatggcagtctgaaatccttgtgatgtccagctggcagaagggaatttggatgagtagggctrgccaacttctggtattgctggtgggtcctgtcattgtgtgggtgactccttgcacccctggcccttcataggacgaaattctgggagggttcttgggaaaggggctagagaaggcaagaggacactaatcttcttccaggcagtaggagggcaagctggagaggccaagctcccaagtaaactgaggcacctccactggtccctttgtgaggcacgcttgacctgggttttatggaaagaaaatgccctcaccaaagggtgctaaacaaggccccaggctccgcacctcatcccaggtgcccccctctgccctgccctagamtcacctaaagctgtactgcccagagtcatggcctcaggccacatgtggstactgggcacttgagatgtggccatcttaattgagatatgctgttagtgtaaaatatacactagatttccaagccttcataatcaaaaaaagaaaaaaaaaagaacataaaatatccattaagaatttttaagtattcattaatgttgaaataataatattttgaatatattggttaaagtttactaggagaattcatttcaccccttttactttttctaatgtggtgactaaattatttaatattacacatgtggattacattatatttctattggacagctctgttctaaagtctgcacgttgtccttttgtggcttatttccttgataattttattaaaattaaattgaagggccaggtgcagtgactcacacctgtaatctcagcattttgggaggccgaggcaggtggatcacctgaggtcaggagttcgataccagcccagccaacatggtgaaaccctgtctctacttaaaaatacaaaaattagccaggcttacgggtgygtgactataatcccagctacgcgggaggctgaggtaggagaatcgcttgattcctggaggcagaagtagcagtgagctgagatcacgccactgcactccagcctgggggacaagagtgaaaaatccatctctaaataaataaatagaaaaataaaactgagggcctggcacggtggctcatgcctgtaatctcagcattttgggcggccgaggcaggaggattacctgaggtcagcagttcgagaccagcctggccaacatggtgaaatcccgtccctactaaaaatacaaaaattagctgggctttgtggtgggtgcctgaaatcccagctactccggaggctgaggcaggagaatcacttgaacccgggaggcraggtcgcagtgagctgagattgcaccaaggcgctccagcctgggcgacagagggagaccctgtctcaataaataaagaaagaaataaaaataaattgaggaaggatttagcatgcaaaatagaatcagctttggaccctgaataccctgcagtgagaattcccctgtggttctcaggcttctgtaattccagcaaatacactcttccttcaggttcactaaaatgcagatattgtgagataatgctcatttctcacagcttgcttaaataataatgatcatcatagtaatttacaacttaatagtcaacactgcctttttaacccagtctgtgagactgaatcgtaaacgtgacattctttgaagtaaagctctcgattaatataccagactgcataaacgctaataacttacctttccacagaaagataatatgtgggtattctctttgaagacaaatggtggagagtagactctcatcaaagagcctctggcagtaatgagttgcattccagaaggttccagaaggttctgtggaaggctgcagtttgggattggttctcaggtgtctaactgctttctaaggatgaagactcctggttcgtgctttagcgacacccacaggagcaacagactaagacattcctccacacaataacagacccaggcagtgcagagccatgtgtgtcttatctgtcctgttgtccacagtctggttttatcttagacctagcctggtgcaatccatgttgtgtattggcactccacttaagtttccagtttgtaaaaagcccctttcattcggtgattcctcaggtctttaggggaaatttctggaaaccaggaagaaggaaataaaggttgttttgctgaggatgggtgacgttgggcgtggaacccaaatgagtggtttgagcagaaagtagcctccatgctggactaatgcaatagccctgccatgatttcattgcagggctgtgaccgtctacgacaagccggcatctttctttaaagaggcacctctggacctgcagcaccggctcttcatgaagctgggcagcacgcactctccgttcagggcccggtaggcctcccaccctcagytgccttctctcctgctcgccactgccctggcctctccccttctcactgcagacctgggaacccactcatccagggattggcaaactaaggctacaggccagtctcctgcttytgtaaatcaagtttcactgggacacaacacactcattaacttctgagttgtctacagccgcctttgagctacaatagcagaatcgcgttttgcaacagagaacctgtggcccacaaagcctgaagtatttactctctgaccctttaaggaatgttaaagggtcttactctcctgccaatgggttcccaggcctgtggcaggatctgtggacctgtgtgtcccctggggtgtctcatggggctaaggaagggaactttgtgcaggtccacataccctgaggtgtgcccctgggtaagctggggtggtgtgggagggcgtcctagcaccctcatcttgggtccaggggatgacaagacagtaagtcctgtggagaaaaggaattagtcagtcttgtttgctgttgtaaccttagcacccagcaacaatattagagaaagcaagcccaggcctcgattggcaggggtggcctggtgctgctgatgcagccgggcaccccaaccgttgggagcctgcaggcctcaccatggcaggagatgcccgttctgggtcctgggcctgctctgtggcctctcacagggtttttttctgctccttcagctcagaacctgaggacccagacacagagcggtcggccttcacggagcgggattctgggagcgggctggtgacgcgtctccacgagcggccagccctgctggtcagcagcacaagctggacaggtctgcacgaccactggggcacttggggttggtgtgaagggcacctggccaacctgtattctcctcacccctgccagtcctgcatgccccaaccccaccacggtctcagtgagaaggggagggcgtgtgagctggaagagtggtgtctagaaacaggcccctgacattcaattcttctcatagaggacgaagacttctctatcttgctggcagctttagaaagtaggtgtgtggctgcggtgaggagctctgggctcrtcggggccactgagctgtgagctgcttgcctggtctgcagcatgttcctgtcctgggctactgggtggggcagcctggggacagtaggggtggtggaggtgggccgccctgaatccccagttgggtcattgagtgaccaggccctcaggctgaaatgycccctccaggagagtatctcacagaggctggtggcctccctgccagagcagtgcactttctccacctgaccaggggactctggctactgtttatttaaaaatttttttctgaatgggcatggtggctcacacctgtaatcctagaactctgggaggccgaggcaggcagatcacctgaggtcaggagtttgagaycaacctggccaacatggcgaaacctgtctctactaaaaatacaaaaattagctaggtatggtggtgggcgcctgtaatcccagctacttgggaggctgatgcacgagaattacttgaacctgggaggcagaggttgcagtgagctgagatcatgccattgcattccagcctgggtgacagagcgagagtctgtcagaaaaaaaaaaaaaaaaaaaaaaaaattaaatcagaaattccatgtagaattgtttctttttttaaacacagagtttgaacaactgactcttgacggacagaaccttccttctctcgtctgtgtgataacaggtactgcctgggaccctgggtgtctgtttggttgggggatggtggagggggaggggcacacagcctttaccctgtgcttcccacgatcttgtctccttaatcctcactgcagctctctgccatagggtcttacactgcttgacatgcgggaaactgaggctcagagggtttcacagcagggcagggagcccagatttgaatctgtagataccaagctttctactttttcagtagtttccaagcatcttttttttgttgttatgtcattggtgtcttttttttttttttgagacaaagactctgtcgcccaggctgggatgcagtggtgcgatctcagctcactgcaacctctgcctctcacattcaagcaattctcatgcctcagcctccagagtagctgggactaaaagtgcccaccacacccagcttatttttgtatttttagtagaaacagggcttcaccatgttggccaggctggtcttgaactcctgacctcaggtgatccacccgccttggcctcccaatatgctgaaattatagatatgaaccactgtgcccggccatgtcattggtgccttaaccaagcttcttttaatttttcaaacagaagagcccctgtcccagttactgctgctgagccctttcaagatgattcagtgaggagggagaaaagcggaagcggtgtgggaagaggcggggtctgggccagctgctggtcctgctctcctccctcctctggcctctaggctcccaggactggtttggaacccgcgccrtgtgctctggaggctgtggcagggcaggtgcggcttggaacccgcgccatgtgctctgggggctgtggcagggcaggggcggcttggaacctgcgccctgtggtttgggggctgtgccagggcagagggagtcctcttgtcccctgtgcacaacacagacagaaggctgggcccacccagtgggtggtsgcgtgccaggccagtgcttaccccgccttgtttgcagcccgaggccagctggttgcaggtgcagggctatgcatcaggggtcagggtgcacayacccctgcaggtcttggggctcctgagttgcttctggaaaggcccagatagggcctgactgcagctgccgaggggtggagcttctgggaaaaggatccctcctaggggggagtgtcttgggcctggggctatgtggcagggacagagacgggttcatggcagtgtctgctcttctctgtgaaggcaaagggcctctgagggagtattacagccgcctcatccaccagaagcatttccarcacatccaggtctgcatcccctggctggagggccgaggactacccccgcttctaggtgasaggccagcaggaggctcagggaggaggcggggccttatgcagggggaacaggggtgggcggggtgtaccttttctgaaaaggtggctctggaggccacttggggacaggacmtgggctctagctgaactcccgggagaaggctacttcctggtgtgccagcccctccctgccaggtggccccagaggccctttaccaaggggtttgaggaagccacgtcctttcagcctgccacgccctccattcagtcctcttccttcctgcaagagggctgggcctggggttggggccactgttgcccaggtgtgggagggcagtggctttgggaggtacagggacgatgagtcagacagcgtcgcctcaccagtgagatggttctcctttgcctccgtctctttccccattgatttctccaagtggggagtcgtggcttgttcctgatgcgtctctagagccacatcttccagcttcgagtgagcagagctgttggaggctgagggccttttcctggcaggattctccagctagtctttgttttagacagtcttgctccgttgcctaggttggagtgcatgatctcagttcatgcaacctctgcctcctgggttcaagcaattctcccacctcagcctcccgagtagattacaggattacaggagctctccacaacaccttgcttatttttgtatttttagtagagacagggtttcaccatgttggccaggctggtcttgaactcctgacctcaagtgatcctctcgccttggcctccctaagtgctgggattccaggtgtgacccatcatgcctggccccagctaatctttagaaatgtttagctatttggctttattttcacactgacagctggtttgtggtgggtgtgctgtggtttattattattattattattattattattattattattattattttgagacggagtttcgctcctgtagcacaggctggagtgcaatggtgcgatcttggctcactgcaacctcttctttcccaggttcaagtgattctcctgcctcagcctcctgagtagcggggattacaggcacctgccatgacgcttcgctaattttacatttttttttttagtagagatggggtttcaccatgttgaccaggctggtcttgaactcctgacctcaggtgatccgcccgccttggcctcccaaaatgctgggattacaggtgggaggtgaacctgggaggtggaggttgcaatgagctgagattgtgccactgcactccagcctgggtgacagagtgagactctgtctcaaaacaaaacaacaaaaaaatcaaattgtggttacgtagaaaaagtgtcaacttacattttcagatgtcccagccaggccgtgtggctgcttggccagcttaagccacttgtggttggggatgtcgggggccttatccaattttcactcccctcggggggtgttgcctcactgtgctgggaggatttgtgttcccggggcagagaccagcgctctggccacacccctcttgcctagcagggtcggtggacctggatgtctgtctggacacgtcctccagtggcctggacctgcccatgaaggtggtggacatgttcaggtgctgtttgcctgcgtgtgccgtgaacttcaagtggtaggagcagaacccgaattttttctggkgatagcttcacagatccaccgctgagggggaagcagtgcagagtgagctgcccacagtgaggccctgcccctcggtcagtccagcacacactggaggccacgaggaggagccctgcggttactgtggctgggctgagcctcactgaagtagttgcttccatttagagctcatgttacatttaggttggtacaaaagtaatcacggtttttgccattaaaaatggcaattacttttgcaccaacccagtatgaaaaaaaaaaagcaccttaaataacagaacttcactcggggcttttgctcctagagtagaattggcgggaattgcctrcaggcttacatggttttctttgtttctttctctcccaccatgtcccttttggccaagctcacgtggtgggtttgaatcagttaaatgagtgtcatgctgtggcctcactccacccagcatagacgggtgtttggaagggtggagttagaggarattctasaascagtagccccagcaaaagttgmgcccttggcccctgctcaggagccggcccctggatgggattcagggatgtgagcctctcgtgtgagctgagctgagggaatgtcgggatcaaatctggtgtcctaraaaagtcatcttttatgtgctgaaccagtccccagggggttgcctttacttgttccttggccatggaattaaraaaaacatgcaaaaataattcttcagtccttgaagagcatccagcacagaaggtacaaaccttccttaaggctctctcctcaaatcggtttgaccattttgatgtgcaccccccccaggcttttatacccttcaratgccaaatctaagaaccacctcccagaagccacacaccctgttccaacccccagcctggcttgagcgtggggtgggtgggagcccasctgggcaccccaggggtctaktgtcttctccaggaaactctcgggctccttttgttctctctgcagtttacatgagctggtgaaacatgaaraaaaccgcctggtctttgaggactcaraggaactggcagctcagctgcaggtagccatgtctgccaccacgccagggtggacagggttctggaractggcaccgagccatgctccctgatccctgtttcacacagccagggtgggaccatgcggggtctggcggaaaagctagggagggagcagaagtcacagaggctggcctactctgctgtcccatttcggtacagtaggctcggtaaagttaggacacaaccccacctgccctctagatttatggagctgagactccacaaatgatgctggagccgggtgggccaggctgcagtttaggaagtgatcaggatcaggtagtgcgtgggctaagggaacttctgggaccagccttgaaagatgggtggaattctgcaaaggttacttgtttcttattgcaaaaagtaatacatcattcttgtcaacagaatgattgggaggattttcagtaaaggtccaggtcagaagtcatttagactgggtcccccagtctctgtcagaaccatggtactctgttgtggtgtgaaagtagccacagatcatctgtagattaaggggtgtggctttgttccaayaaagctttatttacaaacacaggctgtgggctggmtttggcctgcaggctgtagtttgtgatccttgattcagacagtttagcaaggctgaaaagaacsmcwccttgttacccacagatgggtgggactgtgttggccagaggcyragaggagggtgctcrcaggkgaacgkacatcaygtagaggccggraggtgctccagggcaccaagtgtgggaaagtgggacatacggggaagtttccagaaagcatgtcaagatggaggcggagcgctgctggggtgtgaagggtctcaagtccaagtgagggagctagggacttgggagggkttgttgttgggtcggggasctggggtcakccaggtggtgacctgggatggggtggggacaggcaatgaggtaagctctgctcttcagtattttgcagatgcttttctcaaactttcctgatcctgaaggcaagctaaaccagttccggaagaacctgcgggagtcgcagcagctctgatgggatgagagctgggtgcagactgtgctccctttggttatggacacataactcctgggccagaggctaaaaccccagggcccctgctgtccttcccgcagyttcttyttggagtctcagggcaaaccctttcaagcagcgcctcccagtggccagaagctgaaatgacggcagtggtgccacctggtgaatgacccgggaagctgtggttggccctgatttcttctttggagtctcagaaatgcttcctgtcttcttctgttcttcacgccccatgtccctgctagcgtattactgttctgtgacttccctgtgacctctgcagtactcctcatcctgcatttggtctccaggtgtcacctttctgccatgttcctaacactttgattcctgtcttgagaaaagcacctgctgcaccayaagcccagggatgtggcagctgcagcgggcttggctttgtgaggaaccgagtgtgtccagggatgtggcagctgccgcgggcttggctttgtgaggaaccgaatgtgtccagggatgtggcagctgcagcgagcttggctttgtgaggaaccgagtgtgtccagggatgtggcagctgcagcgggcttggctttgtgaggaaccgagtgtgtccacgttgggggaacrtcatacttgatacacacgtttttatttgcacaaagaaaatgctatttttggagccagaattttcatgtctgatttatggtgattttcttaagaaccagaactgctggcagaaagggggcacccacatgcttagatagccgatgtcttattagagggcagattgtggttcctgatttggaatttaacattctccaaacattccagtccaatgaaagttttatccgctttcccatataaaaattcttcccacgagagtgatttgattctaacaatcccgttggagtcgtgtatgagtcctacagtgtgaggttcagcattgccatctccaagtgctctccatagggaaacagtttctggtcatgatgagcttccgcttcccatctgatcccagcccagcctggaaacagagcacgtgtttgaggatggcggtgtttggggacaggacatgagcgtattgtgtggggctgctaggacaggcctggcggggtggggagtgtctaagtcagtttacttggttcacaggttcccaggcccacccaagtacctagaattggcctccaggaagggaccagaaatctggttttacatagaaatggctagcagcaggcaccatgcagctgtccactctctgcccgagtctgccccagcacgtggcacagcaggacagaagcagagatctgaacccacatctacctggctgttccatcaacccactcttcacaaagcttagaaagtggccgggcacagtgtctcatgcctgtaatcccaacactttgggaggccaacgctggtggatcacttgaggtcaggtgttcgagaccagcctggccaacatggtgaaaccccatctctacaaaaatacaaaaattagccaggcacgatggtgggtgcctgtaatcccagctacttgggaggctgaggcgggagaattgcttgaacccaggatgcggaggttgcagtgagccgagattgtgccactgcactccagcctgagtgatagagtgagactccatctcaaaacacacacacacacacacacacacacacacacacacacacacacacacacgcttagaaggggctggtgttctcataagcacagatgtctgaagagccattagccagaatgattcttttttttttttttttttttgagatacgatcttgttctgtcacccaggctggagtgcagtggcacagtcattgctcaccacagcctcgactcctgggctctagcaatcctccgacttcctgagtagctgggatgacaggtgcatgccaccatgccagtattttttttattttgtagagatggggtcctgaacgcatggccttaagtgatgctcctgcctcagcctcttttattattattttttagatggagttttactctgttccccaggctggagtgcagtggcgccatctcagttcactgcaatgtctcccagattcaagtgattctcctacctcagcctcccgagtagctgggattataggcgtgcaccaccacgcctggctaatttttgtgttttcagtagagatggggtttcaccgtgttggccaggctggtcttgaacttttgacctcaggtgatctgctcacctcagcctcccaaagcctcagcctcttacagtgttgggattacaggcatgagacactgtgacccgggatgattttcaatcacggttttttgttacgagtggaaaatgcatatttataaaaatgaagtagtacagacatgaacgtgtagcaatctctataatcctgccatccaaggatggcacctgttaacgtgtatatcagggatgtccaatcttttggcctacctgcgctacattggaagaagaagaatcgccttgggccacacataaaatacactaaagctagcaatagctgatgagctaaaagaaaaaaaaatcacaaaaaaacctcatattgttttaagaaagtttacagatttgtgttgggccacaggttggacaaacctgctatatacatgttctaggttttcccctataggtatacctatgtgaaaatgattattttgatacatttttttttgagatgaagtcttgctatgttgctcaaggtggccacaaagtcctgggcttaagccatcctcccgcctcagcctcctgagtagttggaatataggtactcataaccacgtgtgggtgattattattagtttttaaacaaaaatggggctgggcgcagtagctcacgcccgtattcctaacactttgggaggctgaggcagcagatcacttgaggtcaggagttcaagatcagcctggccaacatggagaaacctcgaatctacaaaaaatacaaaaattagccaggcgtggtagcacgcacctgtagtcccagctactcaggatgagtagctgggactacaggtgcgtgctaccacgcctggctaatttttgtattttttgtagattcgaggtttctccatgttggccaggctgatcttgaactcctgacctcaaaaaaaaaaaaaaaaaaaaggttgtggggggcctacaataaatgtaatgctcggcaatgttttttttcaattaaaaaataatgccggttttttttcaagtaagtattttaagaaagacatcccctctttttttttttttggcttttttgcttttttgaaacagggtcttgctttgttgcccacgctggagtgcagtggtgagatcagggctcactgcagcctccacctcgtgggctcaagccatcctcccacctcagcttcccgagtagctgggactacaggcatgtccaaccacatctggctagtttctgtatgttttgtgaagatggggtcccactatgtggcccaggttggtcttgaacacctggggtcaagtagtcctcctgccttagcctcctaaagtgctgagatgacaggcctgagccccacgcctggccagcctcctgtgcgaggttgtgcgggactctgtcatggaacccagtatgtcttcgcgtgctggcttgtttgttggctctgtagttaacgggctgccccacgtggacaggcactgggtcgtccatgtctctgtgtgcaggcagaggctgctgcgggtgcatctttgcacatggctgccaggaggggctgtgctcagggggagctggggcagagtctggtggcaatggggggcttgggtgtagtgtggaggcactagagccaggtggccgggctgcagtctgcgggagctcgggggtctcttggcctctgtgtgtcctagtgtttttgtcggtgagatgggacaatgacagaacaccctcacaggtgctgggggctgaccaatgtcaggtctcaggacagtggctggcccactacggggccagttgcccttctctatagtcaccctgctcgtcttccatcaactgggtgctcaggacagtggcgtggtggatccgcctgtacagcctgtgctccagcatcctgcaggccacagctgtgtccagccctgaccccgactgcccctcccaccacctccattttatagatgaggaaaccgaggcccaagggcttagggaaacctgctctgaggcacatagtagggctgctgggctcagaccctcccgccctgtgctgagctgccctcctcctgccgcaagccccccacgccccaagcccaccctgctcaccggcctctgcccgagttccccgcatggtgtgggagtgtggggcatcctagctttttgctggcacccagttctttcacttccactggagtcctgcagggacagctcggggaccatgcaggcccgggtgggcgtgggggctcacctagctcggtggtgaacacctggcacgtctctgggttgcggacggtaaaggccatgtagacctcaggagcccgctggtgctcccagcaggcagccagcctccgcaggaccccgaccagggacacgatggcttctgggcaatacagcacgtctacggtgaaagcttcaggttactgaaagggacaagtggaaagttccagttcatgctgacctcagcagcagggtgaggccagagaggcagcgttcatatgagactattagatgccatttgaccatttgggccattagatggaagggcaattacttgggtgaaaaaggagaacccttagtagagaaagctgcaaaagaccgaagcaaaagaaaaaaatctccagactcactggtgttccttaaaaaaccagctctggttctgggcctatctagagggctttgaatggcagaaagcctgaccctaccgtgaacttcgtgtttcaggtgtctgccgattggtctgctggcttgcaggggtgggcctctgtccctggccaccgctggacctgtgggtttcagggctgggacccaggaccacaggcagagctctgttccaccagagaggggactgagtgtgctggcaggggtgaggggtttttggtggcccagccaaacaccaccttctcccaagggccctgtcctcatcccagaagtggttgttttcctcctgtggtctctgaaggacacagggcatggctctggaacagagccgtgtggtgacgactgtaacgggagtatgcctgtctccaacaagagggctgtggcttgaaggtcaccttaagaggcacccctgtcctttgatgtccccctggaggcccggagtaactcttctggaagccccatcatgtccatgcccgacagcatccactgttcccttttcccagagccaagagctgggtagagctgcaaggacaccgcctgcacaggatgcccggggctgggcattacctgctgtaatgacaacatctggctggaaggcagagagctgatggaccgtcgctacgtcccagtccagctgggccactgtcaccctggggctatctaagttggcagtgatgtctgcctctaatgagaggccattgagaaggacattccctcggagctgctcgaggacccggctgtgacagtcgctgaagatgtatgtccgggggtggcacatcttgcagatggacaggcctgtaaggccggcgccactgccaagctctaggacagtcctggcgggaggaaaggggaccgtgtcttcgactgcaccagggtaagcctgcctcggtgccctgccctgtgccccgaggtcacctgttagtgaaggctgccaggttctcaatgacccattctgcaaggtagatggcggctgccctgtgccccgaggtcacctgttagtgaaggctgccaggttcttgatggcccattctgcaaggtagcgggcagcgtcccatgtgaccaggcctgtggtaccgtgggagatgatggctgtgctcggagagtgtgaccgagccttccgagggctgtaccaagagagggtgagacagtaagtccagcaatcagaaaacaagtggcttagaagacaagtagccatccgccacatggctgaataaaccatgacaggaccaatcgccactcagcaatgagaagcagctaactgttgacataccaacagcttgcacgggcctcaagggtgtcacgcggcatgaaagacactcatctcaggccacacaggattccattcatcgaacattcctgagacaacggaattctggcgatggagcacaggtcagtggtggccaggggccaggtgtggctatgaaggggtggctgccttgtgatgattcaatatgctatgtttttcctttgtggttttctgtatctatgctttatcttatttttttttgagctctgtcacccaggctggagtcagtggcatgatcttggctcactgcaacctctgcctcctgggttcaagcaattctcctgcctcagctgcccaagtagccgtgactacaggtgtgtgccaccatgtccggctaatttttgtacttttttttgagacaaagattcgctctcattgccaaggccgtggtgcaatagcgtgatctcggctcactacaacctccacctcctgggttcaagagattctcctgcctcagcctcctgagtagctgggattacaggcgcccactaccacaccccgctaatttttgtatttttagtaaagatggagtttcaccatgttggccaagctggtctcaaactcctgacctcaggtgatccccccgcctcagcctcccaaaatgctgggattacaggcatgagccaccacgcctggcctaatttttgtatttttagtagagatagggtttcaccatatcggccaggctggtctcgaactcttgacctcagatccacccgcctcggcctcccaaagtgctgggattacaggcgtgagccaccatgtccagccctgtcaaatattctttgaggactgggcaccaggtccttgtgaagcaggtagtgtgtgtcacctattggacaaatacccaacaaccccacgagacatg

SEQ ID NO: 94166 - DNA, 31456 bp, Homo sapiens
tgtttaagtgttccaggatgtgaatctgcaggtgcatgtgtgtgcatgtacgcatgtgtgtgagtctgtgtatatgtctgtgaccttggtatggggtctgggctgtagaaaactatgtggacttgggcacacagcaagtacacattacagaacttcagcttggccctcatagccactagctaatcccactcttgtttttccacatttgaccagcattttcccagtgatcacaactgttatccaaaccaaatcctctttgggagcaacttctctaattttctattcttgcctgggaaagttaaggccactggctgtgagtcgccctcctccaccaactgctccctgggtgcccttatgtgctttttttttttttttttttttttttttttttttaagatggagtctcattctgtcacccaggctggagtacagcggcgcgatctcagctcactgcaaccctgcctccagggttcaagcaattttcctgcctcagccttccaagtagctaggtctacaggcacgcactgccacctctcccggctaattttttgtatttttagtagagacggggtttcaccatgtggcgaggctggtctcaaactcctgacctcaggtgatccatctgcctcggcctcccaaagtgctggggttacagtcatgagccactgcagccggcccttatgtgcttttctccacagtccaagggataagcaccctctgatctcatacaatttcacctaatctctcttgttctcctttcagaatctcaaagctctccctattagcatctttctgattccaaacattcacaagtctctgctttcttggaacaattaatgaaaccagaagccagcccctagggtagcttggcctgtgccctctgaagcttgtgcaggcacagaggctggtaataggccttgggctggaaatctgaggctggcgtgaggctggcgagctgttggcaaagcaagaagaggtagctgcatttgaaatggcctgcacccccagaatttgttggggcaaaggatacctaagtgtttcccgttgatcagatatggaccaggcaggggagaaggccaactagtagctattttactcatttatttttattttattagtattgcttttctgagatggagtcacgctctgttgcccaggctggagtgcagtggcatgatctcggctcactgcaacctctgcctcctgggttcaagcaattctcctgtctcagcctctccagtagctgggattacaggcgcccgccaccgtgcccaactaattttttgtatttgtagagatggggtttcaccatgttgggcaggctggtctcaaaactcctgacctcaggtgatccacccacctcggcctcccgaagtgctgggattacaggcgtgagtcaccgcacccagccgagaagccattttaaaggaactttgcccaagagggccaccgagagggaaaatggaccaatggcatgtggtggaggattccagaagccaggggctgagggaggaattgaagcagcaagactgagatggccacctgatcatgggaactggaggtaagaaagacccccagaagcactgcatgggagagtcagttacaaattcccatcaagctgagacagtaacaaggccagatgtcgaaggggcttttcttgccccatctctactctcttataaccccctccaccaacacaggatgcctcagaagccatagttggcctgggctggggtgggatggaagaggaaacaaaataaacagaagtcaactactgtcctcctcaaatgtgggagcccaaagaaagcttgagaggggaagagaagcagctttacctttgaattaaattcctagttttgattattaacatgaactggacagtaagtctgtcctagtaaccagacacaatccaagggcaagcaaagatttaaagacagaaagctgctgcatgattgaattctacttcttgactgtggaaaccctgcttgtttaatataagtttcacttgcaaaacaccaagtaaaatcaatgcctaccacacagtgcttcatacagcagccaataagactgttgttaattaccttggtatttccttagagagaggcagataggagctgagtgtgaggctttttatgtttttttcctttgagataaggtctcattctgtcacccagactggggtgcagtggtgcaaacacagctcactgcagcctcaaactcccaggctcaattctcctgccttagcttcctgagtaactgggaccactggcacataccaccatgcttggctaatttttattatttgtagacagggtctcctgtgttgcccaggctggtattgaactcctgggctcaagcgatcctcccaccttggccttccagaggggtggaattacaggcatgagccactgcactgggccaaatgtgaggcttttctagcagtcaagttgtttgggatggcccaagtagaaggcttgggaggtagcgagttcctcttctgtggagatgaggacttgggagggatgtggaggaaactgaattccagatgtgggagggagcctgacaatctgtgattccagtttattgctcatggtctcaactctccccctctacagaggtgacttccgccctggcctgagtttcaatcccacagttccttttttccccccttaaatgagacatatcttgctctgtcacccatgtcagaatgcagtggcacaatcatggctcactacagccttgacctcccccgatcgcctgagctcaagcgattgtttcatgtcagcctcttgggtagctgggactacaagcacacaccatcacgcccagagaattttcgtactttttgtagagatggggttttgccatgttacccaggctggtcctgaattcctgagctcaagtgatcgtccgccttggctgctcaaagtgttgggattacaggcatgaacacggcccataccactgaaaggtctatatggacaactcagcataactcccaattaagcccatctaaaacggaactctttattttttctcctctcctttggtataacctcctttatttttctcctctcctttgtataacccgacttccctctttatgtattttccacacctctttctttcactcctcaaacccagatgagcacagactgttacccattcttcccatgagacttctcccacactggccctacccactccatttctatggccaccaccgtaattcagacctttgtcatccataaaatagattcctaaacaatctccctgaatagattcctaaacaatctccattttttttttcctgggaattcttagcatacaaggtcagtctaatcttcctcaaacacagttctggcagtgtcacaaaagcctgattggccaggtgcagtggctcacgcctataatcccagcactttgagaggctgactcgggcagatcacttgaggttaggagttctagaccagcctggccaacatgacaaatccctgtctctgctaaaaatacaaaaattagccaggtgtggtggtgcacacctgtaatcccagctacttgggaggctgaggcaggagaactgcgtgaacccggaggtggaggttgcagtgagccgagatcgcgccactgcactgcagcctgggcaacagcgtgaggctccatctcaaataaataaacaacctttgataaacacttgcttcccaagaaatgaaatacaaacttctcagctaacattcatgggaccggcacaatctagtttttcccaacctgctgtttccagctgtacctaaaaccactcaactctccacaaattcactgaggccctttcagcccagtcgcatgttggacaaaaaaaacagaagaaagacttagtacctggcaagacttaatacctggctctgaggtgctctcagttacaagacagaggagtaaataattaccagaagatgcagtcagtgataagataaacaaaggacactgcttgccctaatgtccccactccaaaataaatgatctattcactgtcccctgaatactggcctatgcttattttttcccgctaggattttatttggccttttttctcctcctttcctgtctaaacatttcccattgttaaatgctcaggccctagtgcccctcctttgagaattctgattccaaggcaagggatctttccctcctctggagttgaatgttccattgagaaacacctactcttccagcatgtctcagcttatctgctgtgtgtgtgtgtgtgtgtgtgtgtgtgtgtgtgtgtgtgtgtgtgtgtgtgtgtgtgtgtgtgtgtgcgcgcgcgcgcgcgcgcttttgagacggagtttagctcttatcacccaggatggagtataatggcacaatcttggctcacagcaacctccacctcctgggttcaagggattctcctgcctcagcctcctgagtagctgggactacaggcacacgccaccatgcccagccaatttttgtatatttagtagagatggggtttcgccacattagccagtctggtctcaaactcctgacctcaggtgatctgcccgccttgacctcccaaagtgctgggattacaggcataagccaccacacccggcttttttttttttttttgagacagagtctttctccgtcgcccaagctggagtacagtggggttatctcggctcactgcaacctccctccacctcccgggttcaagcgattctcctgcctcagcctccggagtagttggggctacaggtgtacaccaccacgctgggctaatttttgtatttttagtagagatggggtttcaccatgttagccaggctggtcatgaactcctggcctcaagtgatcggcccgcctcagcctcccagagtgctgggattacaggcatgagccaccttgcctgggggtgttgtttaattttaaaaatatgtatcaggccgggcgcggtggctcacgcctgtaatctcagcactttgggaggccgaggcgggtggatcacgaggtcaggagttcgagaccagcctgaccaacgtggtgaaaccccgtctctactaaaaaaaatacaaaaaattagccaggtgtagtggtgcgctaatcccagctactcaggagaatgaggcaggagaaccacttgaacctgacaggcagaggttgcagtgagccaagatcgcgccactgcactccagcctgggctagagagactccgtctcaaaaaaataaataaattcatacatttaagtaataaactcattgtgagcaaggaattctactcgactttctgtctgcgtaaactctacaaatccacttggcctcagccacagtgtctttattcgtaaagcagaaacagtgggaccgtcagagcactgccgggcaggcgagagaagacaggaactgtatgaccacggaagttgttgtccctacaacctatttgctcatctggaacacagaatagtggtcctctaaagcttgcagggctggaggtcgccattatcagcagtggtgtcactaaacctgaacccaagggtctctgcaacttgggaaacgacggcccggatctgaggagatggccccttcctcccaccccgcctaaggactctcagcctccctgaccctacctttccgatgctcagagtcccctctggcctccaaggacagaaggaatgggtttggctgaggtcgggggctcgggtctgggacgcgctccacctccccggctgcgcgactatggccaggctccctgtcggagcctctgcctggggccccacctggaaaaatggctcctctaaggcgcttccagcctaaagcccgtcctcttccacctcttgggtgcagactggccctcccactccgaccgcaggtcccccaccggccacacagacggctacgctagaacccagccaaacaccggggttgccaggatggtcccacagctttcctttccgactcccggaagtggccgtgatctcacgagatcccggaggcgagcgcgaccggaagtccggtcactctcgcgaggccccagagagcaggcgctgggcagtgtggaggtcgttggagtcacttccccgtcaccagctcctgtgcctgccagtcggtgcccctcccgctccagccatgctctccgccctcgcccggcctgycagcgctgctctccgccgcagcttcagcacctcggcccaggtaggccagacgaggggcggcctgcaggcggagkccccccggcccgggccacgtgcgtccccggttcgcgggcagctctgaccctctccaggccagcctggaccgcagggatgcccggcactggctggagactgtggcgcccggggcaggccctgacactggcctggaggtgcgggggagaaagccggggaaaarggggcgaggtagtcccgctccagggccggtccatttgtcagggttcccccaggtctcccagattkcccagaggacctgctcttggcttgcacgccttcaaggttgggaaaccagggctctgcatctgaaagtaaacttasgtttttttctgcagcgttccattgctttgacgtagctaatctccttgcagcatccgtgtgagttgtgcgtgaataaaagaaatcgtatacttcctaattccatagtatggacaaaccgaggctagagaactgggccagggttacagtcatttggccagaggattagaattcagcgcttctgacctgaagacggcttcctcttaacctttttggaggatctctcctgctgtgggcggactgagcctgccgccaggtgtcttaacagtgcttgacttggcccgcgaccacttaagcctaggagcctaggctatttttagccatcttctagaatggtggttcttaaactctgcagtgtgtcagaatcaccagaaagctaataaaaaacagacgtctgggttcattgaagaagcttaagactgcgggggggggggggtccgcatttttaccaggtgaatctaattaaacctaattttgagaacccaggaggtgctcgcattgccttttaattacgacgcccaagagggaggtaattttaaaggggaatccaaatttatcatcgaagttctcgagtttcctgtacatccagttcatttgaaaaataaatacaaatgctcctggattgatggctacttcccatacccatcgcaagttggtaatatcctaagtcaaaaggcgagtttaactttgtgtattttcaacttgcaatgggttcccacaggcaaccccattgtaagttgaatgtaccaaatgcttttgcgctrcggtgaagtgggggcccagctgtatacagataagtacattaagtacctgtgcttgccaacaactatgctgggtgctgcaggggataccaarataagtgagaagtgacacttgatatgggacaggaatgagtaaacttaggacaggtggaagcgatgaaggtcttagggaatgagtaaacttaggacaggtggaggcgatgaaggtcttagggaatgagtaaacaggacaggagggatgaggtgtgggggaggggcagccaaccaaagagaggacaggggtgtccagggagaggttgagttttggtaggaccttcagatatccgacatatttattgagctaggtactggaaatacagcggtgaacaaaacacagaagtccctgctctcacggaaattactagatattttacttattgccccactcattataaagtatcttaaaatagtgatgaacatgcaagaaaaatggggattgtagggtgcttgtgttagggaagagggtaccaattttatttactttttttgatgcagtgcctcgccctgtcgacaggctggagtgcagtggcgtgatctcggttcactgcagcctccacctcccaggttggagcgattctcctgcctcagcctcccgaatagctgggactacaggcgcgcaccaccgtgcccagctaatttttgtgtttttagtagagatggggtttcaccatgttggccaggatggacctgacagagtcccactctgttgcccaggatggagtgcagtggcgccatcttggctcactgcaaccaactcttgggctcaagctatcctcctgcctcatcctcccgagtaggtgggaatcacaggcaagggctacgacagctgggtaatttttgtagttttagtagagatggggtttcaccatgttggccaggctggtctcaaactcctggccttaagtgatccaccctccttggcctcccaaagtgctgggattacaggcgtgagccaccactcccagccgagggtagcagttttacatcagccagggtaggcctcacgcagagtgagatgtttgagtaaagtctgaaggaagcagagatcacatcatatggaaagagtattgcaggtaagggatatgtctcaggatgtagctgagagcccttggagaagcatggggcatgccttgaaggtttgagaaaatgaggctagggtagttccagagaaggcagtggaggtaacagaacaggccttgtaaaactttggtattttctcagaaatggggcggccagttgagggttttcagctgcgtaatgacttgctcttccttccattttaacaagatggtcttaggagtgagagaaaggtaggttaggagttcattgtggttatctaggtgcargtggtaagaaatgattgaattctgggtattcattgatggtaccagaaggatttgctgatgtgtgattagataaggggtcggggatgacaccaaggttttgggccttggagttgggctgaaataggcaagacttatagaagagagtgggtttaaccagggagaagatatcaggagttcagtttttatttatttactgagagtctcgctctgttgcccaggctggagtacagtggcgtgatctcggctcactgcagcctccgcctcctgggttcaagtggttctctcacctcagcctcctgagtagctgggattacaggtgctgccaccacgcccaactaatttttttttgtattttcagtagagatggggtttcgccatgttggccaggctggtctcaaactcctgacctcaggtgatccacctgtcttggcctcccaaggtactgggattatagacgtgagccaccacacccggccaggatctcagtttttgatatgttcaatttaaaatgcctgttgggcatacaagcgacattgttgagaaggcagctgatgaaagcagaaagaaagatgggcttgagcccatggtgcagtggtctccagactttggattttttttttttttttttttgagacggagttccgctcttgttgcccaggctggagtgcaatggtgcgatctcagctcaccgcaacctccgcctcccaggttcaagccattctcctgcctcagccttccgagtagctgggattacaggcatgcgccaccatgcctggctaattttgtatttttagtagagacagggtttctccatgttggtcaggctggtctcaaactcccgacctcaggtgatgcgcccatctcagcctcccaaagtgctgggattaaaygcgtgagccaccacgcctagctggatcctgtatctttaacagtaaaagcgtaggaagcacatagccccaatgtatttacttataggtatatgtactaatatatacattacaatataaactcaagtagaaattttaaaacaaaccataacacgttataaagtgttaaaacttataaatraaggcagtgttaacatatgtcggttttcaacacagttgccaagcagtgtgctgttgatagccactctgccacccagcaaaggtcagcgggtctggaagacagctctttgacaaggagatcatgatctaacctccgggccaccaaagattttcatctcattgcaaagcatgtaaagattatactacttaaggattgtggttttgtaaaaattaagttggtgacatcctgtaatatacaaacagtgacatcaccttgacaaagtgaaagcaaagaaaccagtgaggcagtcttcttcccctccctcccccatgttgtgttcaccttatgtacacatgggacccatccatttaagcacsctagcgagggcacaggtcggtccatttcttggtagagattaattctttgttagataaagatagagacagtctgggcatggtagcttacacctataatcccagcacttgagctcagaagtttgagaccagcctgggcagtgtggcaaaacctcatttctacaaaatgagtggtgtgtacctgtagtcccagctacagctaaggtggggaggatggcttgaaccgaaaatgcagaggttgcagtgagccaagatcgcaccactgcactccagcctgggtgagagagggagaccctatctcaaaaaaaaaaaaagatacactcattgcagcagtttcatcctccaccctggtgggattgtcttggccactcccctgtggaaccactgccctggctgagtgatggaggcatgaaagctttggaagatttttttttttttttttttgagatagactgttggtctgtcacccaggctggagtgcagtggtgtgatctcctcctgggttcaagcgattctcctgtctcagccttctgagtagctaggattaccggtgcgcgccaccatgtctggctaattttttttattattagtagagatggggttttgccatgttggccaagctggtctcaaagtcctgacttaaggtgatccacctcggcctctcagagtgctgggattacaggtgtgagccaccacgcccagcccagaagatatttttttaaagagatggaatcttgctctgtttcccaggctggaatgcaatggcgccatcatggctcacggcagcctcaactcctgggctcaagtgatcctcccacctcagccttctgagtagctgggactacaggtgyataccaccatgccagcctgagcacgagagtgaaatgattaagactttgattttgggaaagcatgctttggaggtgttgctgagtacctaagttagataacggaatagaatgaagaggaggagcgggttgggagggtggttgagctgccaagttcttcatgtcctgacttgatgtctctgataagaaggaggtggcagaagatggttctagaagtttacatttagtsaacacaagtgccatttgggaccagggatggagggaggggggcaggataaatggacagttgagtttgtggaaccmatggaacgcctaacagaactgggaatgcagagctgggatttgggagtccctgagactcacacaagatgtgggagtgagagctgaagatccagaagtgggtgaggctgagcctgcccgacctcaggttctgagcgggtctgacaggttcaagtttccaggcagccaggggttcacctttaaagcaccaacttgaaactcaaaaacctgtttgaattcaaatgttggttgtatatgcttccacagtttaatttcctgagcagaaacccactgggtaagcgtcttgattcggattttggtttgttkggttttggtttctgataaccaaagcctgttattagctggcctcagctactgtagaagactgtgcagtgatgctgtcaggccccagatgaccacacacggtgccgagagttcccgtgtctgccactttgtttgcctcttccctcactggtagctgcctgcctgcctgcctgccagggatcggctgtgcttctcatttgtgagtttagatcagaaacaagctccctgggtatggctgtaattttggtcagaccttgagtgagacctagaggggaagagtgccttcgaataacgggagtgattgctggatgcggggccgggtcactttcaccccatcactttcctaactgttccaagctgaaatgcccagggccagctgctactttgctgcctgttcttctgattagcctggtatgaaacagtgattctcaaactgtttggtatcaaaatcatctggggaaaatggcaaaaatgccaaggcctaagccccatcccgcttccaggagcctagtcctgagtgggcttcattagctcagcaggtggctctgatgcacacctaggctggagaaccagtgtgagatactggagccsgagatgacagatctgactcaccaggagggttggagtctttcgcaacgtacgtaaccccttccacctcttgttaggcagctcctygtcctgcctgaggctccagccacaagtttgctgcctggatgaatcttctctgattccccacccctgcagggagttgattgccgcaaccccatctgccctcttgcacaaggggcttctgtgacagtgttctccctgctcctaatgcatctcattacctgtctcctacagagccagcagggatcttcctgcaacctcagttaccgggagggcctgttgctaggcactcagtgtgtgtttatagtttataaagctgcaggttgaagggaaggctgctgttaccagtccagctgcctgatggagtccagcttgttcttcatctttcaggagggttttgaagtaccctgagtatcacagactctacagacataaattctccccatttgaaagtggacctttggaatgaaggtcctgaattcttccagaatgagactgttacaaatacaatgattgtatcttgctttggcaactgcagtaaaaagaggcccagtgcaacattataggataccatgtgaatccttttcatgctcatttcctcctaagagtcctttctctgtgcctctttttagaacaatgctaaagtagctgtgctaggggcctctggaggcatcgggcagccactttcacttctcctgaagaacagccccttggtgagccgcctgaccctctatgatatcgcgcacacacccggagtggccgcagatctgagccacatcgagaccaaagccgctgtgaaaggtactgggcrcgctgaccctggagacttgyttcctgtccccagtaggccaggattcgagttttgagtaagattcttagatgaaactaaatgtttagagacgggggtttctctgttttaaatttaaattttacaagtgattacacccttttagacttggcgtctataaaaattgaaacagcggtgtcttttagaaatgtgaggtagcctaatcatcccattttctactttttctaatttgaaaagtagtatgaggatggggaagagggaagtgtcagcaacctctggtgaggatttggggacagtaaggtggtggtctcagctgcgggccaccttccctccaccccagggttatcttgccagcttctcaaaaagcacggcctctttgggaaacctccccgtctgtggaaggcagtgtcggatattcagtaaatgttgtctggaaaatgattcactggacttagtgcagtggcttatacctgtaatcccagcactttgggaggccaagtcaggaggattgcttgagtccaggagttcaagaccagcccaggcaacatggcgagacccctatctcaacaaaaagtccaaaaatyagctgggcgtgatagtgcacacctgtggtcccagctacttgggaggctgaggtgggaggattacttgagctcaggaggttgaggctacagtgagccctgattacaccactgcacttcagcctaggtgagatagtgagacmctgtttccaaaaaaaaaaaaaaaaatttcataaatatgcatatttatatatgctgcttatttaaccttcacaatgtatcaacatttttgcatgtcaccaaattttttttttttttttgagaccatgtcttcctctgtgtcccagatggaatacagtggcacaatcttggcttactgcaacctccccatcttgggttcaagtgattctcctgcctcaacctcccgagtagctgggaccacaggtgtgcaacaccatgcccagctaatttttgtgtttttagtagagatggggtttcaccatgttggccaggctggtctagaactcctgacctcaaatgatccacctacctcggcctcccaaagtgctgggattacaggcatgagcaactgcgcccagcccgaattcttgataaaattattcttaaagctgtaatttatcatttatgatagctctgctgttgaccattggctgtttcctgtttgcttctgtaaatataaatatattaatgtaagttgcagtaygtatctttatctttacatcttgttkaagtcttagagttctaaacacagaattagtaggtatgaatatttcaaagcttttactataaagttccaaattgctgtccagaaagattctactgatttctttcccctctgacagcgtatgcgwtaccgtgtctgatggtgtttacatgagtcttaagttggtgtgaacagctggggaggctgcctggcaaattttatgttcgtgcaccttccagagttctctgaatgggttgcccattttcttttgggctgtatattcgggttaagaaggctcctgcattaaggaaaaagtcaagatcgaagcagattttggatattgtagcaaatttccctgaaatctttgaaaacatactttttccttcagatgataggagtaaacgaaatagtaatatttagagtctttcagcacaggacrttttctttcctggccttcagtgccttctgatcaaggagtttgggctggcacagtgggtcactcctgtaatcccagtactttgggaggccaaggtgggtggatcacttgagttcaagagttcaaaaccagccttgccaacctggtgaaaccccttctctactaaaaatacaaaaattagccaaatgtggtggaccatgcctgtaatcccagctactgaggaggctgaaacaggagaatcacatgaagccgggaggtggaggttgcagtgagccaagatcacaccactgcactccagcctgggtgacagagcaagactccctctcaaaaaaaaaaaaaggagttttcatcaggattgtggtgatggggaatgagcagctcctctcattctaactggaggccaagtgtgacttacaatgctcacgagtaggatgaagacaagcagtggctcagttcgcttttgtggaaacctggagggctgacccattctagctggggcctgggcaaggagaggctggggaaagcagggtagaaggggagggttcctgccacgggaattgtcagctcgcagggcagtagtcgtcaacagaaggaagtcacgttacaggcagggcttctagcctttctcgaggccattagttggccttaaggccagggctgaactttccaggcctctctgaatcagaaacggtgacatttctcttgtggggtgtttgttctaggctacctcggacctgaacagctgcctgactgcctgaaaggttgtgatgtggtagttattccggctggagtccccagaaagccaggtttgtgtttgaaagccttgtctggtacctccccacgtgaagatgtggggattaaatccatttcctattaaaaatggatttaatctggttgctttgttgtaggaaaaatgtcaccagctcccctttcctgtggggtaaaggtcacatctctttgttggcctgggrtcaaagtcgtcttgccgttcccctgtgcctctgtgcacggacgcccttccctcttctcagtcccactctaccttgggggttcttaataaacctcgacggtccttctcagatgttgtcctcccctgctccacccatgcagacctcgcttctggcactcatcatgctggatcatttaccctgcaagagggactgacttgaaacggggaccttgagtggctaaatttcctgtaacagctggcgctcagcacatgctgcctgtctggaaatttgtggtgttctctgttaacatctcatattggatcatttccaggcatgacccgggacgacctgttcaacaccaatgccacgattgtggccaccctgaccgctgcctgtgcccagcactgccckgaagccatgatctgcgtcattgccaatccrgtgagtgtggcagcacccggctcttgcagctatggcaggtgtttaggtgctgacagtgcgtgaaaagctcacggtttgcagcaaaggctgctgatgtgctggggggatggggggatacacagatgaaggggctgaaatggagaggtcgggtgcactaagcagaggcccgtccgtgcacttcctaaggactccttccagcatgaactgaatgagggttgtcacagccagccttgtgctgtgggcagaccacgtctctctctgctttagtttccccacctgaagagaagtccattctcaaggctcctttcagccgtgattgtggtggtctcttgattccctttttgacacagtagctcctacttagccggaaaagtatgttccaagagcccagtaggtgcctgaaccctgaaccctgtatataccatgtgtatactgaaccctgtatataccatgtgttttcctaggcatgcacacctgtgataagttaatgcataaactaggcacagtaagagattaacaacaacaactcatagtaaaacaatcacaacaagatactataataaaagttatttctttccctttagtcaggaacttccaccttctcgcttaagggaagtacttaatggcttctctggtttctgtttctccaaattgccagcatcactactcttgcgctttggggccattgtaaagtaaaataaggcaactggaacacaagcatcatgatccctcaacagctgatctgataaccaaaatggctcctaagtgactcaggcaggtggtgtagacgcatgggtatgctgggcaaagggttgacccctgtcctgggcgggatggagccagagttcatcctgctactcaggatggcatgcagtttttttgtttgtttgtttttggctctgtcgcccaggccagtgtgcagtggtgcgaccttggcttactgcagcctctgcctcccaggttcaagcgattcttctgcctcagcctcctgagtagctgggattacaggtgcatgccactatgcccagctaatttttgtacttttagtagagacaggatttcgccatgttggtgaggctggtctcaaacaaccaacctcaggtgatcctcccgcctcactctcccagagtgctgggattacaggcatgagccactgcgcccagccagtttaaaacccatgaattctttatttctgaaatyttccgtgtaataatttcagacctcaaytgactgctggtaattaacacagcagaaagtgaaaccatggataaggtgggactatctgcattctactcaggatttccattcctggtcccctgttgtccccatttcctcattcacacacagtcgcggacacacacacagccaccccaggccccactcactggtttttgcaggtagctgcttactctcggaaacgttgagtgctgcgtcctcactgagagggcggccatggttccccagcttgacctgcagggccttgtgctcatttaacagcagccacctcactgctccttcctggcggagcctgggtcctggtgtctgaggatgaggatcrattggggtgaaggggcagggaccatgatgtcactgagaggcatggatgccagcaggcatgcagagctcgtgctcctggcctctaagggtcctgcgttccccagaagctcctcagggtggtgggtcacaaatagagagctgctattccctttgttggggagctaaccagtgcctaatagaaacctggccattctgtcatcttctggcgtcccgggtgacgtgttcagcactcgccgtgtgtgaagtcatttagtatttatgacttcatgaggttgtcgtttcccccacttacagaagaaaaaaacgggtcccagggagttagggtgacctgcccagggtcatagcacagagggactgagctgccagtggacctgcttccttggagcacacagccgctgtgcactgctgtcccatcaggagtggccctgcagctgtgagtcccggccgagcagaaggtgatccatggaggcatcatcacacatttcagttgatagctgaagggccaccaagggaagaagcatcctctacagcaaagggtttctttgttcacatggtgcggcctgtcctttctggcaggtggcttgccagtacagagttatcagacagggcagtttaatgtggcatctttggactagttagacctttgggaaggtctgacaaaaagcccttttcctgctgtggcttggccctgctctcggaacccagggcaagccatgcctgtctgttggatgtcctaggttaattccaccatccccatcacagcagaagttttcaagaagcatggagtgtacaaccccaacaaaatcttcggcgtgacgaccctggacatcgtcagagccaacacctttgtkgcagagctgaaggtaagggcggcgtgggtgttgctcaggtgacctttctgaacttctcccgccacccgtgctcatttacgggcgtggaagayatgaaggcatgcccaggtcacgtgtcactttggggttttaaatgtttttagagctcgccctcttgatggaagcagcccctgtgtttcctgtgggttccaggcactcggcccaacaggcatctactctggccagtgtctgtctcccggctctcgctgtcttccttctcrccaagagcactgtgggttcacaccttctttgggcttctcagtggctggacttggacggggctcccccagtcctcccctttctccttgcccctgaaaactggtcctgggaggatttacctgttggccactagataaagggtgggaaaattagcaaacatgaagaactgaggaaagtgccagaagtcctgaggtatcagaattgttgttggccctggtccctggcactgacttttttgggttgcccgtggtagctcaccctggagagtccaggcctggccaggtgcctgaccctagggccrctggacggagactgagctgctgggtgtggcttgagctcggcttggtttggtgccagtgccgggcctggagtccttagtgctttgcacagcctgctttcgacttgcttccattgtggagccagcagaaccacttcctttggccccaaaaagtatttctcttgagcttcaggcctttttgttctgatggcagattggaggttatacgtgcggcatggtaggaagtgcacccgcagcacccttggcctccgttttactcccgagtgacaggcacatctgcttctgaggagttagagatgccccactgtaacagacatggcagcacgtacccgagggcctggtagtgggactctgttacaggtgtgggggtcacagagtttcaaaaggcatggccccaggccttagagttccatggaatgggagagacacttgaatcgaagagacagtttaagcctggcacagtggctcacggctgtcatcccagcactttgggaggctgaggtgggatggttgcttgaacccaggagttcaagactgcaatgagctgtgattgcgccactgcgctccagcctgcgtgacagagcaagaccctgtctctttaaaaaaaaaaaaaaaacagtttgagtgagcaggtgagcgcaggtgtatgtccagaggcccccgggattgccgcagtacggaagtggacacaacaggcaggatcccacctcccacctccagaggcgcagcccctggcgtcctggaggcaacagagttcattctcgtgggctctcagggctgggcacaccccaggccctagtcctgccctgcaccatagctgccactagctacatttggctatttatggttaaataacattaaaactatatccctctgccacacaaaccacatttaagatgctccatggccacatatggctcctctgtcctcacagaaagtcctgttaggcagtcctatctcagccttgaagcttcactgttagagttggggacagggtaccttggcccttgggagatcccgtcccccacctccaacagtgaagtggactgtcattacccctggctgcctgacattctggaaatttcctggatcatatcaagaatgcatatcaatccttaaacttccgatggctggttcctccctcatcctctcamccaccatattccctttcaacgtggctccaggacctcccaggccaatgccttgttcccgtttgctgcaaagtcgccttgtcccccgtcttagcatgcaccattggaacatacatttctaggagtcttgtatttgagggcaagcctctggaaagcagggctgtgtcccttcagccccacgtccctggtgaccgtgcagtgcccgcacgtgtgtgcttatacaccaccaagctaagcctctcggatctttggctcccggctccatgaagctgatcctacttttcccgtgygtgaggctgatcctccctctcccagaccaggctcattttccaacctaggactgggctcttcagtggccatggccatcggggcaggtggctgttccctcgctaccattactcccaccaggttattgtccgttttaagaaatacttggttcagccgggcgcagtggtgcatgcctggaatcccagcactttgggaagccaacgcaggaggatggcttgagcccgggagttcaggaccagcctgggcaacatggcaacaccccatctgtacaaaacatttaaaaaacatagattgggtgtggaggtgtttggtacttgggaggctgaggtgggaggatcattgagtccaggaggcagaggttgcagccatccaagattgtgccactacactccagcctgggggatagagaccctgtctcaaaaaataaaacaaaaacctggttcacagattcttgggggtgtggtacctccagtttaagaaatgaggcagccttgaactgtgctgtttggagccataggagtcagtttgttctttctgtcccaatcactgtttgaggtggcagacttctaactcatgggtatcctggaatggatttgaattttgttctgtggggcctgaagaaaagggaacttggattgttctgtgtagggaggagtctgggcttgtgcrtggggagtggagccggctctgggaaagaggatgccaggcccrgggggggcctccacaggaggcagcatcctcccatgcccatccacagtgggcacaaatgctcactatgaaggaaggacttgcgatggcctcgccagacggcggcaagccctcacggcacctgctggcgctcatgctcagccttttggggcaccgtggcaggagatccaagcgcagcaggggctggacagggcctcctcctagctggctctgttccaccctgagttctggggggcttttccagtgttggggctgtgggcagctgtgacatgttttacagtgaaagagcttgttaactcatccakcttcatactttggtcaccagggtttggatccagctcgagtcaacgtccctgtcattggtggccatgctgggaagaccatcatccccctgatctctcaggtacacgcatatgaccytgtgaggggcttcgaggtcaggattccctttaccaggscctgctttgaggtgatcccggtagactggagaaggcctggccaygtgccaggttttggaagggctcctgttgtaggcagccccgcccctctgctgcagggcggtgtcagtcctggagcgaatgtgggtggaagctgctcagggcccagctccagcacgcaaggagaaccactgttgggaacctcaccgggttactggttaggccggagcgggcgaggtgcttttttcaaaaatgagtccagggctggacacagtggctcatacctgtaatcccagcatttgggaggccaaagcgggaggattgcttgagcctgggaggttgaggctgcagcgagctatgatgcaccactgaagcctgggcgacagagccagaccctggcctcaaaaaacaaatgagtaggggactcaccacacttcccaacagagttgatttcacttcgtcttttttttttttatctttttattattatttttttgctgctccttgtggagcagggctaccccataggcagtgtgcccagaatagcatgtcatttttctataaaggttttctttttcttctttatagaaaacctttcccatgccctggtgatgggagggagaggagaggtcgggaatagtgggggtgggaggcagtgggtctggggtcatgggccggaagccactcactgatcccatggcttggcttgcagtgcacccccaaggtggactttccccaggaccagctgacagcactcactgggcggatccaggaggccggcacggaggtggtcaaggctaaagccggagcaggtagagtctcaggcagccccggggctgggtgccagtgaggccctgcgagagctcagggttggggagaaatgctgcttgtccctgggcatggacgatccttttcagtgttgatttgcagttgcctggtggaaaatccctgtgtgagagggcagctcggcctgctttgtggggttgagagtcatttttgagggtggcagagtcaattcyacaccattcatgtataagtaacaagaaatcggggtgctgactgaaattctccactgtcaggctggaaggtgtgcaggtgtcttggctggcggggccggctcacctgggcgtcacgkttgtggcaccagccaggctgacctgtctgtgcccccctaggctctgccaccctctccatggcgtatgccggcgcccgctttgtcttctcccttgtggatgcaatgaatggaaaggaaggtgttgtggaatgttccttcgttaagtcacaggaaacggaatgtacctacttytccacaccgctgctgcttggggtacgtatccaggcgtgggtccttctgactgtggaataagggggcgttccctttgcttaagcctcaggagctctcctggccctttatgcagtaagctcatgtgcctgcctggcgagtgctgttgttttcaagggtggacgcacacccgagaaaaaagagctgggaggatcacagactgtgaagggtgaacctcccagcaagtgggtctccttccctgcagtttgacagcgggtgcccagcagctgcaggagtattgactgataagacactccatctccaggcagcccagggaggcctccctaccccgcctgaacacctccctgtcgctccttgttcatcttgttctgactgcggggggcggccaggcccaattcctcttcgagagtgtgccccatccagacagcctgagtcttcagcaaacagaaacccttaggtcttactcataccccctcaagccgagtttccatttctcacctgtgggcagaaatgaggcagatgtgtggttgccttcatcacgtggccagaaagtaatatggctcactgggccaccccaggacctttctcagagatgctccgatacagaaagatccttcagctatggccccaggccttggtgagagacaggcactcgatggtatagttctgtccccatgtcggtgcaggtgtatggaatggcagggcctgcaggtgagacgcacccggttctcataggcccttgagccaggggaagcagtaggagggaattgagttgaggtgaggactgaggctgttgccacacaaactgtgctcagtttctgcaggtgagacgrtggcagagatgcctgtttttgccaatgtcagacatttacctacttagtgacacctgattcaggtgactgtgacaatgttttcagtcctttaccaacctgcggggagagacaagaacccagaaacaggctctgttggggagaatacggtgaagtgttcctgatgattgagttcctggcgtccaggtgcttgtcgcattgtcctcgtgttcacgaaggtggatggtgcttgttttatagctaaggaaacacatttggaaggtcagtcattgtccagggtacctgcctagacaatcacagtgctgggacccctgcctggcaccctctggctctgagcctcgcactcctgaccgcagctcagtcccacccacctgctcagcaaggcgtccccagcaaggcacccagaacccgcatgtgtagagagactcctcggcagggctgatggagcgacaggtcggggtttctctaacaagcactttcctggaaacttcattttaacatgttcccatctccctcagaaaaagggcatcgagargaacctgggcatcggcaaagtctcctcttttgaggagaagatgatctcggatgccatccccgagctgaaggcctccatcaagaagggggaagatttcgtgaagaccctgaagtgagccgctgtgacgggtggccagtttccttaatttatgaaggcatcatgtcactgcaaagccgttgcagataaactttgtattttaatttgctttggtgatgattactgtattgacatcatcatgccttccaaattgtgggtggctctgtgggcgcatcaataaaagccgtccttgattttrtttttcaaggtcccttctgtaaatgctgtgctttcttccctgtgagagccaactttagagtgtctgctacctcttcattaycaatcagaattagatgatgtttaactgttagactgaagcgtgacgytttcatcagtagcttcaagaaagtctaaattgttaatttatggaattggacacagtattcagtttacccgtacatgctcctcccgcccctcctgttggcacccttgcatcgcccaggcctgattcctcctgggggtagttcacccccacgggktcatagttcagcggcgaatgccaggcagctgttttctggctgagcaaacagcacctttctcattgagcttcctctactgacctctgtcccccttgggatttcatcttctgaccgaaccctgatgttcagtggcagagacagcccatagccagaactgtgggtagaccagggttggggtgtgcggtttgggacagcccaaaccccagccgctgtgtcaaggcctaggacgccrtgctgccatcaaaagggggttccaggtttccatcagtggcctaaagaagggacttcttgttgtactgaggagtgcggaattaaagagatttgactccctttagtattgggggcagtccgttccccagacactgtggcctctgaagtggaaactgaaagctgcatacctgggaaagaacyttctagsaataggcaatggccttcagtggaagagggagggctggaggtgtgcccagtacttggatgttcatctgtccacaacagctttttgtttttttaaaaaagctaaaatggaaatggattttatcataaaggatgacatcgttttcttctacaattaatacatgttcattgtataaaacccaaaaagcagctaaaaaataaagcgggaaagraactactggtaatacttgtcctctcttgcatatttcataggttgagagaatgaagcctgctctgcaggttatctgctactgtaacaatcccagccctctccactctggtggcttttaggctatttctgttcctatctcccgacgctgggggttgacaggactcagctgggtggttacatgcccacagctcccactgcagtcactggaggcttggctggactggagcacgcgaggctggtgtttgggagatgcccggacagctggccttttccccgaggtcttgggcctctcattcttcacaacgcatctacagcaaggtccatatgtttgttgaatgactcagttcccacaagcaaaagcagaagctgccaggctctaaggcttgggctgagaactggcccagcttcgcttgcgctgcattctctaggttagagtaagttacaaggcccccaatgacatgggcaggaaccacacaagggtgtggctgcgggagacctgactctgatggccatttatggagatgagctgccccccacttctttcactgtgtgtatttgcccttgtcacttttctaaatttttctttagagacagggtctctgtcgcacaggctggagtgcagtggtgtgatcatggctcactgcagcctccaacccctgggctcaagcgatcctcccacctcagcctccccagtagctgggactatgggtgcctgccaccacgcccggctaattttataattttttgtagagaccggggtgggggtgaccgggcgcggtggctcacgcctgtaatcccagcactttgggaggccgaggcaggcagatcacgaggtcaggagatcgagaccatcctggctaacacggtgaaaccccttctctactaaaaatacaaaaaattagctgggcgtggtggcgggtgcctatagtcccacctcctcaggaggctgaggcaggagaatggcatgaacctggggggcgaagcttgcagtgagccaagattgcaccactgcactccagcctgggcgacagagccagactccgtctcaaaaaaaaaaaaaaaaagatatcagggtgggaggacttgctctgttgcccaggctggtcctcctggcctcaatcaatcctcccacctcggcctcccaaagtgttgggattacacgcatgagccactgtgccctgccattcttttcacagctggataaccttgagggtggataattcggtgtttttgtttttcactgctgtagagagcagaactctgagcgtggtactttagcattgtttcctcctggtggttctatatgcagagcactatgctggctgtatttggggtacatttgccattttatgggatccttgcaacaaccctgacaggacctgggactcaagctaagtcaggttgtgtcttggttgagggtggtcactacctctctccataaaccaggggctaccccttaagaacctcccagagagttcactcaggatactcccactaaggtgggagtactgcttgagcccaggagcttgaggttgctgtgagctgtgactgtgccactacactccagcctgggagacagagagagacctgtcccaaaaaaaaaaaaaaaaaaaaaaaaaaagcgcatttctggttccatctcagaaattcagctctagcatcctaaagggaggacctggaatgtagaatatcctagattctttcagatgatgatgaaggggcctggagatactggccgtccctgggctattcaccctctagctcctgccttccagggctaaagacgagtcaggtactgagaatccacaagacaaacacagaggaagtaccgtgggactccagaggagggcaaggttacttcatgtcttggcagagcatcaaggaggacttcccctatcaagatctctaggaggagggaaaaggaggaggaggagatggcatacgctctggctctgcaggctgggcaggatttcaaccagcagggagggtgggatgggcgtcataggcagctgccggagcagacaggctgaagagcttgtggatggcaggaacagggcgtcccaggagctgagcaggatggtgacacggtggccaaggctgctcacactccaccaaggacgggttggcaggggggtccctggagcctgctgctgggcccagattctgatttttttaatttaaatttttattttattttgagacggagtcttgctctgtcgcccaagctggagtgcagtggtgtgatctcggctcactgcaacctctctggcccaggttcaagcagttctgcctcagcctcccaagtagatgggactacatgcacgccactaccacagccagataatttttgtatagtagatggggtttctccatgttggtcaagctggtctcaaactcctaacctcaagtaatctgcccgccttgccctcccaaagtgctgggattacaggcgtgagccaccgcacccggcccagattctgcattttctagtcagcttcccagcaatgcctgagctgcaggtgcacacgaactaggagtgacgtgaaggcagggaccactcggatgctaaagaccagagatggggtggtggtgagtaggaggggggatgatagggacatggaggagaaacagcatctcccagcaccatttctgccacccagaactccatcaggaagttgtcagtgtggatgaaactcaccacacgtctacttccaagctccaattatccgtcctcccatccttctggccacctcctcacacagaactcctgtcctcctctgtgaggaaaaaaagaccagtggctgcatgtatggtgttaaggaccaaaatgatgtggccaaggcctttgccacgggaagccaagaaccagtctttgttttttgttttgttgagacggagtctcgctttgtcgcccaggctggagcgcagtggcaagctctcggctcactgcaacctctgtgttatgagtaaaatgtttattcagaaacaaaatgcttcttccccagtactgcaaggaaaaatcagcatttagacaaagaagttttctcagtaaggtaattttactttctggagaaaagagggaagcaatttttatcctttatgcagcttgtccttgctactgtgtgttgtctccattgactggagctagaaattacaatttaaactgaacctgattggctaacaacttaaaacactgctaaataggtaaaactaatggagaataaagaaaaagaggaagttgcttatgaaaagacatagaaaagttataacatttcctgccggacgcggtggctcacacctgtaatcccagcagtttgggaggctgaggtgggcggatcacgaggtcaggagatcgaggccatcctggctaacacggtgaaaccgtgtctctactaaaaaaatacaaaaaattagctgggcatggtggcacacgcctgtagtcccagctacttgggagggtgaggcaggtgaatcgcttgaacctgggaggcagaggttgcagggagctgagactgtgccactgcaccccagcctgggcaacagagtgagagactgtcaaaaaaaaaaaaaaaaggacattccaaaataaggaacgcagcaagctaagacatccctgtgagcacagccagcaaacataccttggtttaagtacaagaacatagactgtactatgtgcctgtaagcatgtgtagcacaaatatattgtttaaagtacaaggacatagactgtacttactcttttctatctaacagctacacagtatagggcttaacagttattagcacaaagcaaggaggtctcaaggaagctaatttttaaaaaattatttctaaaacttatgatttattctttatgaagaagggaaactttgaaaaggaaacttttaacattgtacactccgcctcacgggatcaagaaattctcctgccttagcctcccgagcagctgggattactggcacccacggagaaaccgctgtcaggcagtggctgggactcttcaggccgccagggagccgaaggcggggcctgagaggcctcacttcgaggagcctggggcctacaaaggctgccaggagctgggcaggagctgggccgaacgtggctgttgcgaggcaggagctgggccggcaggcgcagccggcaaggagagctgggcctggagaggctggctggaaacacttctgggcctggagaggatggccagaggcgagagccgggcccgtggaggctgcccacaggcagaacacgagcctggcctgaggcggccatgctgaggcaagagctgggcctggtgggggtccactgtgaggaggcagaggccgtgcctcaagtccaggggcctacgacaggcaggagctgggcctggcgaggccgacttcaggacactttgggcccgcacaggccatcggccggggggcagcagctgggccctggaggggcccacttgagaaacccttggccgggagacgccgtcggggcgggcgggagctgggcctggagaggccaccgtgaggcttgagctggacctccagagcccagtgagaggcatgcgatgggcttgtcgaggccgctgggaggctggcaggaacacggccggggaaggccaccgtgaggcaagatctggccccggggaggccactgcgaggccacaggtgggcctggagagctgggctggaggaggttttggtcgtacgaatgctgccgggatctgggcacgagccgagtcagaagcagctgtctgcaggctggggctgggcatggaggcgcagccgcgagagagtgctgggcctggagagtaggctgggaggcagccaccgggccgtggtggtggcttgccaacttgggcctgcagaggctgccacgagggaaaagccgggcctctgaaagaggccgttcagagggatgagccaggcctaaagaggtcatcgggatgcaggagccgggcctgcggaggccgccaaaaagcaggagcctggcctgggggaggtcacggtgaggcacgagatgagcccaaagaggccgtcgggaggcaagagccaggtctgtcggggctgccgcgaggcaggtggcaacgtggcctggggagaccgacgtgaggcacgagccgggcccggagaggccgctgtcacgaggagctgcgcctctccaggccgccggggagccgaaggcggggcctgagaggcctcacttcgaggagcctggggcctacaaaggctgccaggagctgggcaggagctgagccgaacgtggctgttgcgaggcaggagctgggccggcaggcgcagccgggagggagagctgggcctggagaggctggctggaaacagttctgggcctggagaggctggctggaaacacttctgggcctggagaggatggccagaggcgagagctgggcccgtggaggctgcccacaggcagaacacaagcctggcctgaggcggccacgctgaggcaagagctgggcctggcgggggtccactgtgaggaggcagaggccgtgcctcaagtccagaggcctacgacaggcaggagctgggcctggcgaggccaacttcaagacgctttgggtttgcacaggccattggttggggtgcagcagctgggccctggaggggcccacttgaaatagccttgggccaggagatgctgttggggcgggcggcagctgggcctggagaggccaccgtgaggcgtcagctgggcctcaagagcccagtgtgaggcaggcgctgggcttgtcgaggccgccgggaggccggcaggaacacggacggggaaggccgccgtgaggcaagagctgggcccggggaggctgctgcgaggccactggtgggcctggagagctgggctggaggaggtttcgggcctacgaaggccgccgggatctgggcacaaaccgagtcagaagcggctgtctgcaggtgggggttgggcctggaggtgcagccgcgagagagcgctgggcctggagaggaggccgagaggtagccaccgggccgtcgc

SEQ ID NO: 94167 - DNA, 12978 bp, Homo sapiens
aaggtaggtgtggtgcggtcaccttccccagctaggcttaagaattcttagtcagcctaggaaatccagctagttctgtctctcaatgtgatatagaattttttactctggtcatttaattgatttacattttcctaagccaataccatgctgttgtgatttttgtgactttataacatattttgatttcttgtgactgttttgattgtggtaagactcacatcaaaagaggtgtctcctttcaaaattctcttgactattgtttagcaggtccagatagattttagaatctatctggtcaagatcctctcaaaaggatttcattttcttattttctaaacagacacacaatttccttaaccaaattggatgcttgaaggatcctttatgattcaattagaagttctgaaaactgagtcctcaggaagaaataaaaagtaataacagcaaaacacccaccatgatcgcttttctttcaaaggcttaataaacattacataatttcttcctttaaacaaccctgctagggatgttttaataaactcattttaagagtgaagaaactgaacttgggggacctttatcagctgagagactacccagctagaaaggtagtgaagcagggattacaactgaccctcaagctaaaacacttaacctctagtttctcttctctctagagcagcatttcccaaagtgctgtgcctggaccagcagcagcagaatcacctgagaatatgttagaaatgcaaattccctggcccacctggacctaacaattaataaactctgggaatgagatccagcaatctgtgttgtacaagcccttcaggtgttctgatgcaggcagtttgagaaccactgatctagaatccaaaggctgaggagtaataagagggtgcaagaaatgctgcatggaaaaaaaataaaaaataaacacagaaaagaacagcactcactgaaatgaatgagaagaaatgctacagacattcagggtttattaaatgactgctgtgttggcagtaacagccactacatggcattataagaaataaaacagaaagtgcttagctaaaaggtgtcctttattcttttcagatcagaaaagctgagaaaccattgaaccagagtgtataaaaatctaagatctttcatcccatttctctgagacttataatcaagaaatgcattagcaactcttggctaatacacaaatgcctgtccatatgaattttgatctccttcagaagccagaccataaaaacgtctgagcacctgagtgtggaagaagcttggaaaacccctgagaagaagaaacatcctgagacatcacagaaaataagaggagattgtggagaaagagcagcctacaatagcagtgcagctggaaggctgaggagacagggtgagggccaagggaatgaggaaagactgccagggtggacgctgggaaggctgggccagtagcaccatctggggtggtgaggtgagccatatgccctgtgcatttggggtctaccacagctgcctctgtgattaaaaagggaacaaaaaaataacctttttattactattttttgaattggatacatttaccattatttgcagtaacataaaatttgtccaaattttcatttagtgaaattagtgcatcaaaccagctggatttgcccatgcaaagaggacttggtgggttcaggtgttgggctctttgtaagaattatctattaattaagtgactaaaaataattagccttttggttgggtatcctgtcaggattagggataaattcttggagaaaactgactgtgaaaggcacaggcttggattgaatgcattcaaaatagtccctgggtctttcactggatagtgagatgcctgcttggcttggaaaaattcagcccacgagattttcaaaatcactctatgaacaggaagactgttactgacgcagatcttcgccatcctcttggaatttaaagcagcattttcaaggtttattattcgtattggttttaataggattcttttatgaacctttttaatgaggagtattcaattattgcttcctgaaaacattgctatgatatcagattccatgctgtgaggcctcatttggttaatgtgtatgtgatctgaatggaaaataaaagaactgttaaattgccatttctttcctttactgtatcaagctttctttctgctgatgttggtggttggtggatgtatgcaaacactccatctttctagtttgggaaagccaccggatttaaaaagaaaatgtacttaaatgtaaaaatccatataatgtgatgtttatcagataaggcctttttcagactaaaaccttctctctttcttttaacaaatcagaaaggattgggcagaagttttctaagcccgcgggatgattaattagagagggtgccactggcaaagctcaaaaatgtgaaaacaaatgtgcacatttaatatgtaaagctcaatctggagtttaaaactggatgcagcaacttgaagtatgtgcctcaaggcatggctcaaatactccgctgaagaatccaactcataaccctgaagaaagaaactcaaattgttaatccacttttaatcaccaatcaggagaatctttgcgaatagttgataaaacagaccagcatgtgacttgagttgaaagtgttacatgccttttatgcatctttaattacagctatgaaagctctcatgagctcatgtactagtatataatatttcatttttaggaatgatgactaggaatgttcaaaacagaattaggaggttctagaataaggccatccttggcataatggttggagcagggagaacacatttatcctgacaaaatcaaaactagtcatccaccctgatatgcaatgcataataatcaaactttgaacttttatgtagatggaagcatattaaccccttatcacccaaatatgtgctacttgctaccaaacaacttcctatgtaacgtaaagtgcactcacagaaattcattaacttccacggaggactttggtgtttcagtcttatatatgctagcaccatcctgtgagagaatgacataacaaaaattaaagaacaaataatactttatttgaacaaagactatacaggaattatatctgcaataggtatattgatgtaagtaaactatttcaagttctgaaatggcaaagcaccatgcatcagccataaagaagtagtttgtggggagtgagaagagggttcaggcattaaatttcttgtaggaattaattaactaagtgaccaaagataattagttgggtatcctgtcaacattagggataagttcttagagaaaactgactgtcaaaggcacaggcttggattatatgcattttaaatcatcactgggtctttcatttggtagtgaggtgcctgcttggcttagaaaagttcagctcacacgattgaggtagccagatatgtgccacccccatccctattcctcacctccactcacctgccccatccccattcttttcttttttcttttcttttcttttctttttttttttttttgagatggagtttcactcttgttgcccaggctgaagtgcaatggcatggtcttggctcatgcaacctccgtctctcgggttcaagtgattctcttgcctcagcctcccaagtagctgtacaggtgcccacaaacatgcccagctaacttttgtatgtttagtagagacggggtttcaccatgttggccaggctggtctcaaactcctgacctcaggtgatccgccatcttggtctcccaaagtgctgggattacaggtgtgagccactgcacccagcccatccccattctttgatcctaacagttgtcgtcttctcaatcgaaggtaaagtgctataccaattcaaccacaaggtgtctcctagcctcagtacctccttccaactagggtgccaccctccttctgtatagaatttctggctctaatgtaatataaatggcaagtactattgggttttttgctattattattgttattatggttattattgtaattgtcccctgatggggttgaagaatctcaatacttcccattgtagttctcttcctcctactgagctggagattacaacctcattataccaactttttattaatcaccaaagggattctttcgtatggggatatttttattaaaatatgttttataacagcctgatgatttggttaatatgattaccctacttaaattgaaggagagggatctgaggccaagagatgccatgtactctcctaccgttaaaaccaagttagaatttatattccctgagtttcttgctagtagtcaagacagctataaaataaaaaaacactgccagccaaaaaatacttattctggagtaaggcaaatttatatcaataaacttcccttattagtttcccagaacattgcaccttagcactcattcttcagctactaggcaattctattgccattgaaaagcctcaacaggaagggaaatgctccatcatcaagaatgtggcccagtttaaccagcctttattgaacacacaccagtaaaaaggtaccaagcccatggatgtgcaattttttcaaagatgaacaaagcttatctctgctcttaaaaacttttcaagatggcctcatgttttcatttttcccaatattggagcaagtccctcaaattactcacccagtctgttaacacctggtacaagcaccctttcaggtaaataggctaagggattgctatgatccacccatcagcctctgggacactgatctttatcatattcaaatctctgagctcatcctttatttttcccacttggtctagtgacaataggagcaaccagtcaatctcattatactcattagtttgccaaaaatgttagaaagtctcatataaacagtcattcagatctttacttcctataagtggttcagagtatcaaatggtgctattttgtatatcgctatcaccagagtacaacatgtactatcaatgctctctttactgctggaaatagagttatgagaatctctaaatctaattacattacagagccaattacaaaaccccagaaccaattcagaaagctcattcttaagattttgttcctctagactccataccaaaatgtgtattagggttctccagagaacagaaccactagtgtgtgtgtgtgtgtgtgtgtgtgtgtgtgtatgcgcacgcatgtgtgtggggagagagagagatttattataaagaattggctcatgcaacatgagggctgacaagtcctaagatctgcaagctaggaaagtcagcaggctcaaagagagctgatggtatagctccagtccaagtctgaaggcccaagaagcaagagagctgatggtgtaagtttcagtctcagtccaagtccaaaggcaggaggagactgatgtcccagctcaaagggagtcaagcagagagagtgaattcttccttactcagccttctgtttttattcaaacttcaactgatcggatgaggcctggggacattgtacagggcaatcgtctatactcagtttactaattcaaatgttaatcttatccagaaataccctcacaaacacacacagaaaaaatgtttaaccaaatatctgggcaccctgtgacacaaaatcaaccattacaaaagattcatccacactagtttacagtttaccaattctatcatctctgtgttctattctctgaagagcagctgagcataaattcccccaaatgttaatattacaaaaaaaaaagttttagattgaaacgaaatcaaatcaagcaatagttttggatgccaaatatgcaagatgcatactaggcaccaaccgttcttccgtgctgttgcaattatataaaaatcataaatataggctttctgctcctcccattctatagacagtaacatcttgtgcagtgccagccatgtccctgagacacgaaggttgaagtgaaggccagagtaaacrgatttggccttactgggtgcctgatcactagtacagttttaactctagcaaagtgattattgtcaccatcaatgacctcttcattgacctcarttacatggtccacatgttccagtatgattccacccatggcaagttccacgcaccatcaaggctgagaatgggaagcttgtcatcaatggcaatcccattaccatcttccaggagcaagatcccatccaaatcaaatagggggatgccagtgctgattatcttgtggaatccaccagcatcatcactaccttggaaaagactagggctcacttaaaggggtcatgatttctcccccttctgctgatgcccccatgtttgtgatggttgtgaatcatgagaaaaacaaaaacaacttcacaatcatcagcaatgcttyctgttctaccaactgcttagcacccccagccaaggtcatccatgayaactttggcatcatggagggattcatgaccacagtccatgccatcactgccacccagaagacgaagacaaccyctctsggaaactgggatgacagctatggarctcyacagaacatcacccctgcaattaactagtgttaccaaggcaaagtcatccccacactgaatgagaacctcactggcatggccttctgtgtccccactgccaacatgttggttgtggacctgacctgccatataaagaaacctgccaaatatggtaacaccaagaaggtaatgaaggaggcacggaagggcccctcaagarcatcgtggkgctacactgagcaccaagttgtctcctccaactwtaacagtgacatcgacccttccactttcgacgttggggctggcattgtcctcagygatmactctgtcaagctcatattctgatatgacaakgaatttggctacagcaacagggtgatagactttatggtacacatggcctccaaggagtaagagccccctagaccatcagccccagtgagaacacaacaagaaaacagaggccctcagctgcagcaagtccctgccacactgtcctagaccatcagccccagtgagaaaacaacaggaaaagaggtcctcaggggctagcaagtcgctgccacattctgtccctgacatgctgagactctcccttcaacacagtttccacatcagaccccctgaagaatgggagaagcctagggagccccaccttgtcatgtaccatcaataaagtcccctgtactcaacaaaagaaaaaaatcataaacatagtggcattttaccttcagcctgatgttttacatcctttctgtttaactacatatctactcaaataacacactgaggtagcataaatatatgccccttccaggaagtctgtacatccagttttactccagatgcattttcttatgactggattctctttctcactgttctataaactctttgagttcctcactcaattttaatcacttttagataggtattcaatatgctaaacagagatgggcaaacactaaatgcaaaattaaataaataagtagttttattacttttatgtatattaagtgtgtaaagatattattagttttttacttcatgtttcatgtcatgaagagaatgtgtcatccatgagcttaggcttcaaacagctttcttgtttctgttgttgcttttggagcccagtcaatgtcatgagcaatgttagcccacaaagttaattacaacagagcagataccagtagtctcagtacagactgacttccactaacctattgttattgagttctcagatatataagcatagatcagccagatttggctcaatcatgagaaataataaataattattgttttaatctgctaagttttgatgtggtttttactcaacaatagctgattgatggagtatgtcttattgattccccccatatgtacacttcttccaaaagttattgtagggagtcattacatactgaaattacagaactacatttatgtattatcatgtttactatggctaaccaacctataaattataggtaaacttaatgcattctaaattattcttattaacaagatgtattatactatattatatattatcaagttattagatacgtctaattgcatgttgcatagaaagatttttttcatactttatgttcatctccacttgacttctttgtagttaagttttcttctgtctggaagcttatttttttgtctttaacttccttaacattaacatcgataatgtagaggcagttttgtttgttttattttaatccattgtcttttcatcatttttatttaatcattaaaaattattgactattatttctttaagttttaattctgagactagcaaaacatgggatgtgtcaacactacttctctatgtcttctgactttactatgatagtatcaatcattataccttctcaatactttctagatggtttttccaactggacattccagttcattattcacctccccttccatgttctctctaccttcatattgttatttttttcacgttaccatattcactgatatcagtgaaggatgatttgctcttaaataagattttgctgaacaaagatgcagtgaagggagatgcagtcagggacatcttttccaagccacctctgagcccgaagcttatacaattaaaaaatatgtggagaataaatacacatattttacctttatgaatttattgcacacgaatggtcatgagaagactttgctaatgtcgcatccgggtctttggaaagcaccagtgcaaatgacgaatatactagcctaaactttggtaagttgatgtctctgaatagaacttgaggcttctatttttcctctatgactgactctaagcatgtcatgcccgaaagtttactcacagttttgttctgaatgctgagtaaggccctgcgttcatcccacttctgtatctctaggcagcacgttagtattccattctgaattgatgagaaattgaatccatggggtgctttgcagacagcatgtagccgaagaaaacaatagttttctttccttggtttccctttgccaataaggattatttccttgctgaaacaatgttgctaatgatgttgttctgtgtagcctatgtattttggagtagaaaaataatgtaagaccccctggggtgaaattttcctgcactgaggtcaataaataaataaataaacctgacaaacatacattagtgtacaaacactaatgctttactgaaactgaaaagagtctctccaaagactttaaagatgctgatatttaacagataacaaaactatttgttaaaatttcagaagaggcagtaagagtgatctattttctgattaattaaccctatctaaaatataaaatccagattgaaacaacaaatccagggttaccatattcaaaatgaaattttgctctggcttaacactcttaacatcatatagaatataaaattatcttatctgtttttacttacaagcatttgctcgcacatattgatatacatatctggggaaattacaccaccaaaaccttccacatatagagtaactacttttataatgaaatgataaattatatagtatttccattttaattacagaaaagtttctggggatgtgttgccatggctagaaatgcaacatcatctaaggcataaaactataatcatttcacatcttctctgggtcaccataagattttctgtatactattgaatctttgtgcagacaacaatcttggtgcaaattaaaccccggggataagtagaagggagactaacatcgctcacctgaatgatgcaaagcaccggtgacattgtggacagtatttaggtaaggatgtttttttccatccttgtttttataaacgaaaacatttccatctttccgtctttgtgaattgatacatattgattgtacatatttatggggttcatgtgatgtttcgacgcatgcatacaatgcataatggccaaatcatggtaattaggatatccactacctccaacatttatttcgtgtgtatgtgttggggacattttaagtcttttcttctgaatattttgaaataggcaataaattattgctaagtataatcactcttgtgtgctattgaacactagaacttatcgcttctatataactctacatgtgcacccattaaccaatatctatcttcatcctgcctccttcccagcctctgttaaccatcattctactctctaccttcctgagatcagactttttagctcccacaaatgagtgagaatatgcaatatttgtctttctatgcttggcttgtttcacttaacataaggacctattgtttcattcatgtttctgcaaataacatgatttgattctttttatggcgctgtagtattcctttgggtatatataccatattttctttatccatttatttgttaatgaacacttatgagccacaatttttttaatgagtgatttagatgacttgcatcgaaactacttggagtgtttacttttacaaaaccatattgagtcttgatatagacacggtaaatcagaatatctgaatgtaagatttacaagttaacttttaaacattttttagtattttatatgtgtatatacatgtgtctgtgtatgtatatatataatgtgtatatatatatatatatatatgggaaaactatgaaccctagaatatgagtccttgaatatgagtcactaatgtatgtatgtgtgtacatatgtatatataccgtttctataattaaatatttgtctttgagaattatgtaaatataaatgtgtgcaagcaggtttggttcactattttcttactaaaaagtcataaaaatacccattcatttttattataaaaggtattaatatctcaaagaagactgtatgtcaggatatcaaagctgactcttaatttttcttttattgttaaatttttggactttgggagacaaataaaatttctgtgttctagagttttaaaaatgaggaacacttctaattccacctactcaggtggctgaggcatgagaattacttgaatcctggaggcaaacgttgcagtgaggctagattacaccactaaactccaccataggcaacagagcaatattgtctcaaaaaaaaaaaaaatgaggaaggtcagtttagaatctaaatcagacaggtctctgtagatagggatagaaaggacaggtatatactaccaaagttccaggatgataatatggtattttcttggaggatactagaaacttgataatagtggagaaatgctaagaacagagttttgctcagaaggactcatattcaagggttcataattttcccttcattttttcctcttttgtccttataggacatttctagaaagatatacatatatagatgtggatagataattttcctgtttgtcattctactttcttttaataattcttaactgttcaaaatgttttagatctctgtgtttccttattatttaaactcaagcgatggagtggcagaaaaaaccaacccttccattatgtacttcagtacactcttgtactgcagtgtgtgcaggcatggggcaatacactttccaggggatttataagacagtataaaataaatagcaaccaaaccaaattagcagtgtttggaggcaaaaatggaaacatttagggaaacatacaacataaatagattgctgttgaatgaatgactagcaggatagttgagacaaagccccctttcacataattctaacaacgttacaatgttacgggaggaattcaaccccatgtttaggaagaggttaatatttgataaattgcctacacatctctccatctctctatgaaaatattttattttacttgagatgataatataaacaattattttcaggagttacaaaatacattaattgtataatttttttggtagcaacttaaggtgaaactttctcaacaggggaaaagtagctgtcataggagcctaaatagtggagtaggcttctgctgccataagccaccaagatttataaagagaagaaatagtcatggcatctgtttgctcaactaacaacattaaatttctatgtgcaatattggtaatgatgcatctaaaccttatgtagtaaataatttatgaatcttttagggtgtcagagttttttggctttagtctaggtagaaaggtcatagagtaagtagacagcctatacgtttaatgaatatttgtatttgcgatggctcacgcttgtgatcccagcactttgggaggccgagatgagtgaatcaggaggtcaggagtttgagaccagcctggtcaatatggttaaaccctgtctctattaaaaatacaaaaaattacctgggtgtggtggtgcgtgtctgcagtgccagctacttgggaggctgaggcagaagaatctcttgaacctgggaggcagaggttgcagtgagccgagatcacgccattgcactccagcctgggcaacagagtgatactccgcctcaaaaaaaaaaaaaaaaaaaaagcaaagggtgtcgcctgtaatcccagcactttgggaggccgaggcaggcggatcacttgaggccaggagttcgaaaccagcctggccaacatggcaaaacctcgtgtctactaaaaatacaaaaaattagctgcgcctggtggtggacgcctgtaatcccagctacttgggaggccgagacagaagaatcgcttgaacccgggaggcggaggttgcagtgagccgagatcacgccgttgcactccagcctgggcgacagagactccgtttcaaaacaaaaacaaaaacaaaaaaaacaaaacaaaacaaaacaaaaaaccaaaaattagccgacgggcacctgtaatcccagctactcgggaggctgaggaaggagaatcgcttgatcccgg

SEQ ID NO: 94168 - DNA, 119943 bp, Homo sapiens
  misc_feature (1)...(119943): n = A,T,C or G
atgaatgaataaataaataaaataaattatgcttctatgtgtcactaaatagactgttagcttatagaacatccttattaaatttctgctgtcattgtatgttatgttttgttaaattttttgttggtacacagtaggtatatatatttatgggttacatgagacgttttgaatcagtcatgaaatgtgaaataatcacttcagggtaaacggggtctccatgacctcaagcatttatcctttgtgttacaaaccatccaattacacttttattccttttaaaatgtacgattaaattatttttgacttatgttatgctagcaaatactaggtcttattcattctttctgtttttgtacccattaaccctccccctttccctccatacccctactccctttcccagcctctgctcatcatccttctactctctaactccatgagttcaattattttaacttttagctcccacaaacgtgagaatatgtgaagtttgtctttctgagatctttgaatctctgatatgacacccaaaacttttttttttttttttttttgagatggagtttcgctcttgttgcccaggctagagtgtaatgccacaatctcggctcaccacaacctccgcctcccgggttcaagcgattctcctgcctcagcctcccgagtagctggaattgcaggcatgcgctaccacgcccggctaattttgtatttgtagtagagacggggtttctctatgttagtcaggctggtctcgaactcctgtcctcaggtgattcgcccacctcagcctcccaaagtgctgggattacaggcttaagccactgcgcccagcccccaaaactcttttttaagcaatgataatatgttgtctagaaattcagtatcttcaatatggattggattattcattataatctcattttctgtgaatctatattacacgcatttgaaaagtttgagatctgagaatgtcaataaaatttctataagaacaatatgaaataatgcaaatttctccaaatgaaaaaagttttaaaaatccattaagaatttcaagaatttggccaggcacggtggctcatgcctgtaatcccagcactctgggaggccaaggcgggcggatcacaaggtcaggagatcgagaccatcctggctaacatggtgaaatcccgtctctactaaaaatacaaaaaaaattagccggggttggtggcgggcgcctgtagtcccagctactcggaaggctgaggcaggagaatggcgtgaacccaggaggcggagcttgcagtgagccgagatttcgccactgcacttcagcctgggcgagagtgcgagactccatctctgaaaaaaaaaaaaaaattttttcaagaattcagaaccatcttccaggtgaactgtctgtcaactgtgtttgggccatgtccacatgctggcctcacttggattgatgggtagaaaccctctgtgggccagccttcatgagtcttcaggaagtcatccttcgtataaaattttaaaatcctctactagttatccgtgggcagaacattttaaaacattcttttcttattataaaattcaatcttactgcggaaactctgggaaaaacaaaagcataaacaagaaagtaaaatctacgcattatacaaaactgagaagtaatttctgttagcattttagcattatttacctctttctctgtgtattgcttcatgtagttaggttatactgatgatgtaatttttttatcctgctactttcatttaacactatatcataatagtttccctatgtgattaaaaatatgacatattgtattttatcatagtatggatgtaccatagtttgcttaccaattcctcaatagttcgttttttcctttttttttttttttttttttttgagacaggttcttgctctatcacccaggctggagtgcagtggcacaatttcggctcactgcaacctctgcctcccgggttcaagcgattttcctgcctcagcctcctgagtagctgggattacaggcttgagccactgcgccccacctaatttttaaatgttttgtagaagtggggtctcgctatgttgcccaggatggtctcacactcctgggctcaaactatcctactggctccgcctccttttttttttctgaggcggagtctcactctgtcgcccaggctggastgcagtgacgtgatctctgctcactgcaagctccgcctcctgggttcacgccattctcctgcctcagccttccgagtagctgggactacaggcgcccgccaccacccctggctaatttttttgtatttttagtagagacggggtttcactgtgttagccaggatggtctcgatttcctgaccttgtgatccgcccgcctcagccttccaaagtgctgggattacaggcatgagccgctggcccggctggctccgcctcctgaagtgaggggattacagcctcgttcctagttttttactgtgtaaaatgttattttagtcaatactgaataacatcaaaagtaagtaacatcttttcacataagcttcgccacattttagtattattgtctttggaattaaaattcactggattgaaagatagccacatttaaaattcttgatacatattgcaaaattgctttccaaaatatattctaattttccatcagtccaccagtgtrtgatcacacgtctgctaacagtggtattctaatgtatttattttatttttgagacagtctctctgtccccctggctggagtgcagtggtgctatctcagctcactgcaacctctgcctctcaggttcaagagatccttctgcctcagcctcccaagtagctgggactacaggcatgtgccatcacaccgggctaattttttttgtatttttagtagagagggggtttcaccatgttggccaggctagtctcgaactcctggcctcaagtgatctgcccgcctcggcctcccaaagcgctgggattagaggcgtgagccaccgcacctggcctaatgtatttcttttaaaaaattacttgaattaaacagaaaaagaactgcgctactcttgttatttataatttgttaaagatgaatatattttaaaggtatgttagccatttttcttgttctttgtgggttgccagttttctgggtggcaggcacagaatttcaatgctctattgtttgtgatggagaagaacaggttgggtggccaggaggtgaaaggataagggtatttccagcaaagaatggaggctgtaaggagctggcaaggactgagatcatttgaataggcataatgaaatagtgaaataattaggtaatttgccaaggaaaaaatcacccgttgctgcgatgatttgacttaactggctctttcccaataagtagaccccgtcttgaatctccaggacagtcatccttttttccctaccttcatcactaaagtctgggtttgtaaaatactgatgtatacttggatatttgatgattttattctttggttggtaaaaggtatagaattgtatggagcattttatttacctctccagcaaaattcccatgggctggtctctatttttcatacttttgcaaacagtacagaatgacaggccatgaagaaatgctgactcatgcgctcatgaggaagttgaattgtagatctgggcccaacacacacaatgcagcgtaagatgagggagaagataaccagtcacgaccattaaaattgttcctttccaattagaaaaaaataattcatgaccattttataaaatgtggaaaataggaaaaaaatacatagaagaaagtaaaatttaccataatcctaaaactctaaaataaatgctgttaaaacagttgggcttcttttagtcttttcaaaataggtcattttaagaattgttgatttggccaggcggggtggctcacatctgtaatcccagcactttaggaggccaaggtgggcagattacttgaggtcaggagttcgagatcagcctgaccaacatggagaaaccccgtctctactaaaaatacaaaagattagtcgggcgtggtggcaggcgtctgtaatccagctacttgggaggctgagacagaattgcttcaacccaggaggcggaggtagcagtgagccgagattgcaccactgcattccagcctgggtgacagagcaaggctccatctcaaaaaaaaaagaaaagaaaaagaaaacagacgacaggtgcagtggctcacacctgtaatcccagcactttgggaggccaaggtgggtggatcacctgaggtcgggagttcgagaccatcctgaccaacatggagaaaccccgtctttaataaaaatacaaaaaattagcagggcatggtggcgcatgcctgtaatcccagctactcggaggctgagacaggagaattgcttgaacccaggaggcagagactgcggttagccaagatcgtgccattgccctccagcctgggcaacaagagcaaaactcggtctcaaaaaaaaaaaaaacgaaaaagaaaagaaaaataatcattgatttgggccgggtgtggtggctcacgcctgtaatcctagcactttgggaggccaagaggggtggatcacttgagtccaggagttcaagatcatcctggtcaacatggtgaaaccctttctgtactaaaaatacaaaaattacccgggcatagtggtggatgcctgtagtcccagctactcaggaggctgaggcaggagaattgcttgaacctgggaggcagagggtgcagtgagctgagattgtgacactgcactgggtgacagagcaaggctctgtcacaaaaaaaaaaaaaaaaaaaaaagttgatttgctatttcttcagtttatcctggctttatgactggaaaaaaattttttttaactcagttggattttttctttttttttttttttttttaagttgatgtctcactatgttgcccaggctggtctcagaattcctgggctcaaacaaccctcccgcctcagcctccctagtagctgaaactgcaggtgcacaccaccataccctgctttatccccactgaattttataagctgcttctgactgcaaagtgtttggcagaagagagggatatggctaaatgcacggtatgactagcttgtttcctgggacaggaatcagttcattcctgaaagggtatgtaaagagcccgtttgcctggcctaggaaaagccagaggttcagagagaggaagtgacttgctcaagatatacagcttgcattagagaggagagaacttgccttctgaaaatgcccagggcattttctactaaattctgctgccaccttaggattccccttccccagtgtgggtagcatttgagcagaacacatatctaaatctgttagaggttaccctggggcagagactataagatttcctaccaataactaaacataagagtggaaccttaaacacgaggggtctgtgagggaatccaaaacttcccctcttgaaaaagcagcctctaagggggcaaaatggagggtagtcttaggaaaacacccaaataattatcctgaggtctatcttggagtgtcctcatgaaaaacccagttacacccagggcagttacctttctgagcggtttcttataacattcctggagtggaaagtgatcaactcaaagccctccaggactctagaggcaggggatgagctggtgtcaggtagcacctggtatccagcagcttaaaaaatccagactctaggcaggctctctgtagacgtgtgttctcctgtctcagactcttagggcaggccttgggggtgggactgaaagcaaacagaccttcccactttcacattccagcctctgttattccacttaaaacgctagggttaaactgcgtttaccttaaacaggcttactgtgttcactgctggacgcctctgggcaatcttaccctcctgggaactgagagaggtaggtggaggtcagcgtgctgggaaactggtggagggaggaaactgcggggagctggtcttctcgtgttacctctgttaaatcgctgacagcagtttaaggtccaataggctggtactcaaatgggctgcgtggatgttttatatttccagaacctagcacagtgccgggcataaagtaagtacaccaaaaaatgttgaatgagtcatttggtcatgagatttctgttttcaaaggttttttttttttcaaagaatagcatgtttgtatgttgtttcattacatgatgggcctactgggcacgagggttttccatctgtctctaaatcattagtatccttctgtatctcagttacaacttttaactttgtaggaaagaacaacgttcacttcagacttaatggtttatgtttctcagttccttcaggcaagggaaaatgtttccagaatttgataaggtacttggtactgtctggcatttaaatttttttttttttttccagacatagtctcactctgtcacccaggcgagagtacggtggtgcgatctcagcttactgcaacccccacctcctgggtcctgcctcagcctcctgagtagctgggactacaggcatgcacaaccaagcccggctaatttttgtatctttagtagagatggggtttcatcatgttggccaggctggtctcaaactcctgactccatgtgatccacctgcctcagcctcctgaagtgctgggattacaggcgtgagccaccgtccacagcctgaaatgtattttatttaattagttgctgtgaggtatgaacattcctgtgaggtatgaacctcatttgataataggtaaaattgaaaatgaagctctgggccatgtagaaaagtagtagatccatattgccattctatgaaaacccatcttctgatattaaagacaggtctactaagtaaattcaggttttgccaaactcaaagctacttttctgttttccttatttttaaatgtaggcctttgagagtcgtcacttgtaaatagtctttctgcacctggtagtagattggccaaatagagggtagttacctgtaggctgtggttttccagaagaaatagggagactgtaatcccaggccctggggaccctacagcgtaaaggatctgtttctttgcactctgttctgattgaacagcatattgcaattatcggaagaagggaggctatattctttcatgtaattattcttagtgatcagaagcttgaggtctcccttgtggaagtattctacctatggcagtaatttttggttcctgtaacttcaaaatcctatcaaggactttctgagcgatagaggtcgggagggtaagagcaaaactccatccagaaaggtgaaaacaacaaacaaagcctcgggcacggagattgggctgctgttctagcttctcataatatcccatttatagaatacactcaatcctcaactccagggtaactttctgcaacagtaaaattagacttaaaacgaatgaggttctccagctctggcttctcccggagaccctggcttggaaagcctggagttgtcagatatcttttcatgtgcaaacgcaggcggaaagtgcctttaaggcctcgactccgcctagtaactgagctgctatttaactttgctcagtcttgcattgcctcaaagttatttgactgagcttgaaaagaccagctttcagccwggcgcggtgtggctcatgactgtaatcccagcactttgggaggccgagtcaggcggatcacctgagatcaggagttcgagaccagcctaccagcatggtgaaaccccatctctactaaaaagaaaatacaaaaattagccgggtgtggtggcacatgcctgtaaccccagctgctcgggaggctgaggcaggagaattgcttaaacccgggaggcagaggcttcagtgagccgggatggcgtcattacactgcagacggggcaacaagagcgaaactccgtctcaaaagaaaaaaaaaaaaaaaagaccagctttctcttatagtttcctattactttttttcccagctattttttsttaaacgatcacaacccacttcatttccccctcgtagcctcttcttccccacagctttccatccaggtctggaattagctctgacttctctasaagccctgagctgagcacgttaggtgccctacctccagaatcctcccagcatggcctggagattgctgttgtcttgactctagacttgaaaaaccaaggccgggcgctgtggctcatgcctgtaatcccagcactttgggaggccggggtgggcggatcacgaggtcaggagatcgagaccatcctggctaacacggtgaaaccccgtctctattaaaaatacaaaaaaattagccgggcttggtggtgggcgcctgtagtcccagctactcgggaggctgaggcaggagaatggcctgaacccgggaggcggagcttgcagtgagccgagatcgcgccactgcactccagcctgggtgacagagcgagactctgtctcaaaaaaaaaaaaaaaaaaaaaccaagactaagaggtgtggtgatctggctaggaaggaagccacagttgggagttggaggctctaagtaacagcagagccccttacagcctgcgagatccatgctggatcttggtttgtttttcaacaaacgggtgttgttttctcaaattcactccaagaggaagctgtgattataaatcaaatgacttattcaacggctccaagcctgttaagagtggccttggtccacggaaactttctgacacataatccagggctttttttttttttttttagacggagtttcgctcttgttgcctgggctggagtgcgatggcacgatctcggctcaccgcaaccttcgcctcccggggttcaagcgattctcctgcctcagcctcctgagtagctggaattaacaggcatgcgccaccacgcccggctaattttgtattttcagtagagacagggtttctccatgttggtcaggctggtctctaactcaatccagggctctttttaaccatactatttaagccctgttgctggaagcctgtggttataacctatgcttaaaaagaaatagtgatgaggataaagcagggtaccgaacttgtcaagagaaaacacataaataagaaagagcaggcagagaggaggacaggaaaaggttgtctttttgaaaaaggacaaaatgatacaaaaattagccaggcatggtggtgcatacctgtaagcccagctacttgggaggctgaggcaggagaatcacttgaacctgggaggccgaggttgcaatgagctgagattgtgccgttgcactccagcctgagtcacaaaagcaaaactctgtcccccaccccccaaaaaaaagaaaaggaaagaaagaaaagaaaaaggacaaaatgtgttgcccttcagattaaaaaccagtttaatccaagctgttcttcctctgagactgcatcaggctttcacagacactgagaaagtttccatcggcccacccccccggtttctaatttgggcacacaggtgatgtcatggtaaaatgaatatgtgaaaagtgctttgggcatcatatggtccatgaataattaaggtgaggatgatgggawtcttgtctgtagaaaggaacccctttttttctgcttctctttctacagtcagttattgagattaaactctaagtgcagtgtcttagtgcaatgaaaattagtttacatcctggagagtgagaatttataagagtatgtgttatggagaaataagcaattagtgattgaacataatatacaccctgccagttattgagcaaccaaactataagtctttgctggttcccaatttgttcagaactctttatttatcccacctgatcagtgcctccgacttagaattggggggtattaattttgatctgaaattcaacctgggatgaacaatctcgcgtccttttggtcactccctgattaccatctcctcccattatatcacacaaacgcaagagcctagagcccagaattgaggagagtgattactgatagattgtacaagggcattgggaaagctggagggtctggaagaccagcgtgtcccatgtgcctaccaaaataaaatgcaccagctggcactgggttgatgaaaaaggaaataggttcatattaattctttttttaaatgtctagcattgtcaaagatactattttacagaatcataaatattccagagctcaaaatcaagggaccgtcttagcattacaggtaaggtacaagtaaagacgtatgaactttgcttgtacttgcagcagagcacaaaatacaagtgttcgttaccctgcaactaaatccagtgagttgtaaattcgaagagcaggcaaatrattcaagatgcttctatgtctgcaatgtctggagggatagarctaggccaagaatgaggtaagagtcaaacaaacacctgatgtaattgtctggataaattaggagaaaatatggtaaaaattacttgactagtttagataagcataattcagcattgacattttcatttaatcattcctatagtatttcatttgatatggacagggtctaaagagacgttaaaagtcaactaaaaattagagaaattttagtcatttcagaaaagattgattttgtatgcgtwctgtattgaagaagtgatttgttcaaaagaattctggatagacgcatgaaagatagttaagaaaatagatatttgggttgattaaattctattttgggggccctataggcacaactgggtgtacctgagtcacgctgtagaatctgattccagaagcaactgagaactgactcactgtgttctagagaattttccctgtgtcctttcttgtcatcatttcctgtgttcctgacaccgtgaaatggggttggctgccgtctcaatgtgttcgcttttagctgggttagcggaaaaatcaacaggaataactccaggttctaaagtagtgattgtgaagataatacccaaggcacaccaagaagcactatggaaaatgttattgtataatagtaagtgcagaatgcaggatttaagcttgcatcttsctgcgttcttttttttttattagagatggggcctggctgtgttgcctaggcaggtctcaaactcctggcctcgagctcctcccgccttggcctcccaaaagtgctgagattacaggcgtgagccactgcacccagcctcccctgtgttcttgataaaataagaatgtgtatttcctataggcaagaggtaaatgaaagtacaggacgtggaaacattgtgtttagaaactatctacgatattatgtcrtctttgtgattaagaaaatgagccaggtgcagtggctcacagctgtcatcctaaagctttgggaccctgaggtaggaggatagcttgaggagttcaagaccagcctgggcaacacagtaagacccccatctctacaaaagagtaaattaattaattaattacatttaataaaagttagaagatacattggaaaaattaggtttattgactgtaccacattcacagatacaaatatatatctcctacaaatcagtattacctggaatttctcactaatgtgatcagggaagcagggaaatgaaaacttgagcattcaatcaataaatagttgattgtgcggtggctcgcgcctgtaatcccagcactttgggaggccgaggcgggtggatcacctgaggtcaggcgtttgaaaccagcctgctcaaaaatggtgaaaccccgtctctactaaaaatacaaaaattagccaggcatggtggcaggtgtctgtaattccagctacttgggaggctgaggcaggagaatcgcttgaacctgggaggcagagatttcagtgagccgagatcgtgccattgcactccagcctgggcaacgagagcgaaactccgtttcaataaataaataaaataaaataaaaagttgcttgtctactacatacagacaatgctaggagccagaaacatgaggaatacatgagctcggcgccaatggaacatgctttcacaccgggtgcagctaaccaccacatcatacaaaactcgtcgctgacgttttagatgtataatctgattggcatggactcacagaggagggagtaagggaagagtaagaagatttcaaaggagaggtaattgtgtcatttattagaagtatgagtgtggggtaagagatacgtgtgtatgcatgygtgtgtgtgaacggacttcttgtttagtaccattttgctgctgctttaccaccccaatctgttcctggacacggcgatggactctgtatatgttatctcattttattctcacaattgacctctggtggtaaaattattctcattttttacagattaaaaaaaaagcctcctttaaagcatttgtaaatctggacataagagcctctctcctaaaattcaagactgagatgctcttctctccttcctctaagcatcagggttctcygtctgcatcctatgcggaccagggcaaaataaacttgraattcactatgttagcctgtatgcaattttgggtgatgatgggctattggtcgttttgttgttttaaaaaaagaagttagcctttattcatccgagtgccacagtcactttgtgcagtaagttaggtggtgaggtaagcttgctaattaatgggcattttaaaggactttacccagcrgcagacaaaattaagccctggaaagaatttagcccagtagccagtcatatgccatgtcgtatagcatacccagccaatggggagagcgaggtgtggctgtggaaaaagacagggttaagcaatttttttaaagcactacatatttattgatagamtatctctccaggcagyattcacatgctttaaactgaagctcgtagcttggcagtgcagtttaagcaaataaactcaggctgttgaacacaatgattaacaggaagcaggggaggggacatagttactagactctggccgggacaagaggctgaggttaaggtcttagagccgatgacttgcagaatggtcacctcacccacttgyaatttcatggtgggaacaggtggaccccctggaatcagaacctctctgaggacatctgtttttgtgtagacacaggttgcaggttagcaggagaacaggcaagccaaatgcaaaggagccacttcagaaatgtgtcacagaaaagtgaaaatgcaacctagtggtaagtgaagaggggaagaagaaagaaaaaggaccagaaccgtgaactgaagggacrgggaacagccagacgagagcttcagccatcacgaggatgatttcggaacctggagaaaatgtaagttaaatayatctacactctgatcctatctcaagagagagmtattttactcatttcctggttgtgaatgatgggctcttggaagcactgtctttttagcgcgtctcttatctctgccctgatttttgtatttgtttacaatactgagttatgggagaataaacgttttctgagggcagctctgtccaatgcttcactgttagcagaagcctgtcatcagatttttgaggggaaagttttttacccaacagaaaatgcattgaaaactacccttgatgaagctacctgctatgagtacatggttcgaagccactatgtaacagaaacactctctgaagaagaggctgggttccctttagcttacacagtgaccatccacaaagacttcggcacttttgagaggctcttcagggcgatttatatgccccaaaatgtctactgtgtgcacctggatcagaaggcgacggatgcctttaaaggtgcagtgaaacagttactcagctgcttcccaaatgcttttctggcttccaagaaggagtcggttgtctatggggggatctccaggctccaggctgacctgaactgcctggaagaccttgtggcctctgaagttccctggaagtatgtcatcaacacctgcgggcaagactttcccctgaaaaccaacagggaaatagttcagtatctgaagggatttaaagggaaaaatatcacccccggagtgctgcctcctgaccacgctgttggacggactaaatacgtccaccaagaactgttaaaccacaaaaattcctacgtgattaaaacaacaaaattaaaaactcctcctcctcatgacatggtgatttactttggcacggcctacgtggctctcacaagggactttgctaacttcgtcctccaagaccagctcgcacttgacttactctcctggtccaaggacacctacagccccgacgaacatttctgggtgacactcaacaggattcccggtatgtacgtctcttaayttttatttttacgaataaacactgcatggtcaatactaaataagttgctttgaaaagagtggaaaaaatgggacaaacttctttacggttttaaatgtyaaattaaaaaaaaaatttcatctgtaaaatggtaaaatggagatgtgttatatcacccactcttgtgaaccgctctgttcacaggacaaaagaccgaaggaacactggccatataaataaaaacgtgaccgagcacagtggctcaagcctgtaatcacagcactttgggaggcggaggcaggtggatcacttgaggtcaggagtttgagagcagcctgaccaacatggtgaaaacctgtatctactaaaaatactaaaaaaattagccaggcgtggtggtgcatgcctgcaatcccagctactggagaggctgaggcaggagaatcgcttgaacccaaggggcggaggttgcaatgagccaagattgtgccactgcactccagcctgggtgacagatcgagactccatctctaaataaataaataaataaaatgtaaaccttattctcctttaagcgcaacgcatttaaaatcaggaatatgtattataaataaaatttgaatgacaatttgaagatttcataatatttttgtctctgttgaagctcccatccttttgaaatgggagcaagatacaactttcaaattttttatttgcaagctcttttctggtcttgaatcaaaaatctaaagcatggccaggcatggtggctcacgcctgtaatcccagcgctttggaaggctgaggcaggaggatctcttgaagccaggagtttgagaccagcctgggcaacatagtgagacactgtctstattttttttcaagaagttaaaacaaacaaacaaacaaaaaaaccttattgcaccttaaagatttctaggctgagcgcagtggctcacacctgtaatcccagcactttgggaggctgaagtgggcggatcacaaggtcaggagttcgagaccagcctggccaacatggtgaaaccccgtctctactaaaaataccaaaaattagccaggcgtggtggcgcatgcctgtaatcccagcttctcagaaggcygaggcagtagaatcgcttgaacccaggaggcggaggttgcagtgagccaagatcayrtcatcgcactccagcggagactctgtctcaaaaaaaaaaaaaaaaagatttctagactagtacctccattttatagatgaagaaacttcaatgtgattacatgatgtgctcaaatcccacagctagtaagcaaatgcaccaattataaaccaggtctcctaagcctgatgttctttttaggttgactttcaataaggtctcaattgttgctaaatcaattccatctctcctttggtccaagttccaaatgatttttgaataatctcaagttgtttatagtgaaccaatttagtcctgctagttcaattcaaaataagaattcatatttgcagttcaaaggaaaaagtaactggaacctgtatgaagatcacagtcctggtttctttggattgctggttcaaccctggatgcacattacgatcatctggggcttctaaaaataactaagccagggcctgtttccctccttggggcaagacctaactattgatatttgtacagcttccaagtgattctcatgtacagccaggggtgtaaaccattgcaggtgcttgttttagatattggcatacaaagcttcataggcttagaattctctttaagtctgtgattttctcagagccagaaggggaagtatagtgatcaaaagaaattagggctcaggaaagtctggtggggaaagcacagagctgtttaaatagaattgtagtgtccagagtaagggaagtgaaagcctcacttctctcccatgtgcttggagtaggatgtagactcttcaggtctggccaccctactatacggggagacattgacacagcagttccaaagagagcagccagggaggtaaaaaggccaatccccacttttttttttttttttttttagagaagaccaagacaaagaaaaaggataattgatttggaaaagacttgaagagggatyggtgtctttacctaattaaaagatttgctcaggaaagagaaattagaccaactctgtcgttttggaagtagaatctagggccagcgggtgggagatgagaacacatggagctgggaataaaacgggcagcttcctcaatggtgagcaaagccaagggaagcagggctggggaagtgctgctgaggaaacctcaaggattggaccggatggcctccgagtcccttcccactctcagagtctgtgatcctaatcaggggactcaacagaaacttaagggaaaccccctgacttctcgactcgatgtatctattggagctggatttttacaccccgtgttagcagtaacagattggcaaagcaatagaaaacaaatgcaccaattcatgtttttcagaaacttaacaaaagttagcccctgaagtcatttctgtgttatgtgtgtggaggaacactgccggaggaccctgaccagctctgccaactcttttttttctttttttggatctcactctgtcatccaggctggagtgcagtggcacaatcacggctcacggcctcaacctcccaaagtgctgggattacaggtgtgagccacacagcacccagcccgtgctggtcttgacctcccaggctcaagccttccaagaggctgggactacaggcatgtgcccccatgcctggctaactttaacttttgtagagacgaggtcctgctgtgttgccagtgctggtctygaactcctgggcccaagcgatcctcctgcctcagcctcgtgagccaccacatcgggcaagccctgccaactctttcctgacctgaggcagggctgaatgtaggaggttagggaattagaaacctaagggttgtcttgtttaattattattccggctatgtggagatctgagccattttccgttgtaagggtccttctggttgatgtgtatatgttgtggtttttgcttttttttttttttttttttggcaggtgtgcgaggganattttgagattgttccaattcattgtcatgattgagggattatgattaggattctgtaaagtaactagtccaggccaggtgtggtggctcacgcctgtaatcccagcactttgggaggctgagctgggtggatcgcctgaagtcaggagttcaagaccagcctggccaacatggtgaaacctatctctactaaaaatacaaaaattagccgggtgtggtggcacgtgcctgtaatcccagctactcgggaggctgaagcaggagaatcacttcagccygggaggcggaggttgcagtgagccaagatcctgccactgcactcgcgtctgggcgacagagtgagactccatctcagaaataaaaatttaaaaaaaaattagtccagaaaaacatctcacagctgaagtggtctcatgggaagggagaacagcactgcccaataggaatgctataatgggagccatagatctaaaatcaaattttagattttccaggagccacattaaaagaagtaaaaagaagcagataatatgaatttaaagaatgtattttatgccaggtgtggtggctctcgcctgtaatcccagcactttggggagccgaggtgggcggatcacttgaggtcaggagtttgagaccagcctggccaacatggtgaaaccccaactctactaaaaatacaaaaaactagccaggcgtggtagcttgtgcctgtaaccccagctactcgggagactgaagcaggagaatcgcttcagcgatttaggagaaccaggaggcagaggttgtggtgagttgagatcatgccactgtactccagcctgggtgacagagcaagactctgtctcaaaaaaaaaaaaaaaaaaaaaaaaaaagaatgtattttatttaactcagtttgaaacatcacttttacttgtggcctgtggctgcgaccacaggcaggggaggtggaccacgcatcctcattgctggtgcagtggtcaggctctgccgccctagcagcaccgagacgttggccgtcctcatgtcgcagagtctccacctctgctggttttgctttgcctgcttctactttatttgaaattcttgcctgtgcttcagcacttcccctggtttatgggctcctccaccctgtgggttctacttcctatgtcttcccctggtatctgccagattccatgctgctcttttttttttttttttttaagatggagtctcgctctgtcacccaggctggagtgcagtgatgtcatcttggctcactgcaacctcctcctcctgggttcaagcaattctcctgtctcagcctccgcagcaccagggattacaggtgcatgacaccacgcttggctaatttttgcatttttagtagagacggggtttcaccatgttggccaggctagtcttctgacctcaggtgatccacctgccttggcctcccaaaatgctgggattacaggcgtgagccactgtgcctggcccatgctgctctcttgacagcaagtgctctctgtgtcccattcagatgtccccagagagtcctgccttgggtcatgcagccattgtattaaacaatgaggatccccgttctcattccacaccacctctcaggctgcggctgacstctttgcaggcagctgccctttatgtagccccaagttgtccaatcagctgtgaccagggtggcagggtcatgtggtttaaaaaagcaaagcttgggtaacacagataccttgtctctacaaaaaaaaatcaaaaaatagtcaggcgtggtggcatgcactgtagtctcagctgctggagaagttgaggcaggaggatcacttgagcccaggaggtcaagggcacagtgagctgcaatagcaccactaccctcagactgggcaacagagtgagactctgtctcaaaaaatggataaataaataagcaagcaaaacaaaacatgggtccgggcacagtggctcacgcctgtaatcccagctctttgggaagctgaggtgggcggatcacctgaggtcagaagtttgaggctagcctggccaacatgatgaaaccccgtttctactaaaaatgcaaaaattaaccgggtgtggtggtgcatgcctgtaaccccagctactcaggaggctgaggcaggagaatcgcttgaacctgggaggcggaggttgcaatgagccgagatcgcgccactgcacttcagcctgggtgacagagcgagactccatctcaaaaacaaaaacagacaaaaacatggtccatccagcaggtcctctggaggcctctcagaggataagactctctgcatggcctgctcaggtgaaggtgcccatgargagaacagtgttacagaaagggggttcacatatggctttaaagatgtccaagaagcctcactagctgttmtgaaattagggcttcctgccctccctttttcctctccccacttccgtcttttacccttaatctggtccacaacaagatggcatgccttttagtttcttgtgtgattcagctgtggatgatttccatttataagcccaagatgcaagttcatccacctcccactttcctcctgagttattattgatcctctgggttggatggctctgcctgtaatagggacattcagtgagtttattccattggtcatgtgtgccttgaattttacacatttcaaaactgaccagtgatttctgtttcacttgctacaaaggagtattttgaatataactccatgggagtttgtttcaaactcacattaaaataggaatgaatgcaaaaacagcctttcctgggagcaggctttgtgggcggtgggaggaaggagtgccaaggtgtccaaaggggaaggaatagagaaaggaagatacctggtgggtgattgagggcccgaaagacagaccctccctgcttccaatttgtttttcccctggagccagcctgcggactagccctattggatattccatggcaggcatcttcccctgaaccctaaatgtgggtggctcattgtatttctatttcctgtagagtccatactggccttactctttgtcactgtttgaggctgatatatcccgttagttcctctatatgtaaaaatgcaatgctgaggttccaggtgccgagaccttgagagatgcaaatttgggagcagagaagggcagatccgaatcaaggtggtcttgggaactcatccttgagccccagggatgtggctgggatcttactgtgtgcagagggaattgatattccccaaaccaatcgagcacacagagcttctgagatgctaggcgaatggacagacttgaaggggaggaagatttggggatttttactattagctccgcttaagcaatctctgtttttttatatctgccagaaatatcggtttttgtcaacttcttcttttttttttttgagacagtcttgctctgttgcccaggctggagtgcagtggcgtgatctcagctcactgcaagttctcctcccgggttcacgccattctcctgcctcagcctcccgagtagctgggactacaggcgcccaccactgtgcccggctaattttttgtatatttagtagagacggggtttcaccatgttggccaggatggtgttgatctcttgacctcgtgatccacccacctcagcctccaaaagtgttgggattataggcgtgagctaccgtgcccggtctcttgtcaacttctagaaaaggaaatcagagagttgggacacctgtgagttcctttttttttttttttgagatggagtctcactctgtcacccaggctggagtacagtggcgcaatctcggctcactgcaacctccgtttcctgggttcaagtaattctcctgcctcagcctcccgagtacctgggactacaacctctgcttcccgggttcaggcgattctactacctcagcctcctgagtagctgggactacaggcgcccgccaccacgcctggctaatttttgcctctttagtagagatggggtttcaccatgttggccaggctggtctcgaactcctgacctggtggtctgcccacctcagcttcccaaagtgctgggattacaggtgtgagccaccactctcggccacctgtgagttcttctcagggaaacagtttcttaggaaggtggtaaatggcctgacagacttcattttttaaataggtagattatcaagaaaacaatggcattaatcacttccctagaagaagaaaggaagagtttaatctgcaagtgatcttatctttgctaaccattgtcttccctcttcactgatcactgagtttgttcttcgggcattctgtggctcacactctatccttactttcttcttcctccttcccagctaagttagactacagatgctcttcgacttacagcggggttacatcccaagaaactcatcgcargtggaaaataccataaatcaaaaatgcatttaatggccacgtggggtggctaacgcctgtaatcccagcactttgggaggccgaggcaggtggatcactagaggtcagragtttgagaccatcctggccaacatggtgaaaccctgtctctactaaaaatacaaaaattagccgggcgtggtggcgggcacctgtaatcccagctatttgggaggctgaagcaggggaatcgcttaaacccgggaggcggaggttgcagtgagccgagattgtgccactgcactccaacctgggcaagagggagattctgccgcaaaaaaaaaaaaaaamaaaacaaagaaaacgaaagaaaatgcatttaatgtacctaatctaccaaatatcctagcttagcctagcctcccttaaacatgctcagaacacttacattgttagcctaccgatgggcaaaatcatcttacacaaagcctattttataataaagtggtgtctatgtcatgtgatttcttraatacagtgcactatagagtacagtctcagttgtttaccctcatgatctcatagctgaccgggagctggggtggcctgccactgctagcatcatgagagagtatcctaccgcacctcgttagcctgggaaaagaccaacattcaaaagtcaaaatatggtttctacttaaatgctcatggctttcacacatcataaggtaaaaaaaattataagttgaggccaggcgcagtggctcacgcatgtaatcctagcactttgggcagctgaggtgggcagatcacctgaggtcagcagttcgagaccagcctggccaacgtgatgaaaccccgtctctactaaaaaggcaaaaattagccaggcatggtggtgcacgcctgtaatcccagctactcgggaggctgaggcaggagaatcgcttgaacctgggatgcagaggttgcagtgagctgagatcgcaccattgcactctggcctgggcgacaagagtgagactccgtctcaaaaaaaaaaaaaaaaaaaaaaaaaaaaaatatatatatatatatatatgttgaactctcataagtcagggaccgtctgtattctttcctgaatttatacccatgacaccttaaatataaaccctgatagatctcatggcatctatgttttgttatggaataacaggcttagttgctgaaagtcataaagtgacacagcacaactgaggactgctaatgattttgacttttttttgagtttataaaaagattgtaatttccccagatcagaaattgccccaatatgtagtttaattgatttgtrtgcattttatgtatccatatatattaccatcaaaaatggcttacataataatgataatgtatataaatagttttgctttgccaattataccatcttctgggatctcagaggaataaccagagacatgaccctgttttaatattctgttgctcctttaggtagcaatttcctttttaaaaccaaaaaataatgtttcttcctatggggacctatcttaattttatactgaggaagctaaaagtagtttgatgagaaagaaaaaaataagggttgggcccagctggagtatagtcagatgacatcaattagaatgcatttaagatttaagtggactggtgaatggkttggaaaaatagtctaaagatttgtttactctctattagagttggagagtagctcacactcactggtggggtttagaaacaaacaggcctgagtttaaagcctatctctacagctcaccgtctcttttttttttttttttttttttttttgaggcagagtttcacccttgttgcccaggctggagtgcagtggtgcgatctcggcccactgcaacctctgcctcctgggttcaagcgattcccctgcctcagcctcccgagttgctgggattacaggtatgcactaccacgcctggcaaattttgtatttttagtagagacggggtttctccatgttggtcaggctggtctcgaactcctgacctcaggcgatccgcccacctcagcctcccaaagtgctggaattacagacgtgagccactgcgcccggccccgccatctctttaactttgggcaaatgcctcatttcactgagcctgattcttcatctatatcctggggataaaatatctctttgtaggactgttgaaggattagagagtacacaaactatacctggcacatcatagaaactcattaaatggagagagagagagaaaacagatgaacttctcaggtgttgatttttgaggttttaatgttacgattctaaaaattctatgtgcaactaaaacaaaaaacaaaaccttctaacatttggttttgaaagcataaggtctaatttttggttagaaatcaggtatgtgaggccgggcatgatggctcatgcctgtaatcccaacactgggaggccaaggcaggaggatcagaggattgcttgagaccagcctaggcaacatagtgaaattccatctctacaaaaaatacaaaagttaaccgggcttggaggcgcgtgccggtagtcccagctacttgggaggctgaagcaggaggatcgcttgagcacgggaggtcggggctacagtgaggggtggtcgtgacattgcactccagtcttggtgacagagtgagaccccatctcaaaaaaaaaggaaggaaaggaaggaaggaaaaggaagaaagtaaaggatggaaggaaggaaggaagagagggagagaggaagggaggaataaattaggtatgtggctgaagaggttccctagggtatagttcttcttagcaatgtcacctgtctgtagtcttgtaccaggaagtagcattctgtgactaaagcctcctacctctccaggcttctcactttagacttgtctgaagccaaatggcctccacaacctgttcatgctgtctttttgttctggaatactctttatctttgctgctcattctcctctgttcaagatccagttgaaaagtcacggcctcagctgctttacactcctgcagaagcagctcccctgccccaccttatccacacttctcttgcagcacctcttccattgcatcttaacaatttgtgtagatctcagttccctctatgcccgggccctgcccacccccaaccaccagcacaccaaatgtgagcaggcaacctaatgattggcccaggacctagacttttatccagcttcatcactgagtgggcttccaatatcactttgcatgaggaacggagaaatggaagagaaatcgtctgcatgtctaataagatgttctctacaagtggagaaaattccccttcagcattacaggaagtttattttctgatttttcaattctagctcagcttttaagcagtccacagggtgggattcctaaatctaaaccccaactcccccatcacttccaccaactttttcaaaggacaaacatcctttgctgccacctrtgctaaatccattagaaaacactcttgggagtgtggtctgcctttgggagttcttagtcatctgattgctagggtcagtatcaattaccctccatccrttttgaggactgaatttgtatattgtttttgttttctttctattttaagttcgggtacgtgtgcaggatgtgcaggtttgttacataggtaaacgtgtgccacagtggtttacccgcacagatcatcccatcacctacgtattaagcccagcgtctctattagctcttcttcctgatgctttccctctgccaacgccccccaccagccccastatgtgttgttcccttgcatgtgtccataagttctcatcaatcagctcccacgtatgagaacatgcggtgtttgggtattctgtctctgcgttactttgctgagaataatgtcttccaactctatccatgtccctgcaaaggacatgatctcgttcctttttatggctgcataatattctatggcgtatatatacgacattttctttatccagtctatcactgatgggcatttaggttgatttcatgyctttgctattgtgaatagtgctgcagtgaacatacgcgtgcatgtatctttatgacagaatgatttatattcctttggatctatgggatcgctgggtcaaattcctatacgttttagttcaggtctagaaaagtaaaatcattaattaagggaakttagcagagttattttggccctgagaggctgtgatttaaaatattcagaaaatgtagttgaagtagttgatttggcttcaacttgaattccctatgtaattgcagggaattcaagggactctgaattcaattcagggaattcaaacagacctctttgcctttgagctagttttccccctaggcttttcttagcctgcaaaaatcctggttatctttgaggacccagttgagttggtcttgctcctaaatcattgacaagcccctaccctcaggcagagcagtttgtcctttgtgctccaaatactttttgttgtcactgtagttagggtttgcggtttaatcatctattgctgctgccagaaagcagaatcttggagggtagggagctttatatctttgcgagcctcaaccaacacaaagcttggcgtcagattgaattcaaattcaccttacgttgctagtatgaaaccaattgtgttgttgctttcatacaaatccagcagttttctgctaatgagacctgcaatgtaaaatttaaaaagaaaaaagaaaaaatatccaacaggtttctaccgtccaagtcactgatagaatctacaacagatcgacagagttacagctgtttcctgccccagttttaggcaccataaagattttctasaaggcttgccaatcatcatcatcctgtaagttcttacmctgctacgcactaaactaattgcctttccccctcttaaaggtaacaggtttattgaggtataatttacatagggtgaaatttatgacatataatttacataccataaaactcacccacttttgtgtacaatgtaatgatttttagtgcctttacagttatgcaaccatgatccccggctaatgtagaatcattttattactacacaaagaaacctcatgaccacttcccatttccacacccaacccctrcttttctggctctatggatttgccttttctggacatttcatattaaccaaatcatactatatgtgttctttcatgcgtagctccttttacttattgccatgtttttraggttcatccgtgttatcgcgtgaatcagtacttcactttttataggaatggatgctgttccattatatggatacaccacgtttattttttcatccattgatggacatttgggttgcttctacttttggcttgtgtgaagaatgttgctatgaacattcctgaacaagtcactatggggacacatgttttcatttctcctgggtagataccaagagtgaaactgctggtccctatgttaattctttttttttttttttttttttttttaattttgagacggagtttcactcttgttgcccaggctggagtgcaatgccatgatctcggctcactgcaacctccacctcccgggttcaagcgattctcctacctcagcctcccaagtagctgggattacaggcatgcgccaccacacccggctaatttttatatttttagtagagacggggtttcaccatgttggctaggctgrtctcaaacgcctgacctcaagtaatccaccagcctcggcctcccaaagtgctaggawtacaggagtgagccaccacgcccggcccttttttttaaattgagacagagtctcgctctgtcrcccaggctgaagttcggtggctccatctcagctcactgcaacctctgcaattctcgtgcctcagcctcccaagtagctgggactacrggagcacaccaccacacccagctaacttgtttgtatttttagtagagacagggtttcaccatgttgttcaggttggtctcaaactccttacctcaaatgatccaccygcctcggcctcccaaagttctgggattacaggcgtgaaccactgtacctagcccccaatgttaattctatgtttaacattttgaggacctgccaaactggtttccaatggattgcaacatcttgcaygcccaccatcagtgtatgagggttccaattttttcatatccttgttattgtctatcttttttagtttagcccttctagtgagtgtgaagtggtatcctcttatagttctgattagcatgtccctaattaacaatgatgttgggcatcatgtacttgttggcctttgatatatcttcttagaagaggactaagtgccctttggacgttatttctttgaattaagattgttgcaatcactgaggacactgagatayggagtctgtattacttgcccaaggacgcccagctagtaagtgtcagtgtcaagatgattacatttgaatttaaaatggagtcgattaggagatgaaattgtctgacattgaattaaggacacactatatggacaaaatgttagtttaggtctgtaactcctaaatcctgtgaccaagaaaatagctaagactcatttaaaaaataaataaatgggccaggcctggtggctcacgcctgtaatcccagaactttgggaggccgagatgggcggatcacctgagatcaggagttcgagaccagcctggccaatatggcgaaaccccgtctctagtaaaaatacaaaaattagccgggcgtggtggtgtgcgcctgtaatcccagctacttgggaggctgagacaggagaattgcatgaacccaggaggcggaggttgcagtgagccgagatcacatcactgcattccagcctgggcgacagcaagactctgtctcaaaaagtaaaataggcaacacggtggctcacgcctgtaatcccagcactttgggaggctgaggcaggtggatcacgaggtcaggagttcaagaccagtctggctaacttggtgaaaccccatctctactaaaaacgcaaaaaaattagcagggcgtggtggcaggtgcctataatcccagctactcgggaggctgaggcagagaattgcttgaacccaggaggcggaggttgcagtgagccgagatcaccacactgcactccagcctgggtgacagagcaagactccatctcaaaaataaatacataaaataaaataaaatattaaataaataaataaataaataaatggggccgggcatgatggctcatgcctgtaatagcagcattttgggatgtggaggtgggcagatcacctgagatcaggagttcgagaccagcctggccaacgtggtgaaaccccatctccactaaaaatacaaaaaattagctgggcgtggtggcaggcacctgtaatctgagctactcgggaggctgaggcaggagaatcactggaaaccgggaggcagaggttgcagtgagctgagattgtgccactgcaccccagccttggcaacagagcaaaaactctgtctcaaataaataaataaataaataaataaataaataaatgaggtggtcagagagctgctgggaaaataaataaagcaatttaatttaatcctaatatgtagttactatgattagattccttttctgcgattttatgtaaaccatcattcctctttttaagaatcaagtgggtacagccccccagccccctcctttctaataaaactgtatcttctctttctagtctatatccttttcctcccagctcttgcacggtgagctgaagggttcgtgctgaagtcctagttggtgcctttgcttttacttttttggctttttccattttgcaagagctgtgccttggctgtgatctccatttttgtgggtgctcattggtctgcgctatcgacatttgaccacctagaaactttggagttttgtttaaatccacatcaagccagctcaaacttccttagtgatttttgctgctttaaatactaccttttgtgttcctgagcttgacaaacttaggacagtttctgacagggtttcatgttcttttgtttttacctcraaggattcataactgtgtctctttctagtattctccttattaggaataaagcgaacttcaaattcctatgatygttgcaatcctaacctccttcgtgccttgtgaaaaatcataacagttttcatgaagggtaaatcagtcacccttgtagaattttccattcaaatcctgagccatgtgaagctgtttttagctgctttcctgagtttagtcctggtctgggagactcaagtgtcttcagctttgtgaatcaggcaaaagccagcagtggaggagggtgtaagacttccttgcttttcagctcccaggcaatacaagggatggttaagatggcagggtaaatgaaattaaagaaaaggcaaggttaagaaataaaatcagttacaatggataggtcactgttgacaagatgtggggcctgaaagtagaaacctggagttgttccaaaggttgcagggtctagttccaagggcagctagaaatgacttgatcttttccccatgtgtaatattttcccgatgtgtgtttttagcttcttaaactgattcctgtaayggcagcctcttttgctgttctttatgcctcactgctgagcttccctgccatgtctgtgcatgctgacttgctgggaatgggttacagatgggctacacgttgatctcagcagcatatacggcaggcaaaacccaggacagttgaagccgtttggccagatacctctggctgagagcagctttgtccattttatctacaggtttcagacaaatgcagttgaccagtgccaacaatgtggcggttaggcccactgaacccctgtgtagccaaaaacctatgtatagcttttgactcccctaaaactcaactactaaaaacctactgttgtccaggcacggtggctgatgactgtaatcccagcactttgggaagccgaggtgggcggatcatgaggtcaggagttcgagaccagcctggccaatatggtgaaaccctgtctctactaaaaatacaaaaaaattagccaggcrtggtggcaggtgcttgtaatcccagctactcaggaggctgaggcaggataatygcttgaacccagggggcggaggttgcagtgagccaagatctcgccattgtactctagcctgggtgacagggtgagactccgtttaaaagaaaagaaaagaaaatattactctttgaagatctataaaatatttaaagatctcagtgagttttcaaccttttattttatttattatattttaaagctgatttttatgaaagcagtatatccttattttaaaaaygtaaacagtacacaaaagattaagaaaaataaaacatgtccatacttcttcatccttctctgtattacatctttttccagagataacattaataatatgttggtaatctatggcacacccatctgtatataaaaatatactttatggaatcattacactttttttcttttatggttcatgattttatgtcctaccttaagaaattattgccatcctgagatcacaaagatttcctttgaccttttattttaaactagttcaaacttactatacttaacaagaatagtataaagagctcccgtataccttttatccatatttcccaacccataatattttgtacacttgcctaatcatatctgctctctctcttattcatatatttttcttaaactatttgcaagttatcccttaatatttcaaagcatatttcctagcaacaaagacacccacccccatgtaaccacagtacaactatcaagtgataagtagcattactatttaatccacagaccctattccagtgtgcatggttatactcattatgtccttcatgaatctgggatctgatcaagaatcttaagctaaacttyggccatcatatctctttagtcccctccagtttggaacaatttctcagtctgtctttgtcttccaagatctcatttttgaagagtgcagctctgatgatttctcatgattaaatttaggttataccttttgggcaaagatatggtggaaataatgctgtagagccttataatgatgatgactttttatcacttggctaagatagtgcctgccacatttctccagtgaaaagctaggaagtgtttttatttattactaagtagatatcctgtttatcaaacaatcactctccagttttgccattcattggatcttgcctgactcagtttttactgtgatcgttaccaaatcatgaattttaaataaaattcatccttcttctgtgtttattagttgacattcaactattaggtagagccatcccttctcctgtgtgttggcttatttatttatatctctggggacttagatttatatttattcaatgggttataatccattattctttttacttactttactgctcaaattgtcccagacttggccagtgaaagcctgttcaagctggcttgtgtgttctttcaacaagtcccagtgattctttttggcacaggagatgttccaagctaatcctgcacttaacctgccccagtcttgcaatcagccattctttccaagaaggaagccctggttctactgaatagagaatggtatttaaagatcaaaatctgggaagctgaaacaggaggatcacttgagcctaggagtttgaggctgcagttagctaagatcttgccactgcactccatgcactccagcctgggcaacagaatgagaccctatctctaaaaaagttaaaaataaataaatgaaagtgaacaccacagttctccttakgtcaaaggatttttctgtgaagcagatctgggcactgacaccaagatattcctgggcctcccagaaagggcaccacaaaaggctgctgcaacaagagcaagagcttgggaacaaagccgttcacattcaggtcttgggtcagccattgctacctgagtgattaggggcaaacaccagtgaccttctgagtgtagcacctaatgccagctatcagcgtcatcactcatactttcctggtaccctcttattaccatccactccacttgccagggcagccccctcccactcctggtataatctagatatataaaatcttgtttttgtacttcatataagtggaaatatacagcatatgttattttttctatctggcttgcttttgttcaacattatgtttgtgagattcaccgttttgttgcaggcagttgtatttcattcattctcattgttgcatagagagaagaacccatatttggagacctttttttttttttgagacgaagtctcgctgtcacccagactggagtgcaatggcgtgatctcagttcacttgcaacctccacctcctgggttcaagcarttctctgcctcagcctcccaagtagctcggattacaggcgcatgccaccacaccyggctaatttttgtatttttaggagagacggggtttcaccacgttggacaggctggtcttgaactcctgacctcgtgatccacacgccttggccttctaaagtgctgggattgcaggagtgtgccacygcgcccagcgtgaagacatttttggttgtcagaggttgagggagggaagcaaaaggtgctactggcattagtgggtagaggccaggggtgcccctcagcatcctacaatgcacagggcagcacatcctacaacacacagccctcacaacacggcatttttcagcccaaaatgccaatagtgcccacgctgagaaaccctgctctatagtaactgttggtgggcatttgagtagtccccagtttggctctattatgaatatggctgcagcgaatcttgacttagatatcttttgatgaatatatttcatttctgttgagtaaatactggagaatggaattttgggtcataggatataggtatgctcaactttagtagacattgtattgttggtttttcaaagttgtcataccaattcacacttctccatcagggcatgagggttgctgttgctccatatcttcacgaattgaattggtattttctgccttacttcctttctctctcaatctctctctccycttttttttttttttttttttttgagacagggtctcgctctgtcacccaggttggagtgtagtggcacagtctgggctcactgcaacatccgcctctcaggctcaagcaattctcctgcctcagtctccccagtagctctctgtctctcttttaatccctttcctacaccgtcttcgaattcagcttatgaccactactcaatgcagcagtgtttattgttaaataattctgttctgtattttgtataatatggattgtgcccagatgtggttgctgtgtatcgtaattagagatggtgtttgggagatgacttgtaaccaaggtttctctcatttaaatataagcaccrggtgtttgtgtattcattttctcccactactaccaccaattagttttccatagtaaattttgctctagtggttagattgtccatcatttgagttcatgtttactatgtatttccaaattatatagtagtttaccccaattttttctgtttgtttgagacggagttttgctcttgttgcctaggctggggtgcagtggcgcaatctgggctcactgaaacctctgcttcccgggttcaagtaattcttctgtctcagcctcccgagtatctgggattacaggtgcccaccaccatgcctggctaatttttgtatttttagtagaggtggggtttcgccatgttagccaggctggtcttgaactccttgccttggcctcccaaagtgctgggattataggcatgagccactgagtccggcctaacwttttttttttcttacaatatattaattatagggaaagtagagatagggtcattgagaaaaaaaaatcgagtaattttgctctagtcccttgactcccaaactttggtcctaggatgagtggtttcagctttatctgggaccaaaatgcaaattattattattattattgagacagggtcttgctttgtcacccaggctagagtgcagtggcaccatcatggcttaccgcagccttaacctgccaaattaaagtgatctccccacctcagccacccaagtagatggcatgcaccactgtgcctggctaactttttaatttttttgtaatgacaaggtctcactatgttgctcaagctggtcccaaactcctgggctcaagtaatcctctccctcggcctcccaaaagtgctgggattgtaggcgtgagccaccacacttgtcagaaatgtaaattattaaactcacctggaacctactgaactcttagggcaggggccctgtaacctgtatttctacagctcctccaggtgatgagatgtaaaagtaaagtttgcaaaccactaatcagtactacccttatcctcaagctacagacacacccaatttggctgatagttgtggaaaccaatgttttggtaatacaattaatgagtcagtcaccctcccagtgttaaacaatttccacaagtaaattcagtggtaagtctcatcttgagatgttcattggccgtgacctatttttggcaacttagttttcattttccaaggccccaaatgtcaggattttcatttttccaattgttagatgtatgctaatagaagactgcccctagccacatgcgccttaacatttgcctatttaaatactttgtatactgtcttttgcaagtatttgcttggcatcattcagcatccaggaagtgtttccatcataactttgctgcatcaaaatcaggtgcagattacaccagctcacacagagatggcaagaccacctctggacttgccgcctgggtctttaaaattctgcatgttaaacttctttccccgcctctgagataatttattttttattttttaatttttattatttattattattattaatttatttttwttttttgagatggagtctcgctccgttgcccaggctggagtgcaacggcacgatttcggctcacagcaacgttcgcctccctgattcaagcaattctctgcctcagcctcctgagtagctggtactaccggcgcccaccaccatgcctgactaacttttgtatttttagtagagacagggtttcaccatcttggccaggctggtcttgaactcctgacctcgtgatccacctgccttggcctcccaaagtgctgggattacgggcatgagccactgygcctggctatttttttttattttttatttattcatcttttgagacgcagtttcgctcttgtcacccaggctggagtgcagtggcgccacctcggctcactgcaacctctgtctcccaggttcaagcgattctcctgcctcagcctcccaagtagctgarattacaggtgcccgccaccatgcccagctaatttttgtatttttagtagagatgggggttccaccatgttggccaggctggtctcaaactcctgacctcaggtgatccacccatcttggcctcccaaagtgctgggattacaggtgtgagctactgcacctggcctgagatgagaatttaaaataatgctttgggttctgtgatctagacaacaatttcttttgttgctaattagatgaaaggtatagaaagtaaaatgattgggcccccggagaagcaggattttccccagggaatccaacaaatccagagaatgtctttgttacgggaggattgttgttttagttaaagatgtgctttggaaatgtcttcttccttcatgttagtatcatgatcattatcatgttaaaaaaaaaaaaaaaatttacaaaccacctggccacccagagcagaattacagtcagcactctgtttccccaggtcctgaatccttggattcaaccaacctcagcactctgtttccccagatcctgaatccttggattcgaccttgggcgggggaaaaagagtggttgcttctgtactgaatatgtacaggctttttttttttcttggcattattccctaaggaatacagcataacaactgtttacatagcatttacattgtattcggtattataagtaatttagagatgatttaaagtacaagaaaggctgtgcataggttatatgcaaatactacatcatgttatatcagggacttatgcatttgtggactttgtatcctcagaggtcctggaactcatccctggaacagggacgactgtacttaatacgctgtccaaaatgaattggactgccagcattctctactttttcatgtattactcttaggtcaggggaaaaaacaaatctctgtattttataattaagaatgaatccctgagtcatttgacttcttcaatgacagagcaagccacgtaaaaatacccttccaaggaaagccatcagggagcctcagaatgggtacagtttcaccccatttacctaaccttttctgccagtgcagctgagcctctcaacgcgactttaacaaactctctctgagccagtcttctcagtgccatctttgctttcattcaactttacatgtctagtgttgctrctcaaacctgtgtcccctcaagtcctttcccaactaaaggatggtggttaattgacaatagacaaacaagtctcagaacaattatgagggtgtaatgaagtgtgcattcgtacatgcaattaaatagaggaaagatgcaggagggaatgtgtacacaatcctcctccagctggcacgccctgcctggaggtgctcctccactggaagcctgttgtgtgctcctctggcaaggagatgaagtcccagatttttagtgcctcatgcaaggtcttttccacctccttcactagttgacttagcctggcatgtagcaaactctcagtgtcatctgcctccaacacagttttccccaggtctttcgtaccttggccttcacatgggaagccaagagatgctgagcacatggaggagggcaatcttttccccctttgattattatttttttaattcattgagattctaagtcctctgtcatttcaaagaaaggatactctctttcctttggagctatgttctacatatcatcctaagtggaaaaaaatcattaaataggccgggcgtggtggctcacgcctgtaatcccagtactttgggaggccaaggtgggcggatcgcttgagcccaagagttcaagaccagcttggccaacgtggcgaaatcccgtctcttctacaaatacaaaaattagctgggcrtggtggcacatgcctgtaatcccagctacttgtgaggctgaggcaggaggattgcttgascccaggaggtcaaggccgcagtgagacatgatggtgccactgcactccagcctgggtgacagagtcagacactgcctcaaaggaaaaaaaccaaacatacctcaaataatgtctgcaaaataaaagactatgaacggaatatggagaaagcctctaagatggccccaggggagtgttaacatgtctagcctgattaattggctagtttgggaataattctatccaaagtgagtgacaaggcatggctggctagtgtcaactttgtcctcagctatagttaaaggcaggcctggagggctgacttgttcagtctcagtagcaaaaaagtgcatggtgtctggataagcaggttgtacagcctattagaaaagaaaggtaacagtcttcctctaatgcaataagggattttttttaaagttctcctgtcaagattttttaataccagaatctgagagtggagaaaattggcccaaggacagacaaaagagctgggaggaaaatcgactatatttttcaacacacaatgccatttgaagtactggattgagtacggaagtattaygaacattcctaatttggttagtgtctatatttcttaatatagtaatgctattaatgtctgtctcctaagtttgtataaatccaaacccccatgttattggccagttggaaacaataatgtaaacagactctgttgcccaaattaagttatgtgcaccgaatgctttgtcaaactgtaactattttaatgttcattctaagccacaaatctttgccaaagaagatactgaattactctcttttgtttaggagtagaatacacaataacctaatatttaaaagtattattcagaagaagaaaaacttaggattgaatttttctttatcataaattttagatcattctctttgctcgattccatagaagacactaagaattagactgaactgctttctcattgtattgttttctacttgacctaaaaatccaggggtgggttatatagagagtttatttaggagactttggtaagggagagagaaaaataatgtacaagctggaaacgcatgaaaaatgtaaacaatgaaagttagaagaatggaagcgacagtgtgctcaggaaatgatgtgtcatttggtcggagttcagggtgcccctgaatcccaggagggtagcacttgctttcctgcccattgtgaaggcaaggaatccgcgtgttgtcctatcaattccattcayggcagggtagagacttttcaaatggaagaaaatgtgcattaaaggacattctttctgcatggggtggggtagtgaacgtgttggggttgaggcacggagttgtttaggtcaggtgaatagtgaggggaaatgggcaggcagtcaatggttaagttggtgttttgcaagccattttaagaggataccaaataaaatgcattaatctacatttcattaaaaattagttggtgggaaagtggaaagttgaagatgagaactttccaagtaaaacagcttcatactccttggccagaacaccactatatttacaaataggggataaaaacacccacttcctaggtggtccataagcttaactgggcaggcatatgacacttctgagcatttgatgccgttctctgggggggttaaagcctgaatgcccaccaaatcccctgtctgagcatcatttgtgaccaagattcaaattatttcccatgaagctctaaggtctcatataactcagtggatgtagctcacgacttcttcttttgaccccagtattctaagacaaacaccacagccgaagctggaagtgagaggagaggggttcgtttcagagtcaggagcccaaggcgccccagcaatttcagaccccctgggacaggaactcctcctccagtaagctcttgttttgaaaaacagtggggtggkgccaaaaaagcattacaatggagctgggatggatgaggctttcttttatttgagatgtcacttgtgtcacgtttcctgaaacagcacgttggaaaacagaagctattttctatcccgtgggttgcgctggaagagctgagaggccaggctgtggatccttgccacgaacaacaagagagggcaagtccagccgcctgctaggggactagcaggaagcggcacgcctgccagagctcatcacttcaactctggctttcactgcgctcattccctgaatggcagtaaccagggggcgggggtggcatgggaaatgaaagaaagagatatgggaaactaaatctgccgggggaaagagasttaccggagttttagcaaaacagctagcagatgcaaacggggaggcagagggaggagggaaggctgggcttcagcaacctgccacggggatttaaacaaaggaggtttgagagaggcgggatctggctgtaatatcggcacagggacagagacagcagctggactctcgggatgaaacggaatcgattcccagcgtctccaacagggcaggagtgagtggagtatgttgcaaaataagaactcagagaaacgagtgagtttggaaaaaagacttacagattttgacggtctcttgacatttcacccttctttgaggcatgcctttatcaatgcgttacctcttcataatttctgtctctagtgtaattatttttatcgtcttctctgtgttcaattttgggggagatccaagcttccaaaggctaaatatctcagaccctttgaggctgactcaagtttgcacatcttttatcaatggaaaaacacgtttcctgtggaaaaacaaactaatgatccatgagaagtcttcttgyaaggaatacttgacccagagccactacatcacagcccctttatctaaggaagaagctgactttcccttggcatatataatggtcatccatcatcactttgacacctttgcaagrctcttcagggctatttacatgccccaaaatatctactgtgttcatgtggatgaaaaagcaacaactgaatttaaagatgcggtagagcaactattaagctgcttcccaaacgcttttctggcttccaagatggaacccgttgtctatggagggatctccaggctccaggctgacctgaactgcatcagagatctttctgccttcgaggtctcatggaagtacgttatcaacacctgtgggcaagacttccccctgaaaaccaacaaggaaatagttcagtatctgaaaggatttaaaggtaaaaatatcaccccaggggtgctgcccccagctcatgcaattggacggactaaataygtccaccaagagcacctgggcaaagagctttcctatgtgataagaacaacagcgttgaaaccgcctcccccccataatctcacaatttactttggctctgcctatgtggctctatcaagagagtttgccaactttgttctgcatgacccacgggctgttgatttgctccagtggtccaaggacactttcagtcctgatgagcatttctgggtgacactcaataggattccaggtacgtacaattccatatttcatgcaaaagaaatgtgtcgtatttgaaagggctttagaataaccagccactttttattaggaagtagaagatgaaaactggaacatatatagttctcaccctagtcctttctaaatgcagaaagatgttcttttttttttttgagactggatctcactctgtggcccaggctggagtgcaggggcaacatcatggctcactgaaccctggacctcctgggctccagcaatcctcccacttcagtctcctgagtagctgggactacaggtgcacaccaccatactgggctaatttttaaaaaaaattttgtgcagacagggtctcgctatgttgcccaggctggtctccaactccacagctcaagctatcctccccatcttggcctcccaaaatgctgggattatagccatgagccaccatgcctagcccagaatgatgttctttatgtgataattcacatgttctagcactactaagtaatacctttccatgstatcacttggtggtccatcaagttctttttcacacatcatcttattacatctttaccacaatagctgttagtccacactggtgttctttctttcctctaaatttgtcaggcttgctcttaccccaggatctttgccttggccaccctcctgcctactccaggcctccacaggctccttccccttagccagatctcagctctcaggtgtcagcagctctgatactccccctcattggccagcacaccactctgtttttcttttaaagagtttattgccctgtggaattaggatatttacctatttgcatgggtttgttcttggtctcctctgcatttgttccatgaagccagggttattttctatctcattaactgctcctcagtgcttagaacagagagtaaatgctcaataagtatatattagatgaataaatcagtgagtgagtgaatgaatggtaaagcatgaagctttactatggcaccagagctgtctccctaagacattgttgagctgagaaatatttggactcatgcatgtaccatattatatgtgtaggatttttaaaaatacattttatttcaaataaaataatgagatcctagcagaaactccttgctttctcacccgaattttcctatctttactaatttaccagaccgattgttttttaaagtgtataaaacatgatgggatttcttctgaagaaaacagcgtgctttggactcaatgaaaaatacaaaatggatctctgatgaactagacagcattattatagcaagagaaaagcaatcattgttctggctgttgggggattgccaagttcgaaaggctggtaggtgctctcaggctgcagggcagggcctgctgggcgataaacacgccggcattctctggaaaataccatgcctggtgtttgaatcccagggtgactttcctggtgaatgcggctcactcgtatgctgcgcacactgtttccgcacctgcctctgcctgggttcatcctctcttcacctttgatctgttgtttccaccattcgcatatcattgaggagcattaggtacttaggagctgattttcatatttaaatatttattccctttctattttcattctttccttaaaattcataaaagttgggtcccagtcaagtggttccttaagtattgtgctgagatgagggcatttcataagttaacaaaagtctaaattgttgctttttttttttttttttagaaaaacatgggttttggtttctattaaatgtaaatatctgtggttattttgccagaagcctggtcagttttatcaatgtcaaataatataagaaaatcaagggaaaaagaattccccttttttccttacccctttctgatctcttgggagaccaaaagaatgatatctggataggtgtaggagagaatgctatctagatgggtataggagagaacgacatctacatgggtagaggagagaatgctaccttttcttctcttttttaggagagagaacaccttttttgctgtaggtttatgccatggcatgctggcttctgccttctcactgcaacagtgtggccccatgtaaatcatagaacctcatgggacctcaaatctctccagctacaaaatggggaacccaggtagaaagacccctttcattcctacacatacctttctttgcagaagacacaatgcctagaacaatgtaaagacctcccacgctgctagtgggaatctatagagagaaaggcagaagggctggtgagcctggatcatgtactgcccatcaactttggcaagcgcatcccatttcccttgcaggaattagaggcgagagctcctccagagagcaactgcctggagaggaaggccattgcggtccatgtcagtggtctgtcctgtctgattctgcaagggatgcctttcaggataacgtgccatgtcctggggctttgtttctttcctttcttagactctgggcaacatcctggttcagggagaaaggatatcctgcttctaggtaggccttcacaaattacaagtgaattacagcaaacaaatcttcaaatgctctagccctagtagtgcctctctctaccttcaaaggcagtggaaaatctaatcccacgctcgagtaactcccatggttttacacttgagcattctttgtgatttaagatttggcatgtgaatctggttcttatataaccacacagccgttaatcaatatcagctcttctattttttttgagacagagtctyactctgtagcccaggctggagtgcagtggtgcgatctcggcttactgcaacctctgcctcccgggctcaagtgattcttgtgcctcagcctcctgagtagctaggattataggcccccaccatcacgcccggttaatttttttgtattttagtagagacggggtttcaccatgttgcccaggggtagtctcgaattcctgagctcaggcgatccgcccacctcrgcctcccaaagtgctgggattacaggcatgagccactgcgccgggctgagctcttctattttcaatgtcatgttttaagaggaaaaattcttctgtccgtacagggtaaacatctttttgcaaacgtgcaagtgcaggtggtgctgttcatttcttccctcaaagcgaccgcctccctttctcctaaataccttaaattaaaatgtgttagcaagaccctgtgcaggcatttcaggtttcccaaaacacccccaagagcaatgtgaccgagaaaatgattagtaccttagaattagatggtttcagaaaacaaagtgaaaatcggttcgaattggcragactgaatagaagggatattcatagaagtagcagtaaatcacagagcttcacactgccttttttttttcttggtgcctttctactgagagtgacttctcttttggttttcaaccactaggctctctctacactgttagaaatggtgatacaacaggccagaaagaggtccttaggggccccagtctctcactccttttcaggggaaccaggtaaagtggttgtccttctcttctgtgtggcttgtgcacagatggggtgtctagccccctcccttctgcttacattctcaaaggaaattctccaggaccacagatttctctgacccacgttacagagcatcaggctgtgacagccgtaacttctgacttccggtacacccttatattttctaacatctctgagctttgtaatgattgctctaagtcactttaagaaaaacccatgtgctctagctctcccggctcttctttcagaattttcttttctttttctttttttttgagacagagtttcactcttgcccaggctagagtgcaatggcacgatcttggctcaccgcaacctccgcctcctgggttcaagcgattctcctgcctcagcctcccaagtagctgggattacaggcatgtgccaccatgcctggctaattttgtatttttagtagagacggggtttctccgtgttggtcaggctggtctcgaactcccgacctcagccgatatgcccaccttggcctcccagagtgctgggattacaggtatgaaccactgtgcctggcttttgcagcattttcatctgcctatcttccccaaggcagagcacctgaagccatttaatttttgctttacgctttgtgaaattgttcagcatctacccaagtggccgctggttgatcttcttcccagtccattcccatggctagaatgtcttcttacacttcagggtggtttcgtctctaaggaacagagctaccccactctttggcttcagctcctgtttttccctcgctgcactaagtgtgcttttggagtctttgctcattcattactctgacctttctcatgccatgatatttttcttccataagaatgttttcatttatttcgtttcctttttccattttgtatacgttttcctttttttttttcagggcccttttgtcaaattctctcaacctcagaagggatcacatgatcccatttcctcattttttaattctaaaaatatcgtgtttcctactttgatttattttgctttttaaactgtgacttttatttatatgtgcacattctttgggagggtgttaggactctttcggttgcaagtgtcagaaactsaactcaaaggagcttaaacaagcaccagaagttaccgggtcacacatctgagatgcccaagggagctcccaatcaagctggatcagcgagtcaaaccgtgtgctcaggaccctttcttgctaggtcatctccctrtggggagaccaactgtcccagtttgcccaggtctgaggggcagtcctgggcatgggaccttgatgggtacaaccaggtcgagatggtccccctatctctctgcatctctgtgctggcttccatcaggcaaattctccccagaaagccagaagtagctccaagtgtacttgcttttcacagtggttactcctgggggacaagaaatactttttcctgagagttccagcggcagcttaagggagacctcagattggccctgcttggtccaaattcccatccctggttgggcacggtggctcacaccggtagtcccagcactttttgaggcccaggcgggaggatcccttgagcccaagagtttgagaccagcctgggcaacaaagcaagaccctgtctctacaaaaaataaattattcaccaggcatggtggtgtgcgcctgtacttccagccactcaggagaccaaggcagaaggatcacttgacagagtcagaacttctctgaaaaaaaaaaaaaaaaaaaaacaaaaaaaaacccacaaaaacaaattcctatccataaacaaatcacaggggtgaagaatgctcaccaacatttcttgggtcccttttctaccctgaagccaagggctggggacaggctttggtggaggaggctgctcagggtgacgctgggcagagcaaagcacaggcccactgcaggacaccctttgtcctacactgggtggcagggtgggttaagggttgttaacaagcagcactttgggagactgaggtgggtggatcaccagaagtcgggagttcgagatcagcctggctaacatggtgaaaccctacctctactaaatatacagaattagttgggtgtggtgcacgcctgtaatcccagctactccagaggctgaggcaggagaatcacttgaacccgggaggcagaggttgcagtgaattgagatcatgccactgaactccagcctgggcaacagagtgagactcggtctccaagaaaataaacaaataagcacatccctcctgtgatattagaggggcaagatttagttttatacatatgggtgtgtgagtggatacaacattaaccatttgtacaattttaactgacctaaccgtacccttttctctcataaaaacatgttcaataataatgtcactctattatatttggacaatgcttaatttgcaagggaaatttcttacacattatctcctttaattcttataaaaccccataagaaggggrctgttcccattttacagatgagaaagtttaagatgaaaatatgtgacttagctgggcgtggtggctcacgcctataatcccagtagtttgggaggctgaggcctgtggatcacctgaggtcaagagttcgagaccaccctggccaacatggtgaaatgccttctctactaaaaatacaaaaattagcctggcgtggtggcaggaccctgtaatcccagctacttgggaggctgaggcaggagaatcgcttgaacccaggaggcggagcttgcagtgagccgagattgtaccactatgttccagcctgggtgacagagtgagactccatctcaaaaaaagaaaaaagaaaaaaaaaaaaaaaaaaaaaaatatatatatatatatatatatatatatatatgacttgtccaaagacaaatattgcatatgcttaacaagaaatcaaaataaaaagaaacatccaagggaaggaggtagcacatgttatccgcttattttaaattgaacccagtttaatgaattcttcattgaatgattgcaattactgcgaatattctgaagatgaaacttagctaattctaagtcttattcagcttgcggaatggttatataattagacccactcaaaaactttctctttcatcctgatattcagcccattttcctggagattttggctttttcatgtgagcagaggtgcaggaaagatgaaggcaattaatgtttactgaacatgtgcctatgggtttagagtatctcagytgaatctccacaagaatcccatccagtgggtacttaaatccacattttgcaaatatgaagacgggaccagaggggctgagtaatgtgccctgttccaaaagcaggaagcagagtagagaatgtgtgtggcgggcccctcaaattctacatgctctgaactaaactcagactctcccctttgcaagtctctgaatttgacaccattctctgttagctcagacctgcgggctggtctcccttagctctccctaccctcatccctgctgatctggctcttcctggagtgtagaagtcaagggctcaggctccagagtcagagagaaccaggttggactcctggctcctccatcaccagccatgtatcccccgacatctgtcaaccttggtcttagcattgcaatatggcacagatggcagaagcctggaccctgcagccagatggcctgaatgtgaatcccggctctgtcacttagaagttgtgtgacctcggacaaagtacctgacttttgtgtctcagtgacttcatctgtaaaatgggacaataataatagatatcaaatatgtaaggtctaaatgagttattgttattgtattttcatctataagatggatattcatttaataaatatttatggagcaaccagacactttgctgggtactgagaaatagtagtgaatgagacacataaggcccctacctcatggaggatacattttagaaggaagagacagccaataaatagtagagagagagaagccagatcattagagttgatgagaaatgctatgagggaaatacacagggagcaacctactgtagatgaaatgggacaggaaggcttcttggcaatggtagcacatgaactgcctcccaaaatgagagtgagccagccacgcacttgtgaaagaggtcccaggcagagggaatagggatcgcaaaggtcgtgggtgagcctggtgtctgcagagccagaaaagcagcccgtgtggccatagccgagcgaacgaggatgagagctggactgagcatgaggcaggcagtgcatgaaccacacaggcccttgcaggaggccagagaaaaacagatctgacagtgccctgcttgtgggcaagtgctgggcacagaataaacactcagcaaaatggatcttgccacaggcctgttttctgtggagtcctaattagggaaaaggagtcaagctggtgggatcaagggaaagcagagggaaagcagataagctgcaagtccgcctttcttcatggtccaggacacaacctcctgagccaataattcacgattttcccacgaccagctatcaccagacacctgcagattagctccccgcaaccttggcattgtcagtactgcacaaagctctcttcagcatgaacactaccctataaaatctccagcaaggctttgtttctttgcagtcagcttctgctggcctgcccgttgccttttcgcaatgtatcttcctactttcttgaagaaatctacctttctctacctacaacagtcttggtaaattcttcytggtaaattcttttccccccacaccaccggccaagatagtatcgctcccccgtgacacgttccacttctggcgccgtcgtctacccttcttctttctcttaaagttgtataatttcttcctaactagtttccctgttccgtgctttaatccatcctccacagtgacaggatggcctttgtaacatgcacccatgatcatgcgatcacatccctctcctccttagaagctgtgtatggattcccttcccctacggtgtatggatagcatcccagcaccttcaccaaacacagagagctcctcgagatctggcccccttggcctttccagtgacttctctagctgcgcccttccccagataacttgcggatccctgttctgccactcccagccttcctgccctgacgcatgcagtccctctcccgggaggctcccggatgctcttcctccctatcctgcatctgattgatgtgtgcttttttttttttttaattcagcttagagtcacactctgtaaaattcttttcctgattctcactcatctggactcccgtacaacgttgtactattattggtctttttatttttaatctttaaaaaaatttttaggagacaaggcctggctctgtgacccaggctggagtgcagtgatacmatcatggctcactgaagccttgacctcctaggctcaggcagttctcctgcctctgcctcccgagtagttgggactttaggtgccaccatgcccagctaatttttaaaatctttatagagatagaatttcactgtgttgcctaagctgatcttgaactcctggcctcaagtgatcctcctgccttggcctcccaaagcgttgggattataggcatgagccactgcgcccaaccatatcagttttgcagtgctgtgttgtatattcctagtgaccttttagaataggcttcaagggcagcagctgcacgggcctatttctgtttacacttagcatacctcgggcacatgagcagtactcaagatgatggagtcccaacttatatttgtttaacctacacagacttaattaaatgcatgcacacatgtacgcttgtgcacgcacacgttttatatgggtttaaatggtgttggccatgctactctgcccttcattttacccaatgagtggggtccagagtaagccaaggagtctgctcattctcttgatggagtttgcttcccaaggctcactaatgttaaaggactgtatatgtctatctcataacatagctcgtctgctcaaacgaacttcttcatctagtgctcattagaagaaacaaccatctggaccaagattaaagagaaggctagacttatgcctataatcccagcactttgggaggccaaggcaggaggatcacttgagcccaagagttcaagataagcctgggcaacatagtgagaccacatctcaacaaaaaaataataaaatgaaattggccaagtctggtgacacacacctgtattcccagctactcaggaggctaaggtggaaagatcacttggccccaggagttggagaccagcctgggcaacacagtgactcatctctacaaaatatacaaaaatcagctgggcatggtggcacatgtctgtggtaccagctacttgggaggctgaggtgggagggtcacttgagccccagaggtgaaggctgcaatgagctaggatggcgccactgcattccagccctggcaacagagcaagatgctatctcaaagaaaaagaaaaaagatgaaagggaagactgaccatgttggaatgtggtgcattcctaagggatatctctagaggaatattaacttttaggcctttttccctttactcattgactctgcaacctcacctctgtgtaagatgtatagctactgtacatatttcttggatgtattgaacagctaataattgccagagccagggcacaaattgatctcttcttwcttctaatccagtcctctgtctcctgtccacaatgcaatgtatagaatcgatcttttctggaagttgttactgagaaaggcagatagggttaaaagtgctagcaagagaattatcaaagacggaagccagcaaaatttatcatggagttttgactttgccctcgaactctcagccgaaacctcaagataatgaaaaggtgatcactttgccaatgataaatggattttataatccctcactgagaaagttgaatgtaaatgaagagctctgttcttttcatcttcttgcttactgactattgaaatgagacttagctatcggtggaattttggagctactattctcagtgaaattcagaattcgagaaatgttttcaggaaacatcctcctcagttcttgcctcagtttacttcgtggctcttgcagttctttccccctttgtgatctcatttacatctgcagtttctcaccaccacctcagtactgaccattcacttccctgtagtgagctcccaggccttctgccacatctccttgtyttttggatatctcttctcgaagcttccacgagtgcctgctgacatctccctactccccacacacccagctttccactcacagtctctgtggtatggccatccttcaagtcagccaacttccccacttctggtaccccaggatccagccagcacattccatacgttttgtctgtgagagttttctagcaagttctacccttcctgttttcatcattactgttcttaactctggcccatcacacctgtcaagcagactattgtcggacccactccaagtggtctctctggcccgagtctccctcttcaaaccattctaacactcttaacatattttgcttcttaagacatagctctaagaaaaacgttttctcaattccaaaagcttcagtgagtgtcaacaacttattgaattattcagtatagacatctcaacatggcaggttggatgtcaaaatctccctgttggagatcccctcagtattacctgtgttaccccaccgtcaactcccattgctgccttccctgaaaggaacccttcagaaaaaytaccatgcctgtaatcctgccataggtccttttcttcatgtcaccctctctgtttgtgccattgccttccatctctccatttaaataatggccttgtttaatggtatgtcattcaatggtaacacatcatgtcattggtgtgtcatttaggaagctttttctgrtcttattttttcccaattttatacctttataaacctctgttgtaatgcttttatgtcattctagaatctctgcattatcattattaatgtgaatatcgtattaccgcgactagactataatgtctttgaggtcttttgtatttttggcagtccagcatagtgagcattcagtgggctgacaggaaatatttattgaattsagtcaaatggaaataattttaggatgttggtgcccctcagcactgctgcctagtcaacttcaaatcattaccacttgcatcaccccctgccacccactccccccgccacacacacacacacacacacacacacacacacacacaccccctaggtaattttgccaaatcctgaagggtcaacttcaaacagtatctttcagccatgttttctgagacagggtctcactccatctaccaggctggattgcagtgtgtgatcttggctcaccgcagcctcaaactcctgggctcaagctgttctcccacctcagcctcccaagtagctgggattataagmatgagccactgcacctggcccatgttcaatttttctttgacgtttcctaaatgctcctctgttcttgggcaacagcaatgagacagttctcttccactcagtttttccaaagcatcctgcttattttgggaatgcttctcatgctgagcccagcctgggggcagcatctgctccagacaggctgttcttcaacccaaggtccaaccaccatcatagtggaccatttgcagtctcagctatgccctaagcaaaaatatgttaactgctcttctaactaaccatttctcagtgtagtttttccatgctaggactactcataaacctgtctttctcttaccctctgagctcatatggatttcttccttccttccttccttcctttctctttctttctctttctttctttctttctctttctttttctttctttccttccttcctttttccttccttcctttctctctctcttccttccttccttcttccttccttccttcctttctttctctctttctttcttcctgacagagttgcactctgtcacccaggctggagtgcatggcgtgatcacggctcacagcagcctcaacctaccaggctcatgcgttcctcccatgcaccaccatgcccagctaattttgtaatttttgtagatatggggttttgccatgttactcaggctggtcttgaactcctggactcaagtgatccacctgtctcagcctcccaaagtgtcgggattacaggcattagccacggcacccagcatgtggcattctttcttaagtgcttctagacaaagcaataagtggcagaaggctttccccaaatccatttaccttgtgtctccttttgacaccacatttctggagaatggatggatgggagttgggctttcgaaactttgcccttcagctctgtacttttgtgaaatgtattctcccataatcttcctcctcagccaggtttaaaagatcagaacttaactgtgaaaatattggaggatacaacttcagtctttcccgagtaagctggagatactcatgtcatactgataaatttagcttcgtgctaccatcagccctctcttctggacatttcctggttcattttctttctagccatctccttccttagacccaatcttcacataactcttccttcactgaaaatctaattctgcacttggtccaagtctgagctcctccttcaagctctttggggggcctactgaaaaaggccctcctgccttagagtccaaatcccctcttgtgtcctatgtgaaaactactgtccccaagaccctgaagtccttgctatgttttgggccatgtcctagagaggctgaacttgtctctgtctggtttcttctctcccaggattttggtctgttggagttaaccggcttcctccccacttctaagccttgtagatttatctctggtccattatcctaccactttatggactttctttgtcaggtactcagtctaaaccaagcctctcaggtacagttttcccataaaaacagcctcctctttattctatgctgaatctaaartaatgacagcgtttagaaccacaagcggccttagagaacatcctctaatcctagttatacaaatttggagattgtgagccagagagatcaagtggctggctgattgtcctgctccttaaaatgagtttacattttttagcctcactgcctatttcttataaagcttagaatgagcattccatccctacaatcccatatgtttctattaatcccaccccatacggaaagaagatctctcaagttacacgtggtatagagggaagggagtttagaaactgtaatgctatagtagaaattatgatgatgatcatgataattattattattattattttttgagacagagtcccgctcttgttacccaggctggatggagtgcaatggtgcaatcttagctcactgcaacctccgcctcccaggttcaagcaattctccctgcctcagcctcccgagtaactaggattacaggcgcctaccaatatgcccggcaaatttttgtatttttagtagagatggggtttcaccatgttggccggactggtcttgaactcctgacctcaggtgacccacccacctcagcctcccaaagtgctgggattacaggtgtgtgccaccgcaccaagccctatagtagaaattattatctcttcatgttctcccattattgtttgttactaaaaccttcctatatccactggaaaacatctgtgtagttggtataatttaaatgcrttcttttgggttcactgtaaagccatcccatgaatattaatcacttgtccccatgcctcagtggttcacggaaatgtraagaaggatcacgcagagattttctgcactatagacttagtgatgatttgcacgcctgccccctccacaccccctgagataatgatttgaatgtttcttttcctttcacactgatagttattgtatgtccctaatcagtaataccttcagtagtaattgtctatctgggagtggttaggactgatgctatctagagtgaacaattctccctggtctgccaaagcttctctagctctagtactgaaatcccgtgttctgggaaacccctcagctctgggcaagccgggacagttggtcaccctgagcacctcccaccccattcctgctcacctttccatgtcaggatgaagaattcagtgcccaaaatatttatgttccgcagaactgcactgatcaataacctggaaaaaaaatgatccttgaaaccactcatttatgtaggttacaacatattgaagggtaaaaatcaaagctacaatattagccctgaagacmccaaccaaagtgaacctggactggacctattccatttataacgcttttcscattgtttttgaggagagagtatagagtttaaggatgtcatctaaaaggatagatggcaggccgggcgckgtggctcacgcctgtaatcccagcactttgggaggtcaaggaggccaaggcaggcggatcaygaagtcaggagatcgagaccatcctggccaacayggtgaaatcccatctctactaaaaatacaaaaaaaattagccggacctagtggcgggygcctgtagtcccagctactcaggaggctgagtcaggagaatggcgtgaacccaggaggcggagcttgcagtgagctgagattgtgccactgcactccagcctggatgacagagcgagactccgtctcaaaaaaaaataaaaataaaaataaaaaataaaaggatagatggctaaatataaaatgtgaacttaaaactatgttacccagtgagagcatcaaatgcaaaaattgtctccagttaggtacaaacacaggatgtatcttggaggcaaatttattcctgatttaatttctaggaaagcagaagaaacgtctgctttttgggatctatccaagccctctgccctaacaaackgtctaaactcaggcaaatggccggctctgtgggaaaggagctagtataagagtggattgaataaactgaaaatgaktccagaatttaataaggctattaaaattagaagttgcaagaaatcactgcctatctctattttaagacttttgtttccatttatttgaaagtgttcggaagatataaaggatgggatgttctagatatggatcatctctggcagcagctggattgtcaaatagtgtctcttggaayttctcaacttctttttcctcggatgcgacattcggaatcagagaaaagttgttgtgcagaaagacaaatagttacctacgctgttccttgaaacttaacagaatatagtcaaagataaagttttcatttgtgggttttattgttgttgttgttgttatctttgcttgggcatttagtgttaacagctgggcagttaacaccagaagggaaagaaattttgtctcccagtggggttgctagggaagtagagaaaagcagtgtgtccctggaagagcaaggtaagttggggtgggggcaggtagtgtcacagacagagaagccatagmaagcttcttcgatttactttccaccacttggataggctttctwctactgccttttaaaaattggaaagctaaggcacagtaatttttagaagctttctcagggacccttagcaaacagcagggccaggtttaaatgtggtcttcarctgaaaagcagtggtcttcaccaccatgccgcatattgaccccatcgttagctttttgcaggtgcaccagcaggccagctcactggagtaaccaagtcagatgcagtgtcaaagcccaggctgcaattgggaatgaaaggcagttcccccacactgggctgagactgcccgtgacaatggtggccttgagggcttctgcctatgcttmgggatatttcaggtggcagaagcacccctgcacacacagccatgctgcttcactaaacctaccctgtaaggtggtcagggtgctcaggggcccagatgagccaggtttggcaacagagagaaatgtcttgagatttgtcacgtactaattacatgcaaggcattgttctaaactctttttatatactagcctayttcaatctcttaagaacccyatggggtcagcgttcttaatgtctccattctgtagaagaagaaaggaaacgggggcacgcagagkggctctgcagcctgccataaatggtggcatctgactgccctggcatatctmggactggccaagagaagcttgtccactcatgggttccttgttacctccaccagaaaccagtttcggtgggcatcaggacaacatatatgcatgtgcttatatacctaccaacctctttaactctcacygccttgtgaggtagtttctattaccttcattttacagaaaagaaaactgaggctrtgagtgtaaattacttgcctacattctctacaaatccacccctttgcactgcaacccagatggcacatataaagggggtgtgggtagaagratgctcaacattattattttccctcatttcacacttcctcatctggaaaaacacagaaattataggtgattgtaaagatcccaaaattgcaaaatttaggatggggggagcatgattataatctagagcagagatcagtgaactatagaccatgggctaaatctgcctattttggtactgcccttgagccaagaatgttttttgtttgtttgtttgttttacagtctagaggtcttttatttttttttaacacctatgatgccatgaattcgtagggaagaggttccagcagctcagcctccttcccactggctctcataaagtgtgctactctgggtggagcaggctggcgcttcagttgaacccaggcacctttctctttgtcttctttctttttctgatcgttttycttcaagcgtttcaggaagctagctcggctcttagagtgcttaatgtgctcaatacacacattaattctcttggcaagaatcttgcccttaacttgtttgtttacaacaatgccaacggcatgctggggaacactgcagactcttcccatttagccatggtaacacttgggggtgttcctttttgaacagtacccattcccttgatgcctgcaatgtcacctttcttatagattcacatatacgtggccaaaggaacaactccatgttttctaaaaggcttagagaacatacattgggtgcctctcctcttttcctttgtgttcgtcatcttggcaaattaatttttatgtgatgaattaaatcctctttcttgtcaaccaaattttccgtgatagtgtatctcatacwgtgtctgtttaactggaagatggtagttctggccaaaaggctgggttgacatttttttttttttttttttggagatggagtttcactcttgtcctccaggctggagtgcaatggcgcgttctcagctcactgcatcctccgactctygggttcaagagattctcctgcctcagcctcccaagtagctaggattacaggtgcctgccaccacgcccagctaatttttttgtatttttagtggagatgggtgtcaggcctctgagcccaarccaagccatcacatcccctgtgacttgcacgtatatgcccagatggcctgaagtaactgaagaatcacaaaagaagtgaatatgccttgccccaccttaactgatgacattccaccacaaaagaagtgtaaatggccagtccttgccttaactgatgacattccaccacaaaagtgtaaatggccggtccttgccttgagtgatgacattaccttgtgaaagtccttttcctggctcgtcctggctcaaaaagctcccccactgagcaccttgcgacccccactcctgcccgccagagaacaaaccccctttgactgtaattttcctttayctacccaaatcttataaaacggccccacccctatctccctttgctgactctcttttcagactcagcccgcctgcacccaggtgaaataaacagccatgttgctcacacaaagcctgtttggtggtctcttcacacggacgtgcatgaaaacggggtttcaccatgttgkccaggctggtctcraactcctgacctcaggtgatctgcctgccttggcctcccaaagtgctggaattacaggcgtgagccaccacgccctgccacattttcaaatgattgaaaaaatatcaaaagaaacaacttcgtgacatgaagagttgtaggaaattcagatttcaggatccataaagaaggttttattaggacacagccatgcattgttatggctattttcgcacctcaacagcagggttgagttgttgcaacagagacctagtgaatggcccacagctttaaatacctactacacagccctgtgcagaagaaacactgaygcctgaagtagaatcacatggcaaacatatttgcctcacgttatctgagraaacagtttggtcgtaatcktgagtttcctagataattgaagccttcccttttgtgcacagaatagttaattaaaaaaacaaaaatctattcaaggaggctggaattcaggatccagaggaagaagcatttgagagtggaatggaaagacttagggggaggtaggaggaatgggttggggagttccaggatgaragagggcytttcaataggacagagacagaaagagatttggggagagagagagacacacacatagaaagaagaaccaggattcagrgatcattgcaatcagaaaagaggaaaaagtgttgtaagcaggagctcagaagcactcaagaagccggatacagtggctcaagcctgtaatcccatcactttaggaggccgaggctggaggatcacttgaggccaagagttcaagaccagcctgggcaaaatagctagactccatgtctaaaaataataacaataataataataataataaaattagccaagtgcctgtagtctcagctacaggaggctgaagtggaagaatctcttgagctcaggagttcaaggctgcagtgagctatgctctcaccgttgcactccagcctgggtgatagagcgagatctcatctttaaaaaattaaatgaaaatgaaaaatagaaaagaagcactcaggaggctggtgagaattgggcgtgtgtgactttggyctagcaactttacctccctgaggctttcttgcacatcaaatggagagaaatcacacctcgcccaagggggctgctgtgcagtgtgaggggggaggtgacagccatgtagggcagggggtgggctctgcactcagacgcctcccgcggcycctggagttgcctcctctcatcccaggcaagtgactacattccctaccttygggagctcagccacaaagtgagcagagtgggatctgtcrccctgggaaattggcaagatgctacctccttcctgataggtcaccgagcagtctgcccagagccccaggagcagaagtgctcatgggccaagttaaggggctcgaattccatggttccatggtttgttgaatgcgtttattttttattttattttatttttttgagatagaatttcactctttttgcccaggctggagtgcaatggcatgatctcggctccctgaaaccttcgcctcctgsgttcaagtgattctcctaccacagcctcccgagtagctgggattacaggcgtctgccaccatgcccagttaatttttgcatttttagtaragacggagtttcaccatgttggccaggctggtcttgaactcctgtcctctggtgatccacctgcctcagcctcccaaagtgctggaattacaggcgtgagctgctgcacccggcctattgaatccatttaaagcaaacgccaggtcattgtttttgaacttcgtggtggtaggaggtgcaccttaaaatcagcgctttgcataacacttattccttgatttaacccaccaccaccatgaccacccctcactgattcacccaaaagtgggtttatttgttgtcttttctctaacttctgtagttgattgacctcattcaagaaatatctgttgggtacctctgctctgcactgctattttcagtggtaaagagtagatgaaactggccaggcgcattggctcacgcctgtaatcccagcactttgggaggccaaggtaggtggatcacttgaggtcaggagttcgagaccagcctagccaacgtagtgaaaccccgtgtctaataaaaacacaaaaattagctggacacatctataatcccagctactctggagtctgaggcaggagaatcgcttgaatccaggaggcgaaggttgcagtgagccgagattgagccactgcactccagcccctgggcaacagagtgagtgagactctgtctaaaagtaaaaaaaaaaaaaaaagagttgatgaagtccctgtcttcatggagcttacattctttttttttttttttttttttgagacggagtctcgctgtcgcccaggctggagtgtagtggcatgatctcggctcactgcaagctctgcctcctgggttcaygccattctcctgcctcagcctcccgcgtaggtgggactagaggcacgcgccacctcgcctggccaattttttgtatttttagtagagacggggtttcatcgtgttagccaggatggtctcaatctcctgacctcgtgatccgcctgccttggcctcccaaagtactgggattacaggcgtgagccactgcgcccggcccggagcttatattcttgtggaggagagaacatggaaaaggataagcatacaaaaatgaagttaacttagatccattttgttgttgttgttgttaagatcatcacttttgagcacttgtttaaggcagatatctggattaaccacattgaggaactgggaggaggcggagaactggaaactgtgttaagtaggggttgactaaaccctgcttctggtatgagaaagttaagcttatcttcagaatggatgctgaggcaacatcaaactataggaattcaccacactgcataattttgttttaatatgaatttctctgatctctagtgtgagaagagtgtgtttctatatgttcattggccattagttttttctgctttgtgattgtcatgtactctgcctgcttttctctttggttatttaccttttcttattaatttataggctacctcttcacaagaggaatattaacctctagtcttacaaaactgttgtcccaatctattatttctgtattctgtgctattaaaaacaatgactcaatgaaaaaacccactatattaaataaatatatttcagaaatgcatttttaaatagaatgtgcagaatatatgtataacatgtctattaatccatttctatttgtttcactaaatgtttgtattctgcttatattcaaagaaagctaggttggcctgttttcttcacagytttcaagtcctttcatagacattaacttgtttgatctctataagtactagagatattgatctagtaaagtaataaaatggggccaggcatggtagctcatgcctataatcccagcactttgtgaggctgaggcgggtggatcacttgaggtcaggagcttgagaccagcctggcctacagagtgaaatcccgtctctactaaaaatacaaaaatcagctggctgtggtggctggcacctgtaatcccagctactcgggaggttgaggcaagagaatcgcttgaacccggaaggcggaggttgcagtgagctgagatcgtgccactgcgctccagcctgggccacagagcgagactccatctcaaaaaacaaacaaaaaaaaaaaaaaaaaaaaaaacaagtaataaaatgggcatggagctgtataaatgccgktatccttacaccaratgatctcacacagctctgcgtttgtagttgaacttacttcacctactgctgtcggcaggggacctgagcctgccagttttgtttccctgttctaatttgtgactttgcatctgcttagctataagaacattttatgatcgtgtctaaactaagatttaayaggctaagcctcagagggatttaaaggatgtaagctttgatgcttaaaccaaagaagacaaaactggcatcctgagggccaaatgccatccttaggggtaagtttgagagtttttctgataaaattcaggtttctcacttctctgaatacactggaaragctggcagccctgggctcatgatcccctgtggcattaattgccaggggtcaggggggtggggagggatgcaggctctctcattcccagcagcccccacccaatcctcctcaatgtctgctgccctctgtgaactcaccggccctgctcgtctgacccttcaccagcttcccgcactgtgccttacctgcctgtaggcatttgagtgcctgaatcygtcctacaatgtgtgatgattattttggttgcttggagatctgtttttgcttaattcctgcatctcgcttgtggccaaagagtttgaggttgccagccaggcacaactaaagccttagacacagatgaagatggagtggtcttggtggagatgagaggactcatcaaaaagcattgccttaaaaaaaaaaaagattcaatagccactcattctgcagagggtgatgaagaacggcaaggatktgagagtaggtccgactcgggttccagtcctgcccctcccctgaccggcatctgcctcagcctttgtaaactcacctgcagtggaagcagagctcgtggaagattaatgagaactaactcattgtgagggaagagaaatcccagcactgctcagagggccccscaggcagcccagccctggttttcatgttgagttgagatgatgatgtgttgttagccatagtccttgtgctgtcttcttgtttgtgaccgtaaaagttatcctggggcagagagaggtgggactgatacagaatgaccacttaacaattttcagtctgttgagccaactagagtgggcagagcagaaataatgccctggttggaagttaatagctttgcctgccyaattatttactggaaggaaatgcctgttcaatataccatttgatatattcaaagataccaaacaaaacaaacctactgctagggccagccactcagaaggcatcacatgctagtctcagtctgttcatctaaaccactgtaaataagtcaggacaaatgatgtacatggttttggggttttgttttatgtatgtatttatttattttttattttttattttttgagatggagttttgctcttgttgcccaggctggagtgcaatggcgtgatctgggctcactgcaacctctgcctcctaggttcaagtgattctcctgcctcatcctccctcgtagctgggattacaggcatgcaccaccccacctggctaattttgtatttttagtagagacagggtttctccatgatggtcaggctggtctcgaactcccaacctcaggtgatctgccctccttggcctcccaaaatgctgggattaccggcatgaaccactgcacccggcctcatttatttatttttggatactgctgttttgaactataaatcatgctgccactcccatctgcagactgctttggctacatcatgttgaaagatttcttgagtttgttttgcattggcacttatcagagctccttattgtaggatcaaggcttgaggcaaagagaagggaaaaaaccgactgaacctgcaatagaagacctttgcctctcttttctcactccaactttccccttctgttctccacaagacctgccaaggacaaattttacagaaaagggtgtggttctagtaagaatgaagagacatgaaggcatcaaaatgggttattggattgttcccttcatacagtcacatttctagagtgtgtgtgaatatacataataaaatagtaatatatatatatacacacacttatatgtatatataaatatatttatgtgtatatatrtatatatcatatgtattatatgtatatatttaaaaatacacatgtaatatatattttaaatatgcatacaaaaatatatctcttaaagtacatataaaaaacatttataaatgcatatatgatatattcatatatgtatgtgtataaaatattttatataaaatatatttttatataatatataaaatttattatatatataattatatatatttaaatatataaaatatatataatatatactatatattaaatatataaatatatataatattactatatatttaatatatagtaatattaaatataatatatactatataatatatagtaatattaaatataatatatactataatttaatatttattatatactataataaatagtataatatttattatatactataatttaatatttattatataatatatataataaatataatatatactataatatatactataatatataatataatacatcatatattatattatacatcatatattatatatcatgtataatatatatcatatatatttaaatatatataaactatatataaaatatttatatatttatataaatatatatatwttttttcccatgggctaaaggggaggcagtgatggggaagaaaagagtggaatttaacctccgggaataaagcatttgaaaaccttaaggtaaatgctttttttttccattactaagaacagaaatcaaaatatcagttcattatgagggtcagaagtgttggatattttccaaaagagaaacaacaacaacaacaatcatagctaatgcttatggaacatctaccaggtgcccggattcttgccaaaccctcaacaagaggtatctcatttagtcttgacaaccatttgaaataagagccactgttctttatcttttcacagtgggaggacctggttgtgtaaagaggttaagtaactttacccaggcactgtgagcagctgggatttagccaaacagactggcttcagcacctggaccagggagctgtggaattaaggctctggtttctatccagctgaatgacattggggagaatatttttaaaggcctcaatgtgctcatctgtaaaaataacggggttgtgatgggtgatctcaaagatccccgccaactctctagcagctcaccaaattaatatccaaatcaatatccatcgcatccacggcactgttgccattcattcctacagttcactgtaggamgttaaggggtggagtggagcagagagggggcagggaaatggctgcattgtgaatcaaatgttttcctaacaggagcagctgttccaactggcacaagccccggcaggtacgattgctaggtgactacaggagtgagatgggagcagggcccactcttaacatgcctcgtgtggctgccacagttgatcctttagttgaccagttaatttctcccttggaagtgyccttaccgtccgcatcaatccccagtgcacttcacattggctgcgagatcgcttgcagcactgcaagcaggtgaactctgagaaccctctgtaatgcgaccagacctgtgcttttcctggttcccctgaattacactggctgatacttccaggaattctgcagcagccctggtggttttgttctttcttcagaaaaggaagttggagagggggttgggtgggaaggagaatgagaatcctttaagttctttgaaatgacctcaaatctgaggttgtcaggcttttaaagagagccagtaggtagtcactccacatattgtagataatactgkgtcaacagctcaagttatctgaagctctctttgtgaaatgggacccaacttttgctctctgggaacactatcacatttctctctggcatgcaaacttaggtgtgtttgatgaagggagcctgcctctccactcctstgggtatttcttgcaaggtggagatgagagactgagaaaagaaataagacacagagacaaagtacagaggaagaaaagtgggccctgggggaccggcgcttagtaagtgaggaccaacaccggygctcacttactctgagtctctgagttctctcagtatttattgatcactatttttcctatcttggcgaggggaatgtggtggggctatagggtgaaggtggggagagggtcagcagaaaaacatgtgagtaaaggaatctgtgtcataaayaagtttaaggaaaagtgctgggcctaaatgtacacgtaggctagatttatatttaactttacataaacatctcagtgcagtaaagagtagtattgctgccatgatgtctcacctgtatccataaggcgattttctcttagagtagaatgtatggttggttttacatttgtcattccattcccagggacgtgcgggagacagacgccttcctcttatctcaaccgcattgaggccttcttctttcactaatcctcctcagcacagaccctttacggatgtcgggctggggggctgtaaggtctttcccttcccacgaggccgtatctcaggttgtctcagtggggggaaacctggacaatacccaggctttcttgggcaggggttcctgcggccttccgcagtgcattgtgtctctagttaatagagaatggagaatggcgatgacttttacaaagcatactgcctgcaaacacatttttaccaaggcacatcctgcacagccctagatccattaaaccttgattcaatacagcacatgtttttgtgagcacaaggttgggacaaaagttacagattaacagcatctcaaagcagaacaaaatggagtttcttatgtcttctgttttctacatagacacagtaacaatctgatctctctttcttttccccacatttacttcatyatatgatatcaacactgactctttcatgtaaaatgtcastcctaggttccttccaccctygtgtcctgcctgtgcccccaagggtgtaattctttgttccctcttcccatagtcagtgtgtgtgtgtgtgtgtgtgtgtgtgtgtgtgtgtgtgtgtgcycgctatattctgacacatcattagaatctaaattaatctaccttgttatatttttctgccactgataatcttctacttagtcatgttacaaatgtattttttaaagtaagtgtttgaagagacagggtctcactgtcgcccaggctggagtgcagtgctgccatcatagctcactgcagccttgatctccttggctcaagcaatcctcccgcctcaacctcctgagtagctgagactacacgtgcgtgccaccatgcctggcacacattcatttttcattatctgtgtctgtatgtgcccagaggtacagataacactaaaatgaaaagaggtggcagagaacaggaagagaaagaaaccagaggagccgatatccttaaatgctgtggctcctaaggactgccagcaggttgtggggctagccagaaaaaacagagcctctgattctagaaggcttggagaaagcgtgagaagggagatcagatcagaatagattgatggaagggaaaggcggtgagggtgaagcaagagaaactcggctccagtgaaaaggacccatcattgcattccagaacgtaatttgcatttcatatgtaaatgaggaggcttcctagaggctggactgggctgggcttagctgagcctttgcaaacagcagggattcaaccctggggaactgcagaccaaagtgmgagagggacgcaccgcatctccaggcacatccaaaaaggatggacgagacaccgaagcagaggatacaggaggattaaaggattcaggaaagcaagcagccctccggagaagctgtcgaaattcaagactggcaagagaagcaaattcaacctctcacaccgatcatttctcattccctgaaaagaagagattgtttccccagggaagtgaaaataatgaacttttggaggtactgcttttttgctttcactctgctcagcgtggtcatttttgtgagattttacagtagccaattgagcccgccaaaaagttatgagaagctgaacagttccagtgaaaggtattttaggaaaactgcctgtaatcacgccttagagaaaatgccagtctttttgtgggaaaatatattaccatcacctttgcgaagtgtcccttgcaaggattacctgacccagaatcactacatcacaagtsccctgtcggaagaagaggctgcattccctttggcctatgtcatggtcatccataaggactttgacacctttgaaaggctctttagggctatctatatgccccaaaatgtctactgtgttcacgtggatgagaaagccccagctgagtataaggaatctgtgaggcagttactgagttgcttccaaaatgctttcattgcttcaaagacagagtctgtggtttatgcaggcatttccagactccaggctgacctgaactgtctgaaagaccttgtcgcctctgaggttccctggaagtacgtcatcaacacctgtggacaagacttccccctgaaaaccaaccgggagatagttcagcatctgaaaggatttaaagggaaaaatatcaccccaggggtgctgcctcctgaccatgcaattaagcgaactaaatatgtccaccaagagcrtacagataaaggtggcttttttgtgaaaaatactaatattttgaaaacttcacctccacatcagctgaccatctactttggcactgcctatgtggcgcttaccagagastttgtcgactttgttctacgtgaccaaagggccattgatctactacaatggtcaaaagatacctatagtcctgatgagcatttctgggtgacacttaatagggtttcaggtaggtactaatttccattctgattgatagattgagtttgctaacattctgctcgcctagagaactgactcatttgaaattattatgaaataaatttaaatacttagaaaactattagtttggttgcttgtagcaacagtgtattgctgactgttgtcttatcaatatgtgtgatatagtgatctaagaaatgctggctgcagtcgccccagcaaaactaactttgattacatagttgctgaattttaactgttgtttgaattaatacttttcrtagtccttgataaacacagctgtaacaaacaaaattgacttttaaaataagcattctagaatttaggagttgaaataggtgatgtttctttcggacggatgttagacatcgctttcattgatgcagtctcattgctcaaagttcatggagctgttacaggggtacttactggttttagaatcttggaagctgcttcggatattcacaaatcaccattctggctgaaayatctctggtttaagatctgaacaagtagccaggtctcagctcttcttgtttctacaaatctaacctgatattttagcctggaggagtgggtaacaaagagttggaacatacggagagagaatctagctacagatgatccaaagagaattctcaatttttaagtcataggtttttattggacattccaatttgcagcttcttgtttttatatactgtgcagtctttggttgtttatgataatttgggaaagcgtccaaggtatgccaggcagctgaggcagaagatagcaccaagctccctcgttggttcaggactgggtttcttttctaaactctgtttcccataggtggtctgtgacctgcgttacgtctttcctgtgtgtccccacgtgcttgttttcaacagtgacccagcatggttgtgggtgactggtggttctcatgagcacagtgaccccgacaagcctcacatacttcctgtctacacacacacactgcacaaccacaccacacatacatacacacctgcctgccattcttgaaataactcccagctcttatgtctagtgtcattatcattggcatactttcaagtgctgtttgaagccacctcttgcctgaaagtagactcaatgcagaaaggtccccaataacacggcattcctaagagctaaactagagtggtggtcacaaaaatctacttagagagggacagaaagaggatgggcaaggtggctggagacgagagaattatgctgtctcatgcgcaatttattttcagagatgctaaactgtcaggtcacaaagacttgtaggaggggtggtgaaccaacatttatcacagtggtgagagcgttaaccctttctttacaatcacctattttaaacgcatgtaaatactgcatgcgtggcatttaatcttatttttgttggtatagttggtgatagcctacatcgttccttttaatgataggaagtcatcgtgttagcctcacgtacagatgaaaaacatgaggcttagagagactgaagcaatagtatgttcacgttgttcacatagcttttcataggcaaagctggaatctgaccctgcatttgtgtggcctgaagtgtgagccgtttctcttgcactaggaaaagaaggaatgagcatttcttttttcctgtatatctaaagcaaatttcctgcagaatcccgaaaaagggaaaggattgagggtgtttggaaaaaatgaggagggctgtggaaggaagtttcacctgatcacttagagctggagatgaggttagcagggatatggtgtgtgtgtgtgtggtgtcccaatatgcttgtgtggtgtgtgtgtggtgtgtttgtagtgtgtgtgtgatgtgtgtgtgtgtgtgtgtgtgtggtgtatgtgtgtttgcagtgtatgtgtgtggtgtgtgtgtggtgtgtatgtgtatgtgtgtggggtatgtgtgtttgtagcgtgtgtgttgtgtggtgtgtgtgtagtgtgtggtgtgtttgtagtgcggtgtgtgtgtttgtagtgtgtgtggtgtgtgtgtatgtatggtgtggttgtgtggtgtgggtgtgtgtgtggtgtgtatatgtggtgtatgtgcgtggtatgtgtatggtgtgtgtgtggtgtgtgtgtagtgtgtggcgtgtttgtagtgtggtgtgtgtgtagtgtgtgtgtggtgtgtgtgtatgtgtggtgtggttatgtggtgtgggtgtgtgtgcgtgtggtgtgtgtgtggtgtatgtgcgtcatgtgtgtatggtgtgtgtggtgtgtgtgtttgcagtgtatgtatctggtgtgtgtgtggtgtgtatgtacatgtgtggggtgtgtgtgtttctagtgtgtgtggtgtgtagtgtgtggtgtgtttgtagtgtggtgtgtttgtagtgtgtgtgtagtgtgtggtgtgtttctagtgtgtgtttgtagtgtggtgtgtgtttgtagtgtgtggtgtgggtgtatgtgtggtgtgggtgtgtgcgtgtctgtgtagacagcaactatgtgaggcttgtcagggtcactgtgctcatgagagtcaccaggtgtcctttctggaaaggatccaccatccctcaaaggcttctgtgctgtctccggggtccatctggagcaggctttggtctgggccagtggcaatgggaagtggcccttggttcatgttctcagagaagctggggagtaagaagcaaccaggcagatttgaaaggtcccaaatttttaaagttttcactccatcagctaccaatgttaatacttccttgtacatctttccagaggtactttattatgtttataggtaataaaactgattaaacgtggagaacattacatatggactttaagttcactacagatatactcagaaaaggaaaaatggtccttattttaggtgccatattgtctgtgagaaacaaaatacagcaaaatgtgtcttttatttaaatacatcatatgcagacatttaagaagctcttttttcattactttgtagtatttttaaagctaggtacaaggaattttctggaccaaagttaccagggacctttgccccacagcatccaaccgcgatgaagtgcagaactcttgctgatagaacacctactattcccttgctccaggctttataatggcttctcctgatcttaagggacccttaaggcttggccgggcaaggtggctcccacccataattccaatactttgggaggccaaggcaggaggattgcttgaggtcaggagtttcagtccagcctgggcaacatagtgagatccctgtctctacaaaaaatttaaaaattagctgggcatagtggtgcatgcctgtagtcccagttactcaggaggctgaggaaggaggattgcttaagcctgaaaaatcaaggctgcagtgagcatgactgcaccactgcactccagcctgggtgacagagtgagactctgtctcaaaaaaaaaaaaaaaatgctaggcttaagctcttcatgtggcatgacttccaggacctggccccccacaccctctgtctctaccctcatttctctttatttgatgcctcatactttatgttccagcaactacttggccccacacttctgcaattttcacctatttttttttttttgagatggagtcttgctctgtcgccaggctgaagtgcagtggcgcgatctcagctcactgcaacctccgcctctcaggttcaagcgattctcctgcctcagcctcccgagtacatgggattacaggtgcccaccaccaascccggctaatttttgtatttttagtagagacatggtttcaccatgttgaccaagatggtctcgatctcctgacctcatgatctgcccgcctcggcctcccaaagtgctgggattacaggcatgagccaccgcgcccggcctaattttgacctatctttttatggctttttaatgacatcctctcataaagaatgtccttcgtgtttratgcccttcctgtctaactcttcatcctttatgtctaactctgtctaactcttcatcctatatggcccaccttggaagtcacttcctctggatgccatgtctgatcaccttcctcccagatcgtgtttcaactctgggttctcctggacctaatgccactgctgccagcattgaattgtagtcacctattaactgaatagctcttctaccagacctcctcagtatttgagctccttaagcataagaaaagtgacatctgtctttgtgttctccaccactactcctacgctgcatgcatcactatgcacctgcctgatctgatgatatgcagggtgctagatggatgtggaagggtcgggaggggcaggaatgtgmtggagagttctgagaagatgggcagaacctatgaaagtgtaccctgtacctaggatgggggataatttttggtagtagggattggagaaacagtaggtaaaactccacaatggccaggccaacaaatgatatcagtaaatatgagagagtcctgaaagaattagcgagccccactttattccagataaaatgttaatgggatagagtctttccttagaaaatgtggctcccacacagccaacctgggcccatgatgcagtcggattctgatgccaagagaaagtcacagcaggcggcgtatgcagacgcctccacttagtttctgccttccttgcacctggtgtgagtttcttccacacctgccacccactccctcctcctgctagtaccactcccgggctactcacattcatgcactgggcttcttctcacttaatttaatgtagacttctcctgaattgttggcttaggaaaaaaaccaagactataagaatatgagaggctaagaagagacaacaatagaaagaaactcaaaacgtctctccagctctcaacaactgtaaacactgagctatttagaaggtatatgttctctgcaggaaggtcaytgggaccttacgtctgggtgtggctgratcagtcccagtctttttcaaagtatgcattgtgttctctctacatcagcccagactttgaattcagtttctaggaccacaaaggattcattcactcatgctgattggacccgtgactgagaattaattacaaacgttgaatgatggggtagaatcatgtyttaacaaacgtcaccaggacgttcgagtctaaaataacgctacttgggggggctggaggacaatccacactgrcatttgtcttgtcaatatggagataaattctggctgaaggagaaattccacaaaacagatacttccataggttcgtatccattgaacagactcttaaaataatatttttggatagccagatgatattaagtatgcataataaatgagaacatgattttcaaaatattgcgttagtgatgtggaccagtctggcttatttaacctcttcagtaaagggctctaggctcttcccaggtcagtaattcaggtaggatcacaggggaagattttaatttacaatgtatcccagctcttgtgagcacctagattgatgggtctacatcataagatgctgggctcctggtagagaaaccttaggcaggttataaagtatttacacagtaaattatgctgacgctatagccatttgtagaatcatttgtgacgtttccagccactggctccattgtactatttgggaaggatcatctccttcattggagaatctgtaccctaacatttctgttcgccacccctaaaaaggaaataattgggaaacgctactcttaatgagctcttttatttttatttgtttgtttgtttgtttgtttrtttatttgagacagagtaccactctgtcgccaggatggagtgcagtggtgtggtctcggctcacacaacctctgcctcccaggttcaagcaattctcctgcctcagcctcccaagtagctgggactacaggtgtgtgccaccatgcccagctaattttttcatatttttagtagagatggggtttcaccatgttggccaaggtggtctcgatctcttgacctcgtgatccacccacctcagggtcccaaagtgttgggattacaggcgtgagccaccacrcccagccttaattagctsttaattcctaatctctagaacaacattttataaaacaagacaaattggattaaagtatatattagtataaagtatatataaagtgaatattgaattaagtataagtacaatcatgattggtaaacatctactaagctgaactgaacatgaatttaattctagcggaaaggatgarcatyctttctactgctttagaaccggcaagatcatttctccaactcattcatcctcctgtcattccttatcgattgtataagacagttttttctagaagcaggagttgtttttgtctttrttttgttttgagatagggtctccctctgtcacctagrctggagtgcagtggcattaatttagctcactgcagcctcagccttctgggctcaagtaatcctcctgcctcaggctgccaagtagcaaggactacaggtatgcaccactacacctggctcatttttaaattttgtgtagagwtgggatctcgatatgttgcccaggctggtctcaaactccagggctcaattgattctctcctcagcctccyacaagtgctgagattacaggtgtgagccattgcacctagacagttgtctttgttttaaatgaagtattgcattttgatggcttctaaaaacaataaaatattagtggtatatcaaagctatatataattgatatrtgtatatatcaatgtccatagtacaatgatcaatatatactcgacgtctaaattatctcttgaaaatacatatctcttccctatttctctttacacaatacaaaagcatctccttccatcctcctttgtttgagcccacatgctatyaggtaaaygactttggagacagacgtagtgtaagtctgtcctcccaatacttgccaactgtgtgacactggtgttagtttacactgagccttagtttactcatctgtgatgatggagataataaatagtacttagttcccagagaagttrtgagtattaaataagctaatgcatatagtacaggggttcctagacttggccatgcctcagaaccttctgcaggtcctgttaaagcacagatttctgggccctaccccgaagtttctgattcagcaggtctggagcagtccccagaatttgcatttctaacagtttcctgggttatcctgcagcttctcatctgggggccacactttgagaactgctgacacggaccatcttttacagagactggcacatgtatagatttgcagcaaatgccgawtctgttcatttccaaccaccagtaaaaataaaaactagttgatataaggaaaagctttatggtgttgattgcatatggcagacttcatgaaagtggtatgcaaataactgatatttgggatgtactcatattaaggatatattatgggctctggagtgagacaaatgcaatattgaattttagctttatctccgttagtttgatgaccttgtgtactctgacctaaaactcttcattttgtagtcacaataatgatggctacttagtaaggctgttttgagaattaaattttaaaaatggggtaaaatgacaggttaggtgtttatccacttattaatgtgaacayttattaagaaaaacctacatgtggtcttgtgttcctacactaatgagatcctcaaggtgttgaataaaagcaatttaaatctcactatagaaggatgtctatgccatggctcaccaaccatataaaactagatgtagatgtacccaaagatggataggaggaaatgtgtaaagtaaattgacatrttcaggtggataccagttccttttttttttgagataaggtccctgctctgttccccaggctggagtgcagtggtgtgatcacggctcactgtagcctcgacttcccaggctcaagcaattctcccacctcagcctccccagtagctagaactataagcctgcctcaccatgccctgctaatttttaatttcttgtcgagtcggggttttactatgttgcccagactgggatatctgttcttgatcattttgatttccattagtgttattgatgtactttttatgaccaccaaaaagcttcacttaccccttacataacactatgaaatgtgtattatccattagaagagtgtttccttaaaaacatgaaggatgtcaatgctatctatttttgaaatcagtcatatcacaggaaaggagcaggaattgtgttgctttattttctttctttttttttaattttttgagacggagtcttgctctgtccccaggctggagtgcagtggcgcgatcttggctcactgcaagctctacctcctgggttcacgccattctcctgcctcagcctcccaagtagctgggactataggtgcccgccaccacacccagctaattttttgtatttttagtagagatggggtttcatcgtgttggccaggatggtctcgatctcctgacctcgtgatctgcccatctcggcctcccaaagtgctgggattacaggcgtrccactstgcccggccggttggttgggttgctttcttttcttaagccgtaccatgttccagaaaggacttaagatgtcataatataatttcttgggaaaggaaatcaacatagccaagatctgaaaaaaaatgagagccttttcacaattattctatgtaggttttgactggcttggccacatcttcccattttgagtgtttggcttcctcagtgttaaaacaaattttgcccatcctctttgcasaggagtaatttttaaactctaatagaaaaacttataaacacacacaacagtgcagagaacagtactgtaatcctcacatgcccatcagccagtttcgacaatcatcaacttgttatgcaaactcaaagcaaaaaaaccgaaaatgtatgacaaatctttgagttgacactataattctcataaataagtagcttcctcttttcaaagaaaatgcaaaattctgatattccagactaaggctttctcctcatcccataataacagttcactgaaaagtaaaaatatttttatccaacttcaccttttaggctatactacatgaaccggactgagttttctttttctttgtttttcagcaacaaagctgaatctacaagcacaagctctttaggcattcaaagtaggaggcagaatgcggtttgttaagatttccattcagctgggtgcagtgactcacacctgtaatcctagcactttgggaggcctaggcgggtggatcactaggtcaggcattcaagaccagcctggccaacgtggtgaaaccccgtctctactaaaatacaaaaagtagccaggcgtggtggtgcatgcctgtaatcccagccactcaggaggctgaggcaggagaatcacttgaacccaggaggcggaggttgcagtgagctgagattgcgccactgcactccaggctgggcaagagagtgagactccatctcaaaaaaaaaaaagatttccattctcttggcctccgtttttctggaggaaaaatgggaaggagtatggtactaagagtagaagattggttagtggggtacactggtatcccactgtatggttagtggggtacactgtttcctgtgtatccctctaaccattaaagttcccttgttttcatctcttctccagactgaatattctgtttcctctattaaaaaaaaaaaagacaatgagtccaaagtatgtttgaatatagaattgacacgatgatattttgccttcagccaaatctgaatgtattttccattactgcgtattctcacagaggcttctctatgagattcattgttgttaatttttcacatctgtaatttaatttgagatgcctcagttattaagttattaagcctcgttactttgcatgaggtctttgatcttgcagcgtgatgtggatgaaagaatacaaactttggaataggacagatcttttgaatcctaggcctcactacttaacagcttgtcagtcactgaacaagttatttaaccaaactgagcctcagttaattttggttttaggacattaaagaaagtttttaaggtgtttgagaatttattagaaagtaggaattgccttttttttttttttttttttgagacacgatcttactctatcacccaggctggagtgcagtggcatgatctcggctcactgcaacctctgcctcctgggctcaagcaattctcgtgcctcagccttccgagtagctgggactacaggtgtgccctaccatgccaggcgaattttttgtatttttagtagagacggttttgccatgttgcccaggctggtgtcaaactcccgagctcaagcaatctgcttgcctcagccccccagagtgctgggattataggtactagccaccacgcccggccaggaattgtcttaattcaacttccaccccataaaatatatctggaattggtctggagacagtcttatagcagtgactacgacttgctaacatttcttttcaaagatatttgtaaaagggctagaagaatctctgggtgtctccaaggctatgagggtttttgttgttgttgttgttttgctttttttgttagagatggggtctcactctgttgcccaggctggtcttgaactcctgggctcaagcratcctctcaccttgkcctcccagagtgctgggattataggcgtgagccaccacgcctggccaggatgtgagtgttgatgaccccagaagacactaaggattggaacagtagctcatgaactttgactttttaaacacttcacactgcacagtkaaaaacagtagaatactaagcaaatggaaagtaaggattatgagccatgcgtgaatgtttaattttctttttttaaaaaagtgctttcgagtactgtgtaagagaggctagtgacttagatacccacactatacaattctgttctaaattttaacctttgtctgtagataactgtttggccttgggcatgtcacttaacctctctgggcctcagtttcctcatgtgtaaaatgaggaaattgggctaggtcatctccgaagagattcctgtattattttgctttaactctggagcatgcagtgaaaaaagcagaagtatttgaggcaggcagacttaggttttgtttccctgctgtcagatcttgagcaattaacgtatcttaacatgggcttccggtgacttatctgtaaattgaggacaataccaatttcatgagattgttgtgagagttacagactatgggggtatatctcccctctcagccattgttaattcagttatcacctccatctctcccccttctccctctccacggtatattaatgtcatgacattcctatttatattacaccgtggacagtaggattaatgaaacaatggcctctgggcattgaatttctctctttgtcacggtcactgtgtccacatctggatgccaaccaccactactgctacaatgtagaactcaggccagccaccctaggcagtgtgtgggggtgatttttgtgctgtaaaattctgaccaaaggaggaaactgagtaccaagtacttacacaatatcttcacctctctgattgttcttaatgtagcacatttccccttgtttccaagagtattttctcgatgtgcccagggacgctgagctggacaaggctagtgtagtgtattcagtgctggggagggaaggggccctctggagccggatcatttggcttccaatccagctttgcagattcctagtgtgtgtgacgtgaggctaattatgttctctctctgattctcagtttctgtatatgtaaaatggagatactaacattacctaccactgtgcaaatgaaatgtatgaatacatatcaagtgcctggaatggcgcatggtgcctagtaagtgtaaataactgttgtatttattccacccaattgccctcgttaaggggaaaattagcaatgaacaatttccccttgttaaggtgctagaaaaaatgcagtcccccaaagtgccattacaaagggtctggaagattttctgaaactcagacaaaagcagcttgaattccctccgtccctcagcttcccatagtaccagagctcatcctgcacaaggaatgagaggagcagagtaactaagaatctggcattggtgagtgggatcgattgtaccaggtgcgctgttcacaggcgcgtcagtccacgtactgcaacgctaggaaacacagggagccaacagcaatcccaggccagtgttaactgactcttgaaaagagaaaacctaacaattcccaaataacctgaatcttctctgtgtctacctcagtaaaatatgtggtgttgtttccaccagaatgagggagcacctgaaccagactgaaaccgggtgtttcagtgagaggcatcttgcccatctccctatcagcttccatctattgtatcccagcggaggtaagagcaggagacagtgtgccgtatgaattagacatgaggccatgtaccttcagagtccgccagtggtccccagagaattgagagctatggtagaatgaagacggtagcttcccctctctccaagagtagggggctcacatcatggcttcttgtagcttacgatcttggacagatcttttcaattctccacactgggttttctcagccaaggaatgataataactgctaatctcatggtggcaaaggaggagaaggcacatgctgtgagccatgaattatgaactctttaataacttataactcattaattctaaagccaagagcatcactcctggcacatagaaagaggaaggttgtggtgatgaagtttttttgagtggaagatatgaaagaagcagaaactcaggctccttcaggaataacagaatgattttgtgaagtggaatgtgtaatcctgtgctggggttggaagggatactctcatcatttaaagtggagaaaccaggcacagggagacgaaatgatttgtctgtgttgcatgatttagcagctgaacctggccacaaagataagacttttaagtccttcaagacaataatctttctatatttagtgcttcttataatttctttctgaaatgtcatagatatctgagcaaaggggcagtatgaatattttggtgtctatactaatactgaaatttgggtttcaatgacaggattcttaaaaagtgttcagaatttatgggaaaagagtgcatatcaatattacatcaaagtcttataggtatactatataatacagtttttgaaatgtatacatttaccataaaggagatccgttctgttttacattgttgttgattttgaagcagcttctttgtattctttaatttatatacatacagttcactctctttagtgtgcagttccgtgtgttttgatagtggtatagagtcacgcatccactaccgccatcaagaacaattccgccagttcccaaaattccctcatgctgcccctgggagccaacccctacccccagtgtccccttgccaaatcctgacctgttctccatccctgctgcttgccttttccggaaagtcatatttttatcatagcgtatgtagcmattgagggctgagaaagcgctgctgctkcttctttcttttctattaatgaatgccttttgtatgttacaaggtgctcgtgagggtctctcttagatcctcaggcagttttatttttatttatttatttatttatttagagacagcatctcattctgttgcccaggctggagtgcagtgatgcgatcttggcttattgcagtggtgcaatcttggcttattgcagcctccacctcccaggcttaagcaatcctcccacctcagcctcttgagtacgtgggactacaggcgcatgccaccacacccagcaaattttttgtattttttgtagagatggggtttcgccattttgcccaggctggtcttgaactcctggacccaagcaattcacctgccttggcctccctaagtgctgggattacaggcatgaaccaccgctcccagccctctggtagttttaatatctattgagtattggttccttttgccctgcttttctttttccatgttatttgttttgcccataaataacagaagcagctgggcccgttatttttttgaaaaagtagggctattcttagtaatattattcatttggggcaataaactaaaagtaagtacagcatttaattatgtaattaaacttgtacttttattacctttgatttttcaatatcagtgattcagaatgaatagtagaaacaccgtgaacttaattggaagaacaagaacaaccaaaagtgtgtcccacttttattctgaaaacacatgtgacagactcataaaagttgccatcaatcaatcagatcatacaagagcatcatggtgagcatgccacaacgccccagtatggtttcttatcagaattcttacaggaaaaactctgcttaggtttgcagatggctcaatggtttattttttcctataaattgaatatattagtcattggtcttgatctgaagatgtccataattctgtttctaaaatattcaagtatttaaaagtaaagcccttggccaggcgcagtggctcacgcctgtaatctcagcactttggaaggctgaggcaggtggatcacaaggtcaggaattcaagaccagcctggccaagatgatgaaacccccgtctctactaaaaatacaaaaattagccgggcgtggtggcgggtgcctgtagtcccagctactcaggaggctgaggcaggagaatggcgtgaacccgagaggcggagcttgcagtgagctgagatcatgccactgcactccagcctgggcaacagagcgagactccatctcaagaaaaaaaaaaaaaaaaacaaaaaaaacactaaagcccttgatgccggaaaactggatactggaaactgccactgcagtccctaaatcagccctaggcagaggagagggtacgagggcaaaccactgaagaggccaacatttctttgcagtctcattgctttattttacaaagttattwaaatattacatttctgtctactctataacttttgtaaactttttattgcaatataatcctatatacagaaaattgcacataccagaattgaacagatcactgaagttttacattgctcttacctgtatrcacagctcaagaaaccatgttcctggtactcctaggaccccctaccccacaagggctccttcccagacacgtccaagattaacagtggtcctgactgcattaattatgtgtgtgtttttgtgtcgctgtgtaacttctaacggaagcccagggcttttcatccaaatgtccaggttaaatgggtatttcaggaagaagtgccaggcctaggttatttgtagaataagactgtaaacagaactgccctgctgttctttataaaacattaggcttgcaatagatagggacttagttcccagacttagcaatctatatatactgtagtacatgcagcaacaaatggaatttaccattgaccttaaacaacttttgacctgtctcggtttgcaaataggggttaaaattaaacaagagtcgtaagtgagcataatttcttacttggctgctcgtacatggaattggagggaaggttttacaagttgtgaatgaattctgcatttatatctagctgggtgcagcctggtgccttgttttgaaggtgaagaaggcactgtgtgcagggcaagatgaaaatttgtctggtggagtcattaagaacttttcccccggttacaaacaaaacagttcagggcaaactgtgttctattgatttcagacagagagacgaccctgctgtgagaggcaaatcaatgctgtacttttatttgaaagagtcagtaaaacctaggaaatgccacctgaaatgcaaaatacctaggtcaagctgtgaacaaacacatctgaataaatagatggcagaaaaagcttattacttgatgttcaagtgctgcaaacaacagaatctctcatttctggaatccaataaaacttaagtcctaaagaggcagtttttgaactcaaaaacccatcaaagtgataaacgtgtacatgagtgacgcctcacctcatttaatgtaaggaaacctcatacatctcaatggtacaggtcccttgtaaaaggttgttttcaatctatgttcaatgtaggttagtcagctatttaatagttacgttattgtcataagctcacatggaagtatttctttgtctggaagatgttttatgaaatggtattttcttccctttttttctgccattggaagaaaactttaatgttattcacagttgccctagraacaagaggcactgcgcaccacacagcgccacggtgggaagcacccgtgtcagtccagatgcagacaggggagggaaagrcataagccacagtctttttttatttttttgagacagagtctctctctgttgcccaggctggagtgcagtggtgcaatctcagctcactgcaacctccgcctcctgggttcaagtgatcgttgtgcctcagcctcctgagtagctgggactgcaggcgcctgccaccacacctagctaatttttgtattttagtagagacggggtttcaccatgttggccaggctggtcttgaactcctggtgtcaagtgatccacctgcctcagcttcccaaagtgctgggattacaggtgtgagccactgtgcctgacagtcttttttttttttttttttttttaataatgctatcttaaggtttttgtttgcttgtttgttttttggtttgttgtttgtttgtttgtttgtttgttttgagatggagtcttgctctatcaccaggctggagtgcagtggtgcaatctyggctcactgcaacctccgccrccccrgttcaarcgattctcttgcctcagcctcccatgtagctgggattacaggcgcacgccaccacgcccggctaatttttttgtattttagtagagatgaggtttcacaatgttggccagcatggtctcgatctcctgacctcatgtgatccgcccgcttcggcctcccaaagtgctgggattacagacgtgagccaccgcgcccagcctatgctttcttaatgattgttacttgtaggtattagatttcataatgtgtttttttatttgatctttgttttttgtactttaatgtattatttgaaattattctaataaccactgtcctatttggcagaagttacagaataatagttttaagagaaaataagtaaagactcacaaggtaaatatgccaaaatgctaacactagctaatttgagggagttggaaaataaacaattggctacttctttgaacttttctgtactttgaaaatctccaagacttaaagaaagttgctgtatttggtgaaaaataaactctctccttactgagacataatacttggtgctttagtgctatagataatactatgaagtattatctctgggccaggtgtgctggctcacgcttgtaattccagcactttgagaggccaaggcaggtgggtgtctcaaacccaggagtttgagaccagcctgggcaacatggtgaaaccccatttctacgaaaaatacaaaaattagccaggcacggtggcacatccagctagtcccagctacttgggaggctgaggtgggatcacttgagtctggggaggttgaggctgtggtgacctgtgattgcaccactgcagttcagcctgggtgacagagtgagaccttgtctcaaaaaaaagaaaaaraaaaagaaagaaaaatgtattatctttataaaaaagatgttcaataaaagacttctatgaagaacaggtattcctagcccaggcaacatagcaagaccctgtctctataaaaaaatttaaaaattagctgggcatggtggtgcatacctgtggtcccagctacttgggatgctgaggtgggaggatcacttgagcttaggaggtgaaggctgcagtgatccatgattgcgccatgtgctccagcctgggagacagagtgagatcctatctctttaaaacaaaaaacaaaaaacaggtgttctcaaccttaaccacatattgctttcatgtaggaatttttttttttttttttttttttttgagacagagtctcactctgccacccaggctggagtgcagtggcaaaatcttggctcactgcaacctctgcctcccaggctcaagccatccccctacctcagcctctcaagtagctgggacgcacagtaccacgcctggcttttttttttttttctttgtagagacagaatttcatcatgttgcccaggctggtcttgaactcctkggctcaggcgattcatctgccttggcctcccaaagtgctgggattacaagcgtgagccactgcacctgaccatctaggatattttaaaaaaataccaatgtctgggccccacctccacccaggtattcaaaatgcctgggagatggggccctgtcattggtacttttaaaaagttccatagatgattctaaaatggcagccacagtgaggaaacgctggtacacatgaaagctagcgtcagggataaaaaccgaagaatggaatttactagtttgttgacttggccctcatttattccctaccatttgcacctgctatctactttgtaaaagaaaaaaaaatcagttaagattttcctgggaaaaaaagaacttcctaaacttggtggcttgaaaaaagtttttttgtgattctttgagttcttctgatcaaggccagctccactagggctagatggtctcggatggtatcactcacctgacctggcgttctccccaatgatctctccttctctgatgggcttgcctcagctgcttcacttgatggcctcaaggagaggacaagccctggtcaacaaatgttttttaagtctttggccaggtgcggtggctcacgcctgtaatcctagcactttgggaggccaaggcaagcagatcacctgaggtcaggagtttgagaccagcctggccaacttggcgaaaccctgtctctactaaaaatacaaaaattagccgggtgtggtggtgcatgcctgtaatcccgactactcgggaggctgaggcaggagaatcgcttgaacccaggaggcagaggttgcagtgagccaagatcacgctattgcactccagcctgggtgacagagtgaggctccttcttgtcaggtttgctaatgtcccattggccaaaagcaagtcacatggccaaaactagatccaagaggtagagaaacattttccccctcttaatggaaaagctgcaaagtcatactgaacartgactgcatatagcagtgagacagacacatttgtgaccatcttttgcagcctgccacaacaaatcaaaatatatccttgtttagcagaaacatatgataaagcaagatatttattgggatctcttttaaaaatgagttttttctagttaattttgagaatgtacctttaacttccattaaagaaatttaatggaaatttccattaaagaaatttaatggaaatttccattaaagaaatttaatagtggttgagaaatttttaaaatcgccacctgcccagcagtggtcataaaagtaacattttaaaaataaaatgcagaaaacgataaagactaaaataaaaatcatcactaaactcaatactcagagataatagttcagtatatgttttttatataaaagcatagttttacatgtctttactggtttttataaccagctctcctcatgtattagtccattccsattgcaataaagaaatacctgagactaggtaatttatttattatttatttttattatttatttttttgagacagagtctcactctgtcacccaggctggagtgcaatggcgtgacctcggctcactgcaaccaccgccttccgggttcaagcgattctcctgcctcagcctcccaaatagctgggattacaggggtgcaccaccacacccagctaattttttgtatttttagtagagacggggtttcaccatgttggccgggctggttttgaactcttgacctcaggtgatctgccgagactgggtattttataaagagaagaggcttaattgcctcacagttccacaggctgtacagcaagcaaaatcctggcatctgctcagcatctggggaatcctcaggaaactttcaaacattgtggaaggcaaaaagggagcaagcatctcacatggctggagcaggaggaagagcagaacggggagatgccacacacttttaaacagccagatctcacgagaattctatcacgagacagcgctaggaggacggtgctaaaccactggaaaacgcccccacgatccaatcacctcccacccagaccccagctccaacgctgaggattacaattcaacatgagatttgcgcagggacacagatccagaccatttcacctcacctaacagtatgtcatggctttccatgtcatgaagagtttgtcaccataatttttaatagctctgtagagtgctatcatttgaatgcaatataatttatttagaaaagccctaacttacagacatttggggggtcttattggtaatcagttgttttgttaataaaattgataattaatgatgatagatactttaacagcactatgtaccgagcgccattcagagggttttaagtatattatgtacttcacaataagttcacatggtaaacatgctgcttttactctaattttgagatagggaaactgaggaacagagagattagataacctgtcagtggtctcacagttagtaattgacagagcaggcacttgaatcctgcttaggttcgagaacttgcttaggtttcagaatctctcctctgcctcaaataataatttataaataacttccttgagacagattccaatagattgaaatgctgagtcaaatggtatgcactttttttttttttttttttttgagatggagtttcactcttgttgcccaggctggagtgcagtggcacgatctcggctcactgcaatctctgcctcccgggttcaagtgattctcctgcctcagtctcctgagtagctgggattacaggcatgcgccactacgcctggctaattttgtatttttagtagagacggggtttctccatgttggtcaggctggtctcaaactcccgacctcaggtgatccaccttgcctcagcctcacaaagtgctgggattacaggcgtgagccaccacgcctggcgatatgcacatttttaaggcttttaatccagaatgtcatattgctcttccaaaaattgtaccaatttatactcccacttgcgggtttgagggctccatttcactctaccttttccactatggggcattattattttctaaatctttgcgagcttgataagtataaaaagaggaattactaggtgcagtggtacatgtctgtaatcctagccactcaggagggtgacatgggatgatcccttgaaaccaggagttcaaatccagcctgcgcaatagagcagagacattgtctctaataaacaaacacaaaaagagaggctaccttagggttttaactttagtaacttagttcctaacaaggttgagcatgttttcttatgttagacatttgcataagccaaggtgcaaagagctgtgtgaaaatggaagaccaattcaggaattcccagatgtgtggcaggacatttgggtgtgtgtggacattgttgaaagatgaggcctggaacccagtgttgcaaactacatgtcaacagggccagacaatgtaggtgaatgaaacacgttggggccagkgtggccagagagctcctggatgcctaaaaccccggtgaattgttgtcaagggacaataggaattcagacttccatagaaaatctggtttttccatgttggctcaattccaccctactgcaggggtcaaaccaaacaggcctaccaatcaaatgtggtttatgggctcccagtctgctgtttgtagtctggaggtgtcttagtttattttctgctgtgtaacagaatccctgagactgggtaatttataagaaaagaggtttatctggctcctgattctggaggctgggaagctcaagagcacagcagtggcatctggtgaaggcgttcatgctgcatcatctcatggcataaagtggaagggcaagagagcacataagagtgagaaccaagagagggtcaagcttgcttttacaataaatccactcctgtgataatgagcccaatcctgcaattatgaacccatactcaaaataatgacattagtccattcatgatgtcagagccctcatgacctggtcagttcttaaggtcccacctctcaaaactgttgcactggggatcaagtttccaacacatgaattttgggggacacattcaaaccatagcagagggcaagattgtaaaagctcttatgtgttgtggtcagcattttgggatcttcctggccrgaatgtgatctatagaactgaagtgatgggtctggccagggttataattctgaggagctggctggggcagtctgcttggttagtgacagtatgaagcaaaggaaagaaatgacagttcagaatctagctcttgagggaggagataagcatgaagctgggtccaggggaacaaatgtagaaatgtaaaatgagaaatgaagtgaggagttggaattctggtaagggtggtaagaggcggcagaagaggtctaggatgagaccaagtctgagtttgcttgtttgktggaggktgagtggtggtggggcatctcaagctggcttgaaaaatcagacacagggtcaaccattcaaatagaagggtgacaggatcagtgctgattataggaagagccatctggtggtattgactgcatctggtggaaatactgcagacagagagacccactggcaggcaattacagtcttcttgatgagagatgttgagcacctgagtgaggactgtggcatcaaaggaaagcaaaaggtatgtgtttgagcaatgctattatcaaccagcttggagaactgctggtagattggaaatccattggcgactcctgtactgtgcaaaatttcaacagtcgtagctggaagggaataactagtgcattaggttaatcgtgaaggtgaaagattttgaagtatggcagggtttagtggagcaaagaagggaacattctcaggctacatgtctgggaatatggaagctgaaggccttcaccacctcaggaaaatctgctataattagaagagtgtttgacaagagctaaaaattataaacagcagagatgcataggcaggcggccaatggaccatgtcagcattgtaatgaaatctgaactgctctgagccaaggattgcctatgtttctcaactttttactgacattgcctagtcttcaccagaagactgtccaagaatgactctggcttgaaggcatttaggctgctactgaagatattaataaatataaattctctagatacattaagctgaaaaccccaagaatatcccattcatggctttacctccaccatctactctggaatgttggaggcatgcaagaaagtatttgaataagtgagtaaattatctggaaacaaaatcaacaagttctttagcacatctgcactcctaaactagagcctagaaaattcacttaaattttctaggctgtagttcacatagcttggtaacgagggggaggcattaggaaatttttgaaatccattcaattctaaaattcaggggttttcctcctttcttcatttcatcttttccttttaaactaaggagtgaatttgttggcagttatgcgagatgagtgcagagatgtcatattaagaatgctataccactgtctcagggactacaaaactagaaacatccacatcaaacaaaacagggtctcttttagtaagtttctcgtgttaaaaatcctaaataggccaaatgtgatggctcatgcctgtaatcccagcactttgggaggccaaggtgggaggattgcttgagtccaggagtttgacagcctgggcaacatagtgagaggagagccatgtctatttgaaaaaaaaaaaaaatcctaagtgatcaattgatcacttgaactggttcaattgatcaattgaaccagtactgggtggaaacaaatatatacttttaatttctttctttctttttttttttttttgagacggagtctcgctctattggcaggctggagtgcagtgacgcgatctcagctcactgaaacctccgcctcccggattcaagcaattctcctgcctcaggctcccaagtagctgggactacaggtgtgcgccaccacgcccggctaatttttgtatttttagtagagacggggtttcaccatgttggccaggatggtctcgatctcttgatctcgtggtctgcccgcctcggcctcccaaagtgctgggattacaggcgtgagccaccatgcccggcctatgtactttgaatttccaaaaatgacccaaattagcaatcagaataagaggctacaagttatttaacactacaattccctgccatttggtaattttccattttttttgttgttaaagttaattgaattattagaattagtcacaagcacaattactaaattaatgaagcaaataaagcttagatgtatatcaataaacttttgtaaaaaatataaaagcaatacaacattaaagaaagttttataagtaaggaaaacactggtatttcctccactcacatttcacatgcaaatatttgtgcatggtttattaatagtatacaatttcatattctggtgtttttgtggggttttttttttgtttgcttgtttttttgattcagagcctcactctgttgcccaggctgaagtgcagtggtgcaatctcggctcactgcaacctctgcctcctgggttggagcaattctcctgcctcagcctcccaaggagctgggattacaggtgtgtgccaccacgcccggctaatttttgtatttttagtagagacaggctttcaccatgttggccaggctggtcttgamctcctgacctcaggtaatccactcctctcagcctcccagagtgctgagattacaggcgtgagccaccgcgcccggcctttgtttttgttttaactttagatcaatcattcttaaccaggggtgattttgcacctgaggggacatttggcaatgtctggagagattttggtctgtcacatctgtggttggggacctgctactggcatctagtgggaagagactgggaacactgctaaacatcctaaacgacataggtcagcccccacgacaaagaattacctggtccaaatgtcgataatgctgaggttgagaaaactgctttagattatagtaaaaaaagcggtcttttccacagaaacattatccccatgattttattaaagggattatattttcaaccatgtatttagtggttatgtatgccaggcattgcaaagcactgtacacagatttttctcatttagccctcccaaaaccctgtgaggttttaaagacgagtacaccatgtcttaaagagattcaatagttgttcagagtcatacagttagtggtagcaatgcttgtctctccgacttcaaagctggtgctgtcagttatcgtgtgtaatgtcataatgaacatcttcatatacggatttctgcattttaaaagtcccttccgtagcttattttgaagatattaaagggtcaaagggaattggcagttatggtggcttttcctacatgtttctaaattgattttctacagctgaaccaatttcagcactaccattgaattgtgagaaagccctttcaatatattctcatcagcattgactatttaacatttaaaaacaaaattccttgttttcttaagaaattaaaaagtatatatgtgagcttaaataataagcaatttctggaacttgttaccacagatagttctcccaaaatgaggaccaaactgtgtaagaataatgagaacgtcaagtcaatataaataaagcttgcatttcaaagaatcatgtttaacaaaygcagttatttgactaagaaaggctgagccccaagaaaaacattcctggttactctgtaaactttgcctcaaatgctctgtttatataagcctatgaagagcaaatgagagaattggattttatagtttaaaatgttttctcagataatattgacttttttttttgccctgtcctagaaataatgaaaaataggcctttgctaggattcttgtgaatgaagggtacggtcctacccatactccccataactaccctcccagagtcctgacaaagaatagtgatagtgatcctaacagcaaatataataataatagaatcgagtccagtatttttccaatactagttgtgtcccattagaggatacagaaatcactttagtagtttttgatcagaatttttaagatgaaactagaccagaaaacaacataaaattaacaagtgcatcgcatgtaataagcacaagtattgttttatgaaacttgtttgctttatatacgtgtgtgtgtgtgatggtatacagtgttttttctgtgggttgcagtctaaaaggttgaaaagccactgatcagatttacctacttcatttgagaggtgaggtttggagacgttggatgatgtccagggatacccagctggttagtggcaaagctggaatgagaacggaagttccctaatccctaggccagtgtctactccatcagggtgctcagcctgggatcagtctctggcagcaggcaggaaacaggcttaatagagaggcttttagggagtagagaaggagcaactggacattggcaagagtgatgggactggtagctttgggatctccatgtatctttcagcccaagccaaattaaattacttactgaacagtgagcacattgtacattcagggtcttcaatcttaagcttgccattatctcctcaaaataataaccaagtgatgcttactaggtattcaaattgagctgtcaccagaagtcttgttgaatattttctcacttccctaagcaagttgaaccaagcaggacagatatggagaatggatgattgctgatcacccaggtcattattgaagggcaaattgaaatgggttggtgcttgctaagaaggtagaagaggccgggcacagtggctcacggctgtaatcccagcattttgggaggccagggcgagtggagcacttgagttcagctcaagaccagcatggccaacatggtgaaaccctatctctactaaaaatacaaaaaattagctggacgttagtggcacgcccctctagtcccagctacttggaaggctgaagcaggagaatcacttgaagctgggaagcggaggttgcagtgagctgagattatgccactggactccagcctgggcaacagagcaagactctgtctcaaaaaaaaaaaaaaaaaaaagagaaaaagaagaaaggtagaagaaatgctttttggtactgagaagtagagattattacaccttaagttgccatgtcctattgggaaatcaagacagcatccaggcccgtctgatcctcacaaaacctaaacggtcctccccatcagcactaaagactgactgagtcaatggggccacccttgcattgggaatggacgckcgttcattcctttaacattggttgagagtctcctggtggccaagtgctatgaagtcaaaggcactgtgagaactggtcctctgctcagtgcagctttttcctataacaggtgggctgatgccttcaaggaggtgatgtgagagatccgttaaaatgcatatattcctagcagtgggaacaagttagttamaattaacccaaggatatagggaccagattcactcacaagagaagattttgagtgagaatagttagtaagagactaacctacaaacctgatgaagactgagggagagaggtcaaggaggggaggaaaaaaggacagtgctgttgctccccaggacaagctgcatcctcctcccagtgttgcttacagctgagagctactcacacttgatcacacacaagaatcttctggggattttgtgaagatgctgacgttggatgttgatacaagaggcctggcgtgggtctcaatttcttttttgagacaggatctcactgtgttacccaggctaaagtgcagtggcctgattttggctcactgcagccttgacctcccatgctcagatgatccttccacctcagtctcccgaacacctggggccccaggcgcacatcacaacrcccagctaatttttgtattttcatagagatgggatttctgtatgttgcccaggctggtctgaaactcctggattcaagagatctacctgcctgttacaggaaagggatcccgatccagaccccaagagagggttcttggatcttgcaaaagaatgaattcagggtgagtctkcagtgcaaagtgaaagcaagtttattaagaaagtaaaggaataaaagaatggccactccatagacagagcaaccccgagggctgctggttgcccatttttatggttatttcttgaagatacactaaacaaggagtggattattacccccgtttagaccatagagggcaacttcctgacattgctatggcagtggtgggagtgtagcaggacgaccagagattgctctcatcgccactttggttttggtgggttttgggcggctcctttactgcaaactgtttatatcagcaaggtctttatgacctgtattttgtgctgactcctgtctcatcctgctatgtctggaattggtgggttcttggtctcactgacttcaagaatgaagctgcggactctcgcagtgagtgttacagttcttaaaagcagcgggtctggagtttgttccctctaatgtttggatgtgttcagagttttttccttctggtgggttcgtggtctcgctagctcaggagtgaagctgtagacctttgcagtgagcgttatatctttcaaggcggtgcgtttggaattgtttgttcctaccagtgggttcgtggttttgctggcttcaggagtaaagttgcagaccttcgtggtgagtgttaccactcatataggctgtatggacccaaacagtaagcagtacaaagatttattgcaaaggacaaaagaacagcacttccacagtgtggaaagcaacctaaacagggtaccgctgttagttttgtcagcctgcttttattctcttatctggccccacccacatcctgctgattggtctgttttacagagagctgattggtgcatttacaatccctgagctagacacaaaagttctccacctccccactagattagctagacacagagtgctgattggtgcatttacaaaccctgagctagatacagagtgccgattgctgcattcacaatcccttagacataaaggttctccaagtcctcaccagagtaactagatacagagtgccgattggtgcactcacaaaccctgagctagacacagggtgctgattggtgtgtttacaaaccttgaggtagatacagagtgctgattgctgtatttacaatcccttagctagacataaagtttctccaagacccaaccagagtaactagacacagagtgcmaattggtgcattcacaaaacctgagctagacacagggtgctgattggtgtgtttacaaaccttgagctagagacagagtgctgattggtgtatttacaatcccttagctagacataaaggttctccacgtccccaccagactcaggagcccagctggctttacccagtggatcccgcaccagggccgcaggtggagctgcctgccagtcccactccgtgcgcctgcactccttagcctttgggcggtcgatgggactgggcaccatggagcagggaggggtgctcgttggggaggctctggccgcgcaggagcccatggcggtcggggggaggctcagacatggccggctgcaggtgctgagccctgccccgctgggaggcagctaaggcccagcgagaaatccagcacagcagctgctggcgcaggtgctaagcccctcactgccccgggcggcggggccggccggcttctccgagtgctgggcgcccccagcccacgcccacccggaactcacgctggccggcaagcgctgcgcgcagccckggttcccgccggcgcctctctctccacacctcccagcaagmtgagggagctggctctggccttggccagcccagaaaggggctcccacagtgcagccgcgggctgaagggctcctcaagtggggccagagtgggtgccaaggccgaggaggtgccgagagcgagcgagggctgctagcatgctgtcatcgctcaccgtgacttagaatgcgtaaccatctgggaatgcggtccagtaggtttcagccttattttacccagctcctatttaagatggagttgctctggttcacaggcctctgacacctcagcctcccaaagtgctgggaccacaggcatgggccactgcacctggccagagtctgcatttcttctttttttttttttttttttttgasacagggtctcactctgttgcccaggctggagtgcagtgctgcaacctcggctcactgcaacctccacctcccaggttcaaacaattcttctgcctcagcctactgtgtagcagagactacaggtgcgtgccatcacacccggctaatttttgtatctttagtagagacagggtttcaccacgttggacaggctggtcttgaactcctgacctcaggtgatccgcccgcctcggcctcccaaagtgctgggattacaggtgtgagccaccacgcctggccagattctgcatttctaacaagcttccaggtgctgctgatgcccctactcttaagagccacactcaaaaagcaaggctttgtgcccactcctgccactttctgcgcctcagaattctttgcaaaaagagtagaattcaacttgttctgtttgcccttctttccccttctgcttttaaaaatgtaatgttttaatgcacaaacatgcataatatgtaagcacatacgtgtttgacacctgtcatcaaacagaaagtattgaagttgaggtttggaatttcagtaacacgaggttagtaggtgttatgtgttcattttataaagacagcaggtaattaattataaatgtcacgatcttacctctgcaataatggaatctgtttctgagtaagagtcagtttgggattatcagtattaaagagaatgaaaaaggaagaaaaatgtcttgtgctttcaaaaatagtcatttcaacattaaatgactttttgtcatgggaatgtactcttcatacttttatgatgtagttatttaatagacattggctcataataacacgtcagctaagcacacaaatgtcggtaaataagccagattctctctttgctttccagactctccttctccatcccacagcttcaccggacaagttttactccaaattcttttaaaatgtgtgttaagaacaaaacaaggtagcttcctttagataggcaagcatcaaaataattgtaaagtattaaaatgcaagttaaagaaatagaaatattgcttaatagtgtttttcttgaatacttgaatacttttattaaataaattcaagtttaggtagcaagaagaaaagactcttgccttatagagagcccttaggatttaagactcatgctgtttacaggaaaagctgtaacaaaatttaattttagttaggaaacctggttacaaatcagatcatcatataatcatcatatgacatcagggcaaaagaacagaccttttttcttctgatcttctgaaaatgcacatttttattaatatttttaaaagcctaattcaattaaatttcttcaaaatattggtcttgtccaattttttctttattaaaaactattaaaaatattcattgtcttaagtagcttttttcttcttttattttaggaatgatccctctcttgtcacccaggctggaatacagtagtactcaaactcactgcagcctttagctcctaggctcaagcaatcctcccacttcagcctccccagtagctgggactacaagagtgcatcaccatgcttggctaatttaaaaaaaaaaattgtggagatggtgtctttctgtgttgcctaggctggagtgcagatgtgcaatcattgttcactgcagtctcaaactcctgggctcaagtgatcctcctgcctcagcctcctgagtagctgggaccacaggtgggagtcacaaagcctgcctaatttttaaaaaaatttttagtagagatagggtctcactatgttgcccaggctggtctcggactccagacctcaagcaatcctcccacctcggcctcccaaagcactaggattacaggtatgagccactgtacacagcccttgagtcgttctttttctcattagcatgtgtattagctttttacctggctctgcaacaaattaccacaaattcagcagcttcaacaacataaatatattgtcttacaattctgcaggacaaaagcctgaccaggctgaaatccaggcattggctgggtcaggttcctgtctgtaggctctgaatacaatccatttccttgccttttctagcttctagaggccactcacattcctggctggtggcttcttcccccatcttcaaacagcaaaggcagagtcagagtggagccttcttacatcgtgtcactctgtccagctcttctgtttccttcttccaatgttgaggacccttgtgattacatttggctcacccagataattcaggataacctccctattttaaggtcagctgatcagcaactttaatctccctttgctgtgtaaaataacatattctcaggttccagggattaggatgtaggcatctttgtctgttctgcatgtgtgtgtttgagggagtgagtgggtggaggccattattctgcctaccacaatatatcttatcagtaattaaaaagaatcttctaagagaggactattgaaatttgggtacagatagcatttgcacagtgccattgcatcaaaattcagattgcattactcactggtggaaaatgctgtaactctaaagcaaagtatttctcttttagttgcatttatgttgactcccatgttttccttttctttttttaattttttttttttattttgagacaggggcctgctctgtaacccaggctggagtacagtggcacaatcatggctcattgcagccttgaccttcctaggctcacatgatcctcccacctcagcctcctaagtagatgggactacaagcacgtgccaccgcactcagctaattttttattttttgtagagacagggtttcattaggttgcccagggatcttcttacctcggcctcctaaagtgctgggattacaggcatgaaccactatgtctggcaacttcttctctagtaatgatttatatattataatcttggagtctaactatgattaaatagaccyttcaatctctatgacctatccaaaatttatttcatagacagggttattgaaaaacacttagcacagtgtttctcaaatggggtgattttgctcacccacaggacatttggcaatatctgcagacatttttggttgtcacaattgaggagagggtgctatcggcatctattgggtagaggccaaggatgctgctaaacatcttacaaaacacaggacagcccccacaacaaagaatcatccagcccaaastgtcaatcgcgctgaagtggagaaaccctggcttagcaagatgccaacctacagcaccccacccctcaaccgaattaggtattagtaaatggatcagaattgtattagtatattgrtttgtatattgattgaattagatgttatactaattagatgatgagtcarcaactaaaattctggtcaaaagatcaactggaggaaacagaagatgggtagatcagtacataccaatctgtgtgaaatgcgaaaggtaataaactgaaagaaagtaagcctgacttagaggcttaattgatgaaattgatgcccttctctcatgwytctcatctctacgcttcttctttatcaacattgcaggtgttcctggctctatgccaaatgcatcctggactggaaacctcagagctataaagtggagtgacatggaagacagacacggaggctgccacggtgaggctctcgttccatgcttctaggccactgcctgttggtgttagcaggaaggtagctgtggaatccagggttctcatggagagagaattgctgctatatttagaccaatctgttagttattggagaagccagaggcttcaagacacagtccttcaaaaataagtttaaacatctcattgatgttctctaacttataattacctagggagatggaaaaatgggttcaaatcagggcggcatgtttttcttcctgctagttttcagctttctttctttctttagagacagggtttcactctgtcattcaagctggagtgcagtggcatgaatgcagctcactgcagcctcaacatcctgggttcaggcctcacacctcagcctcccaagaagctgggaccacaggcgtgcaccaccacacctggctaatttttttttttcttgtagagtcagctttcttgtttattcctcttgctgtgccttctgggagtccagctgttcagaggcgaaagccatcaggaggagaagtgatgtcatgttggcaccgcagagaaagctgggcccccaaccctcaggccagtccctgctccccctacaggcagccttcccagtggcttggagagctgtcggggtttgcacagctctggcatgatggatggcaggttacactagcaagaagggttcccctccaaatggaaaagaactagaaatcctaagtcatttccatttctatagaattttgtgaaggagagtttttatcagtcctggcacacactgcattcagaatattgcccagcatatactgggcatgagtattagtttgctagggctgccataacaaagtggcacagactgggtgcttaatagaaatttatttagttctagaggctggaagtccaagatccaggtgtcagcagggctggtttattaaggcctctctgcttggcttgtagatagcattttctccctgtgttcccacatggtcttccctctgtgcgtgtctgtgtcctaatcgcctcttcttctaaggagaccagtcatattggattatggcccaccctaaaggtctcattttaatttaattacctctttaaagaccctgtctccactctgagacactcagtgttaggattcaacatatgaatttagagagacaaacaattcagtccataatatgcaataaatatttatttagtaagtgattgtttgaacaaatgaatcaatgaatgaatgacaatatggtggtttggccttttctctctatggcaacgagactttgcctctactcctcagtccatcttttttttttttttttttttttttttttgagatggattctcgctctatcaccaggctggagagcagtggcgccatctcagctcactgctgcaacctccaccacccaggttcaagtgattcttctgcctcagcctcccaagtagctgggataacaggtgcatgtcaccacgctcagctaatttttgtatttttagtagagacggggcttcaccatgttggccaggatggtctcagtctcttgacctcgtgatctgccccccttggtcccccaaagtgctgggattacaggcgtgagctactgcgcccggccccatcttacctgcacctaaatgttaaatgtttcaggtgaaaatctccaagttgctccatctctacaactctccattacaccaacctctttctcatgtgtctcttgatggtctcatcccactgtggacagcaatgttttcatgcaactgtaaagaaattttggtccattctgaagcatgttaatatatthaatcagcctgtattttytccaggggacagtgcatgccacctgcctacattatttttttttttttttgagatggagtttcactcttgtcacccaggctggagtacaagtggcacaatctcggctcactggaacctccgtctcccgggttcaagtgattctcatgcctcagcctcctgagtagctgagattacaggcacccaccaccacacccagctaatttttgtatttttagtagagacggggtttcaccatgttggccagactggtctcaaactcctgaccttatgatccacctgcgtcggcctcccaaagtgctgggattacaggcatgagccaccgcacccggcctgtactaccttcatcagccctcttagcacttagaatgatcttcaacttggagtgcccatctctgattacagtgtctttgtcacctctactagtttccttcacctactcacatcctacttattttactgtctttcttcccagagcagaagctccaagacagctaggatttttgaccagtttgttcactgttgtgtgtccacacctaaaccatgttgtttttggtttgaattgggatttccagaggttcarcatttcaagctttttccttctatgagcttccttctgaggactccccgtctgacccgtgtattgtaagccactacaagatgtcctcaccaacatttttggtccttttgccattttgaccctacaaggctgattcctaaccctaatcattaccaccatctgccttttttgccgtttgtacttccctaggcagagtattggtggggagtgttgcggaactctcttaagacaaacccaccattgggtcctgtcatctaccttcagctaggcctcctggctacctacttatccttttgtttacctcattattttcctagtgcccttcctaagggacaccttttcagctttcctgctcacctttaagctcccaaggtgtattagtccgttttcacactgctgataaagacatacccaagactgggtaatttataaagaaaaagaagttwaatggactcacagttccacgtgactggggaggcctcacaatcctggcagagggcaaaaggcacatcttacatggtggcaggaaaaacagaatgagagccaagaatgagagccaagcaaaagaggaaaccccttataaaaccatcagatcttgtgagacttactcactaccacaagaacaatcatgggggaaactgccccccacgattcaactatctcccactgcatccctcccacaacacatgggaattatgggagctgcaattcaagatgagatttgggtggggacacagccaaaccatatcacaaggttatgctaaaacagcctttctattctcaaaagcgaccatttcaacttgaaaaagaacattcaagatatgtgatcaaaattcatcatctagtcccttgtcaggtcatcctgccccaccatcttagagctgtgtggacaccttctttcattgttccctcctgtttcaagaggacaagtcacccatcctcccaacaaaagccgccagctatggtctcagctatctgtgggccccctctctcagacccttgctcttttgcattctcagcctctccctttctgctgcctcttttccttttctctgaaagcctgtactcattgcccctatcttgaagacatcgagttgtctatgaaccttctgctttctccaggccgaaatattctttccttgttcacttccatttctttaagcgtgtgcttaaggcctgtgtttttggttctcrccgcctggtcattctttcacttcctacaattctggcttctttccccaatgacttctactctctattatgcttcttcccagcccactgaattaatcaccatgttctatctgtccttctgtactagtgtcttcaacatcctccctttcccactcatcacagacattaactttgaacaagctctccagtttgtgttattactgcagcctcttggtttctaatgtaccttgcaaaacacttcaaaattaatcttgctaaaatgagtttcatcacttgattcttctcttcaaaaatctttaaggactgtccatacttgtgagacacaaggcccaacccttcagtctgtgaagtcagtcaaccagcaattgtcctgtgtgcccagaagaatctctggaaaatggttgcaacttcctaccattcttgtttctaacctattcccaacaaaaccccctctcccagcaggaagtccccaccccaaaagctattgaggttaaaaaaaaaaaaaatttcaatattgacgtgttacatcactgaggtttatcacacatctaggcagaggtgcaaagtaggcacttggatagaccagagctcaggaaaaagacttactcaacgcaacccataaagatctctcccacctgtaccactgtaggacttctcatctgtaactctcatttagtaataccgtaggccccccttatccacggggggatacatttcaagacccccagtggatgcctgaaaccacagacagtaccgaactctaaatatactttgtttttccctgtacatgcatatctatgataaagtttaatttttgaagtaggcatagtaagaggttaacaataataactaattataaaatagaacaattataacaatatgctgtaataaaagttatgtgaataaaagttctgtgaataaaaaagttatgtgtaataaaagatatatgctctctttctttctcaaaatatcttaatatttttggatcgtggttgacttcgggtagctgaaacctcagaaagcaaaactgcagataaggggggattactgtacatgaatgaccttgtaacacctattatgttactaacacaattttcatattaattttgatatacacaataattaacataattaaaatattaacacctgttactttatgccttgtatgatttaactctcatttttttcaaataacatatttgtacctcttgttcttctaaatagagttccagttctttgtgggctgagactgcacaatcatatttcatttgaatcctgtaccattggcacagttgtagttagtcggagagtacctctagtattctgtaagttcatcacccttttgaaagcaagcatgttttgactctgtttcttgttctttcttttgcaggccactatgtacatggtatttgtatctatggaaacggagacttaaagtggctggttaattcaccaagcctgtttgctaacaagtttgagcttaatacctacccccttactgtggaatgcctagaactgaggcatcrcgaaagaaccctcaatcagagtgaaactgcgatacaacccagctggtatttttgagctattcatgagctactcatgactgaagggaaactgcagctgggaagaggagcctgtttttgtgagagacttttgccttcrtaatgttaaccgtttcaggaccacgtttatagcttcaggacctggctacgtaattatacttaaaatatccactggacactgtgaaatacactaacaggatggctgggtagagcaatctgggcactttggccaattttagtcttgctgtttcttgatgctcacctctatattagtttattgttaggatcaatgataaatttaaatgacctcagatctttgcaccagatactcatcatatacaaatgttttagtaaaaaagagaattgtagataatactgtctaggaaaataagaattaggtttctttgaagaaggaatcttttataacaccttaacagtcaccactgtgctcaaccagacagatagtgaaacagctttctgggtaattcaccaatttcctttaaaacataagctacctgaatggagaatacatcttgtttctgagtttcaacactagcatttttggcttactcatggacaaagttctgtatatagtataaagtcattaacaagaaacaggatatgctttaagacagaattcactgtctgttgcttcagtaaaaggacctcggggaataaaacatttctctcttatatgccagaatgtaggctggtccctatgtcatgtcttccattaagaacactaaaaagtccttgcaagaatggagatatgcattcaagagaggtgctatcacatagatctagtctgaagtctggaacactttcctcttctatgacccctctctccccagtattatcttacttgcaaaatggagaccaaattctatcctgtgaggcttttaattgcaccatagtatgctctgagtagctttacactgcctggtactgatagtagtggctcgatttttaagagccttcaattgtagatgaacatctctgttatttatccctcattcatccatccgttcattcattcagccttcaatcaacatctcttgagtgtctattatgtacaggacatgtactgagacaaaaaggaaacataagagctttttcactctaaaaatcttggcaataatgtcaacaccagaaagcctcctctggagaatcttacagagtgattgtagtttaayacaggaacacacagggctgtgtagcatgataccaggcccaggagatcagtaattacaaattaagggttaaatcagagattattcaacagagagggagaaaggaggagacagagggaggacctgttgtgttccagccattctggtattcctttatgtatctaatttcattcaaacctcacaacagtcttgtgaggcccttatataattactcccattttgcagatgaagtaactgaggcttagaaaggttaatagcaccggggaacaatttctctgggtgagaattgggactctgttgctggtcttctcagttcatttcctgaggtggatttactgagagaaggtgaaataaagccatatttagtayaccagagaaggtagattttaagaatggtctcagtgttaatactgagaaaaagtcctgtcagttcagaaaaaatgtgaagtctactttagtattcctgtaatactaaaccgttgagtttctaaatatttatttattctaacaaaaagcaattactacaaatggatgacacatttaatgaacacaattttattttttttctgtaactgtgcttgttgaatgtcaatcatatttaaagggaatgactttgaagtaaaaccttttttcttgctactgaaaaaaatggagttgttttgggtggtaaagtgttaaggaatagggacagctggtcacacaaggaactcttgaaggccacatgtgaaaacctgtcacttgcacagaggccagtcccactaaggtgaccagagtgggctccaagcacaaactgccattggctatagatgggactgtgtccccccaaaattcatgtgttggagccttaaccctcaatgtgatggtatttgagatggggcctttggtaagggaagtttagatgaggtcacgagggtaggaccctcatgatgggatgagtccccttacaagacctctggcttgggccgggcgtggtggctcacacctgtaatcccaacactttgggaggccaaggcaggtagatcacttgatgccaggagttccagaccaggctggccgacatggtgaaaccccatctctactaaaaaatataaaaattagccgggctttgtggcatgtgcctgtaatcccagctatttggcaggctgaggcatgagaatcgcttgaacccaggaggtggaggttacagtgagctgagagtgccccactgcactccagcctgggtgacagagcgagactttgtcccaaaacaaaataggtgaggggatagcgaatgcactcagggtcagcagtggagtttaaaaattgtctcttttcaacttatttaaatgacagcacctgagaagaggaaccgttttacactggatgtttctcatgtagaacaagaaatctttctggaattgatgtttacatgtctgttgttggtcatctctcctgtgtcttaaatactttaatgttggaagagcatagtgtttgggctagtgggtttctgacagcccatgggaatgccctgaaactactgtatctgatgtttgttttcgatgaggttccatgttttgttttcttgggaataaattaatatattgttttccacttcggggatactgtgtatttttatatgacaattggttaaaaatccactaaaggatatgtctaacaaggcaattctcctggtgttaaacaaaatttacattcattcatacatacatgcatacctgtctaagaaacatccatccactgaaaaatcattaaactttcccattgtggggtgttggagagagtaactgggagtgatagagagaagagggcgcaatagaagatcagtgtcatttgaattgggtataactttttttttttggtaagagtacaagtatttttaaaatttgagacaggaataagttaacttattatttacctgcctctattgttcatttaaaaaaatcaagatatacattaggaaaaagttttatgttaatattaccataattactgatcaagtgccaatgtttttgagcagcatttcaattgtaagtttgataaatattgcctctaacagacacatggaaaatgatcaatactaaaaaaaaaaaaaaaatcatttaaaggacatcttatccatcatattttttcaaataaaaatattttaaagctaaagcgaaaaacattttaaactataataaatacatacatgctcataaacatggaaataatgaagaatatagaataaaaagtgcactactttctccagacataatcacttatttgctttttttggtttttgtttttctgagacagagtctcactctgttaaccaggctggagtgcagtggcacagtcatggctcactgcaacctcaacctcctgggctcaggtgatcctcccacctcagcctcccaagtagctggaaccacaggcatgttccactgcacatggctaatttttgtattttttgtagagacaggattttgccatgttatcctgtctggtctcaaactcctgggctcaagcgatccacctgcctcagcctcccaaagtgctggactacaggcttgagctaccacacctggtcaagtgctttctcagtgtactgatataatctatagcagtgctgtccagtagaatttctgcaatgataaaaatgttctacatctgcactgcccaatataattgccactcacataagctaatgagctcttgaaatgcagctagtatgattgggaaatattctttaacattttatttggctttaatttttttttttttttttttgagatggaggggactcatccaggctggagtgcaatggcacaatctcggctcactgcaacctccaccttccagttcaagcgattttcctgcctcagtctcctgagtagctgggactacaggtgcatgccaccacgcccagctaatttttgtgtttttagtagagaggggattttgccatgttggccaggctggtctcaaactcctgatctcaggtgatctgcctgcctcagcctcccaaagtgctgggattacaggtgtgagccaccgtgcctggccagctttaattaatttaaatagccacatatgactagtggctaccattggacagcagagttatagaggcaaacaatagttatatgtatgtgcttgtatatacagtgtatatacagtgggcatactaaaaacagatatactggcatatttgaattgattatataaataaaaaataatatatctttacaacttgctgttttagttcgacctttctttttttctttttcttttctttttttttttttttttaagagagactaagtcttgctctgtcacccacgatggagtgcagtggcatgatcatggctcacttcagcctcaaactcctgggctcaagtgatccttgcatatcagcctcccaagcgtgtaccaccatgcccggctaattttttattaatttttgtagagatgggagtctcacgatattttccaggctggtctcaaactcctggcctccagtgatcctcccaccttggactcctaaagtgctgggattataggcgtgcacctgcccataatgcaattttaaatagtagcagtggtagcagctttccttgtgttgtttccaacattaaaaagcacgttgaattactgttgttggagattttatatagctttttagtagataccttttattgagttaagaattacaatagcagaaaataaatataagtgttatgattctgattttttaaatcccagttgctatctcttttttgttggctgatataattatgtgtgacaatgtgttgttgtttttaatttttttccccacatattaattcaaaagataagaaaaaagttttctacccctgcttttttttttttttttttttttgaacacctagacttgagtacagtggcgtatgccaagcaagagattggagcagggatccatttaaacagagagctacacagttggagtttgggaacacaaatgcctgagctggaaggtgtctattataactcctccctctactgggtgggttggtttagggattcaggggtcaagccaattggaaaacacataagtggacaacctctgagggctgacttctgaccttggaacaagaatgtctttgagaggaggaggacatgggcaaacctgactctggtcacctttccatgaggaacacctacaagctctgaaagtggtgagaatccacagtggccgaatggaaggtcaaccttgacaatcctgtttgagcccgggaagcctaacctgcatcttgggaaggatctataggagatgggctggcagaacaatccaaaagggttcctgacaaagaaatacaggactcagaaactgacattcaacatcaagtatcagactgcagaaataagcccagggcataatgtgatggaggactcaagatattaggagaaatcattgaaaaagttaacgccaggttagttaaagtgaattatttcaagttcaggccattggctgcaacctccacctcctggtttcaagcgattctcctgcctcagcctcccaagtagctgggattacaggtgcccgccaccatgcctggctaacttttgtatttttagtagagacggggtttcatcatgttggccaggctggtcccgaactcctaacttcaagtgatctgcccacctcaaccttccaaagtgctgggattataggcgtgagccactgcgcctggcctagaatattttttaatgtatgtagtaaatcctacggcagccattaaaaattacatcagtagatgaaatacaatacaatcataaaaatgctcaattaaaatcagagaaggcggcggggcgcggtggctcacgcctgtaatcccagcactttgggaggccaaggcaggcagatcaccaggtcaggagaccgataccatcatggccaacagggtgaaaccctgtctctactaaaatacaaaaaattagctgggcatggtggtgcgcgcctgtaatctcagctactagggaggctgaggcaggagaatcacttgaacccaggaggcagaggttgcagtaagccaagatcacgccactgcactccagcctgggcgacagagcgagactccgtctcagaaaaaaaaaaaaaagcaatagtttgaaattgtatgaataatcaaaattattaatatatatgagtaatgggtcatgttaaaacttagtccctaatcttccacagtctacagcagtttatatggaaacactgtctcctctaaaatccacagccagttgtggggagattttgccatccaatgttgctgggacccttcaaaactaaatgaataagggaaatgagttactcattcaattattcattggaagaatcagctgagtgcccaaatgtgccaggcactatgctgagcactttggataaaaactcttaagacctggccatgcctaatgaagtactcttacttgaacggacagaaatctggaaggatcctcctgcttaaaaggttaggaatgataagcaagatgggaaattacttgaatatacccagatatgcatacccagggagaagttagccacaaaaggaggggtagatacagacaggtatataactggacacaattacaacaaattagatgactcaacaacagaaacaggaaatgggaactaaccctttaccccatctccccagttacagccacacaggacagaaaggagggtgagtcacactgagtagtcttggtagcccagcctggatgaggatgcattgactaaaagatcagaacatttgcagaacaagaagtaagaaataccacagaattgacactcaactgaggaatggccaggcatcaaaataagcaaatgggatctggaaaagtgagtgcaactgataaagtggccaaatgtagagactggtagagaagtaaaatgttttagaaattgatttatttcttaaagaagaattctttctctccacccttctacccccaggtgtcaaaaactaaaatgaaggtttggagctgttatctttgtatcattactcttcaaattataatcatagtcacagtattatacaatgtgcatgtaagtcaaccagacagtggtcaaatagatgacgtaggtggtgaatatcaagccctttcccgactgcacatctgtgacgcagccctaaatgggaagacggtgcaagtattgccaagcgctttatccacaatgtttggaatagattcttgcccttactatgtgctagagaaccactatatcacaactcctttgtccacagaagaagctgcattccctttggcatatgtaatgaccatcagtcaagatttcgatacgtttgaatggcttttctgggctatttacatgcctcaaaatgtctactgtattcacgttgataaggcggccacgattgactttaaaattgctgtgagtgaattattggagtgcttctcaaatgcatttatatcctcacagtctgagtatattatttatggtggaaaatccaggctccaggcggacctggcctgcatgagagatcttatagcatcaactgttcagtggagatatgtcactaacactggtgatcacgatttccccctaaaaaccaacagggagatagttcagtatttgaaaacaatgaattggacaaacattacacctaatttagtgtctgttctgaaatctactgaaaggatcaaatatacccatagagagtacagaaccagagcacacgcttttgtcctaaagaagcataaaaagaagagcccacctccacgtcaactcaaaatccactttggctcaagttacgttgcccttacaagggaatttgtccattttgctctttataataaaatagccattgagttactccagcggtctcaagatacctacagtccagataaacatttctggattacactcaacaatattccagttgagtgtggtttcctttctcatttcttttttgttaatttttttttttttttgagataaagtctccctccatcacccaggctggagtgcagtggaatgatctcagctcactgcaacctccgcctcccgggttcaagtgattcttctgcctcaccctcccaagtagctggcattcaagcgtgtgccatcacaccaggctaatttttgcaattttagtagagatggggtttcttcacgttggccaggctggtctcaaacttctgggctcacatgatccacctgcctcgtcctcccaaagtgctgggattacaggcatgagcctgtaatttttatttttcaatcaaggtgatgtataattatgatttttaaaatcaaatattattaaaagccttcttataataaagatttatggccttatgccctgctcctccccatgtgcagtcccaattcacaaaaaaaactgtcatattttagctgttcctcctaatggtgacttctatgcaaagaacatgcttatgctgccatttcttgatacattaattttaatatcaagtagcaatatcctgttatagtggttaagaatgcttatatcctctacccacaaattttccttatctcttttaatattgtgattttaaatcaattgtcaatatttacatgatcataactatgaagct

SEQ ID NO: 94169 - DNA, 839471 bp, Homo sapiens
  misc_feature (1)...(839471): n = A,T,C or G
tcctgagcttactgtttgcttagcgcagaatcctggcatgttccttgctctttatctatactcccattcctaaaaggaaaccttgtgaagttgctactctctgtgccattctaaaattaatgtatgttattgcctcatactggtccatacttggactggacctctcactcctcagaaaacttctcctaccctcctgcatcctccaggttgccactgcaacttcctgccttgctgatctgaccatgaccaccacaactactcctcccctcggttacaaatactgctagcctttacatacaccttattaaactttcagttcatattctccaacaacaaaactgctgtacctgccaccttgattcgagaaatacactgttattattaccacaaaaacataataaaactcataattcaaacatactttattggaagtctctgagcctactctggcttaaggggctttcaatatacaataatagtgaaaagaaaacacaataactccaacaagatactgttagagaccccaaaatttcagacttttttgctatatacatgggaaacttggtaacaggatggcctgcaaggactccttatatttctacttgtttccttcctttctactcttacactaaatgtttttgtacactgcttaggggagcttataccctactgtttaaaagtctccattactctttgggccactgtaatacccctaataattgagtttgtcactaatgtcaagacaacaaggggtccaactaggtatcttaacctagttttgagtctctggctagaggccagtcagttcccccttctgagaagttaatgacatccacactccaaccccaacttatcaggctcttatactctgggaccaatatacacccccttatgcccagagcctgcaaacttattagccagcaaatttgcagggggcccatgtaactagctaaacccatcctacttgcccctacagctatagattgtcattaccctgttcctacatacaatttcctatctggccctacctggcattcacatcttggttcgagcagtaaatagcagagttctgcctttatctatcctagtatcaatgtgctgtgtcccaccatcaaaaaagtctttatatctcataaaacatgtaacttatcctcttttactataaagcaattacaggaatgccctgcccaaatctgaaattttctaaatgcttagaattgtcctcaaataaaaaaaagtcatgtcatttaaacagaaattgataatatgacatttccaccttaataagggcatgtaacccaaatgtcaaaggaagattaaactgatattgacttttcataaatattctttttttgtctcagtgtttatttttttccttctgttcaaatctattgtatctgtttcttctggcctcatttttttttatcattggtattctaaattgcgttcttcaatacagtagctactagtcaaaattaaatacaattaaaacatttaaaattttaaattaaccgaaaattaatttgtaaataaaattaaaaattaatatcctagtgactagctgtatttcaaagcctcaataggcacatatgactagttgctatgatattagccagtgctggagagccttttttttcatagcaggaagcacgattggagatgttttctctagaatatgtgtgcctattaattccttcatttactactggcattatttgtcaggaagagttttatggagtataccagagatattttatttgaatatatgttaacctaagtgtaagatcagatagtctgggagaaaaagttatgggaagtaagacacaaaacacagcagaaacatttttttcatttttttaagctaaagaaaacagagataaagtgtctgttatgatagaccagaaatgacacattatcttagatttgacctctactcttctgggtggtgacggttttccttaacatgtttggaaaaaagaaaaaaaaagaaaaatcaagcatatgctgtttcacaaagccaagaaggcttccttggatggctctgaaaacgtgttcatcacaagacggttagccctccagatatggcttgttcataatgtaaatagtccatcctttgggattagactttctggcaaggcctgctgaattgaaggatggttactttcccaattatatatgcattgcagccagacatattcactttgattcaataaattacatgcccatatatgtcttatataacctataagaaacagtgttcaacactggtactggttttgaggtagcctagttttcattgtctgaaaactaggatggtgcgtcgcatgccatgtttaagattaagctttgttacattaacatccttataagatgcaaatgatccaatctgctctttagagttaatgaatgtggccctgattatcattcagttttatgtatcctgtatgtgtgtgtgtatgtgtgtatgtctatagcagtgttttccagctttggcactgttgatatttgaggcatttgagacagtataattccttgttgtcagggtcataatgtcctatgtattggaagatgtttggcagcaacatggcctctagccactagacgccagcagcacccctccacctcacccagtcgtgacaatgaaaaatgtctctggacattgcaaatgtctccaggagggcaaaataatctgtatttgggaagcactgatctatggtaaccttttaaaagtgagactgtaaaagaagtgataatgactaaacacaaatgatgcaaaaaaattacattttattagacagtataagtatgtttataaatacatttctataaatgaaaatataatgtgctattagtaacatgtatttagtgctgcttttcaccctcaatacctccttactaacaatgtagtaaagctactagggctgggaggtatttatttaaggtctggacctcaactttccattctttcatgataattttttaaatttgctaaaaatattatataagtcacgtaatattctttactacatggtcaaatctctgtattagatcttttaataacaaggaataaccatttcaatctcactttaagcatagttgcatgaatttgtagtcaggattctacctctgtttttagttatctggtatgaacttggaaatagtaggaaaaaacaaaaaacacaaaacaaaaaacccttaatcctttgctaggctcatagagggatgtctagtaggtcttttggtttgagtagaaggaaagcacactctgagttgagaatcctaggtcaagatctcttttgctatgcaaaaatcattaactccttgatgcctcctgtatggcaatagcaaatgtctctcttgagtatagccacacaaagttgtactgtttaaagcagacatggctgcacattgtatggcacagtattataggagagtaaaaagtgatttttctttatgacttcagagctttactcatctactttttgtttagttacaataatgtactgacttagacatggtttaatcagccttctctaattctgtatgacattgggctgggcacattgcaattagaactttgttttcttgcatataaaataaaaatcagatacctgtttctgaggttgttaggatttgaaaagctagccctggcctagtggcattcagggaaggtcgggtcctttttcctaataaaggacagatagagaaagtagttcttatacgttatgctctagaagtcccttcttggactctgataacataaggaagcaaccctcctgtctggctgaaatagacctggactcagatttcatagcagttgtaggtaatagcagagtagcaatggttgccaatgaacctcatctctggctcaactctattggaaacagttgcaactttctgcttcagtggcagccccaacaaacattaaggtaggaggatcagttcttaggaaatgtgagagactggcagggattcaggctgtactggagtgtcagatcaactaagaaagagatggtgcttagaagccaaaatagccacaccatcttctgcctcttttgtctcaaatggctcacactaaaacagtctgggactgtgtggcataaaatacatactcaaaacatcatatgtcaaatctgtggcttgtgaaaatttcctgtacaaaaagaaaattctttattaacagtatggaatcaaaatcagctctatgaaaacctttcttaatagagcccttaataaacacattgattttttaatcatctcaaagatggccttttcaatgcagactattatatatgatcatatctaagtcattatttttgaagtaaaattacaagggtgacaaaggagcaatgctacttttcagagtccaaccagtgagagtgataaatgaggcaaatagttcattgaaagtagtcacgttgccattctcgtggtttgtcttctacaaactgagagttttaacacaaatcaaaaaatatttatgaaaataatgttactttgcccagacagcctctgatacacctttatttaattataattagttaaaattatcttaacagataaggaattgatgtctggccagattcacacattcatgaacgacataatggtcttctcaaaatgaggctgcacaagccgtcagagatatgcctccaagactagaacagggagtaactttcttccagatgtcatcatgggaccaatatgaccaaaatccatgattgatgcagtttgaatatttgttcccacctgaatttcatgttgaattgtaatacctgctgttggaggtggggcctggtgggaggtgttggatcatgaggacgaatgcctcatgaatggcttgtgccatccccttggtgataagggagcttttactctgagtttacatgagatctggtcatttaaaagtgtgtggccccttccttcccatactctctctcacttgttcctgcttttgccatgtgacgtgtctgtaccccctttaccttccgccatgattttaagcttcctgaggcctcccccaaagccaggcagatgttggcaccatacttcckgtaaagcctgcagaaccatgagccaattaagcctcttttatttatagattacccagtcaggtatttctttatagcaatgcaataatggcctagcacaatggttcattattaattattatttcaaaaatcttaaaacatttgtctgaaaagctcaattattttgtattatagtttagtgttagaatagtttatagaaaaacatttaaatattaaaaaaattataacactttttttttaatttttgatatgatggtgacctaaaaattggagctttctatctctgagaggctctgctaatgtcattcttactgtttattgtaatggcaacctgcatagcaccagagcgagaggtaattggaccactgaataacatctgaagtctcagtaacagtcctttgtcatgaaagatgatgactgaaagcattttgtcaatgttctgtaggacagaatccagaattctggactatcaccactctatcactcctggagtccaaaaaacattaaaaaggatttaacaaaataattaaattgagctcataacttgaggagattttgtatttggcaaaggcacttgagagcaaaatcttccttagcaaccagttaattatgatctcttggctatgttcaccaatacccccatcatccattcagacactgtttttgtccgcatttcgcagatacatatagccctcaattcatctaaagtcctgggtgctctacttaagaaaccaatttacctgtagtagattaaatagtatacttgatggcattttgaaatgtaaaatacactagaaatcggtgctgttatttttctcagataaatcgccgcactgattaccatgaagtacattgatgtcactatcactatgacaacattgtgacaagaactagtcactctaagctacctagtaaaaggaaatgtcatctatatttctgaataaaatgtaacacacagaacctctgcttttgtacataaattagtaccttactggctagggaatgttgaatcacagttggatgaagaaacaattcatgttaatgtttctctaaaggtaagatttgaatatttgaaaaatgtatgctttaactttttgatcagttaaaagggaagcatggttttatcattataacataaggatctatttgatggaataaatgcccttctctttatttgcttatattttgcacttaaagtacaattcagttataggaacaaatagtctagataggtgagttttgagatatatttgaagattattatgtgaagtaacatttgaatcagtctttatacttttaggatattgcataatttttaattttcagcttttaaagatagaagtgagtcatctacttgtactattccttttttaattaagcaaagatttaaaatctttttgttgttgtcaactttaaaaataacttgtctctcatgtgttttctgccccctttccccaggggtgtcctatagaaaataaacgcagtgtgttataaccacagaaagaaaatattagtcatcacaaacaccactcgtttacaaatgcacagctgccagtatttttgggttatttatgctcaattttgtacttgttttagtttgtacagtakagtgtcagtattctgacatttggtgtttaaagaactgtattaccacatgatatgacatggaacagttgacaaatggcaattttcccagtaatgtttgcctttttatttgatctgagccaaatctgaaactcwtaagaggaattccttcctgataacacttgtttaatttaaataatatattttaaatagtatgttttaattttattttaaataattttaaatttatatgttttaaatttattttaaatatttataaatttaagtatcttaaatttatyattataaaataatatattttagatttatttttatatgtaatttatatatacacaacctatctgaaatttaaaattttactatttattttggtcaattaagacaatgtgactgttatgcgtcatatataatatgggctgtaatctcagagatggtcactttgatgtcttataatttcttagttgcataaacatgattaaaaggctatttgttttctaatgcataatttggtgctagagacacccaaagaaaaacagaaatatctttggtgaagggtgtgttgttctgagtgtattaactaacacaaaaacaaaaaagaaaaaaaaaagaaaaaaaaaacaaaaaaacaaaaaacaaacaaaacaaaacaaaaaaacaaaacaacaacaacaaaaagmaatagtatgattaacttaattttcaatccatatgttattgtatcaatttctgttttagagtccagatatacatattttgattatattaattttaactaaacagtattttctaacttatactgactgtggctataatatacacaatatagatgaggaagaaaatacatttaatttcaattaaaaatgttttgaatattccttaatagtattttaaataaaaattaaatagaggtaagcatagagataagtagagaagaaatatrttcagaagtctattggatatgtagaaacttcaagacgggaggatttcagacttgtatttttagtgaaaaaacttcaaaattgattgccttgtaagagatttattttcaagaggcatacttcccctacaaattatagtttctattttaaaataagcctttagcagagcatattgtatatcatgaaaaaaatctgttccaaaccatccatctaacctatttttatcatataatacaagcattagttggatttcctagaccatatataacgttaacccactttctgcaagctcccacctatatgtatgtatacacasatacgcaaacacacattcacatgctttgtgtttagagtggaaagataagtatstgcatattcttctctgtaatccaaatgatatatttcgctataactacattttaatctctctgttaaaaattttkaaagaggcaaacaaacttagaatccaatttcctaagaatgattttttatttgaagatttaagcaacagcagattttgtcttttttttttttttcaacaatctttgagaggacatcagcaatcatcttcttataagaggcattcaaatattaagaaattgaattcagatctaatggaatactagtcatatctttaattcatcacttcaatgtgatgattactccttcatctaatgttttaaatttatttaagttcagtgattttatagcaagacagaaagagaagatagcaagttatttttttcttttcctttcctgtggatttgaaaacaaacattttagttaactgatctggaaatgaataaaaattgttgcttataaatttaggataaaaggagaagcayaatctctgttagtcacaaaattatttagtccagtttgccagcaaaagttacatcaaatagcttttagagtacatgaggaattctaaaatttagaaatatattaaatctaaaatggagatttttactagtatttatgttatagtatgatgatayattaagctttagtttatttgcaatacatggtgaaaatggcacttgtgaataaaatagacattccagactctaatttttttcacaactagaacctaatgtaaactggcctgccattattttctgtagcaatataatcttgagtttctttaaaaatgccttcartaggtcaggcatggcagctcacacctgtaatccctgcactttgggaggcctaagtgggcagatcacctgaggtcaggagttcaaggccagtctggccaacgtggtgaaaccccatctctactaaaagtacaagaaattagccgggtaatcacagctacacaggaygctgagtcaggagaatcacttgaaccccggaggctgaggctgcagtgagccgagattgtgccactgcaattcagcctgggcaacaagagtgaaactccacctcaaaaaaaaaaaaaaaaaaatgctttcaatatccttttgtaggcaagtttaggtattgctgtgactttttgaaaaaaataaaaataaaagattttcatctatccaggaatttttccacagtgttgcatttgatacgtttaattttaatgtacttattatttcttttttcattctttttcctaaataagcctagttggtttcagaaatgttgctttaaattcaattgactgtcttgccgttagaatatgaaaaattggctaggtatttttactcagctacaaatcttgaaccacataattcttgtaaaagtactgtatttaatgttcacacagacagctatcttgtggctagagttttccgccaagaatacaccacaagctttttgttaatattattcagaagtggaaacggaggtaggaaacttgatttcctgcaatatgaatgagattttttcctctaatatctcagagctcagtcaacacaggggcacttcgaaatatatttatttatgactattgttcctttcatgagcccaagaattctccagcttctgaaatacacatcttgtttacttgctatcaccatctgtcagaaaatattttgagttgaaaaaagcagcagcagaataatcccacctgcagatgctgttcaactgagaaattaatcccaacaattgaagtcatcaggaagagaactctgacttagttctgttttcattgtgacacaaaagtttaccttatttgactccttgggaaaatgaaagtaaatgctaattatatttcattcagatttgcgtttgaaactttagggctttacaaaaaaatggttcaagaattctgtgacaccttccctgccacttcctgaccttatttccctggtatctgtgccatcctagtgtacgctgtccatctgcactccagcctgccgttcagaaatggtgtctatggctggggaagagtgtggggttaacatttgaaagagagattcaaagaatactacgcagtgtattcccagcttcaagatttgcatccctgttaaagcaagataaaagtatagcctttgggagtcagggggagaattacagaaaggcaatcattcactttaggggaaggggtatgaaaacaagagggcaattttacccgctttcactttgtgattgatgacacgggagcattctgaggatatgctatgtgtttttttctcctctggtttatttatttatttattccttcatttttcctatgagcaactcatttttttcatgtattcaatcgactaacatttattgaacattatagctttataaatctttttttttaatttttactttatttgccaaacctgtttctgcctcaaggttttayagtttyacattaccctgttttayttctttatagcacttgtcacttctggaaaccatactatttgtttgctatattgtctagttccctcttaggaagtgttaagtttcatgagtaaagaaactctatgttgttcaatgctgaattctccagatgtagcaggatgcctggcatgtgatgsygatagttcatcatcatcatcgtcattatcatcattggtagcagccaatctctacaaaacttttaatattttttcagcaaatgaaataatgaatgattgaagtcatgtcatataatttattgggattaattaagcccaacscatgttactacacttaatgatctattgatcccataaattttcactttcaaatacagtcacatgccacataatgatgtttcagtcaaggatggactgcatgtacaaggaggtcccataaaattctagtgaaaatgaaaattttctatagtctagcaatgtcttagacttcataatgtcataatgtgtcagtagaacacattgccttttctatgtttagatgtgtttcaatacacaaatacttaccattgtgttataattgcctacagcattcagtttagtaatgtgttatacagttttgcagcctaggagcaataggctataacatttagcttagtcgtgtagtagaccaatggtccaaaccgttttggcatgaaggacctgtttcatgaaagacagtttttccatgggggttgggggatgcatggttttgggatcatcaggcattagactctcataacgagcacacaacstagatccctcgcatgcttagtttacaataggattcatgctcctgtgagaatctaatgctgctgctgatctgacagaaggtggaactcaggcagtaatgctcattggcccaccactcaccttctgctgtgcaaactggttcctaacaagccacagactgatactggtccctggcctggggttggggacccctgtagtagtctgtgccatctaggtttgtatgagtacagttacgacatttacacaaagaggaaatcacctaacaacaggcttctcagaaagtatccccattgttcaytgaagcctgactgtaactcagtttcctaagctggagggtatctgcaatcacccttctttagtatcacccaggcatatttgtgttacacagggattagcatcagtattttgcaagatctgaaagtatgaagttgatattcatttaaattttttgcgatactagaaatcttaagaaaaactgacagacrgtaatatcaagattctacctacctttggttgttctctgatatcaccataatctgttgmtgcaattgttatgattgtttttgttaactcttttacaaatagcataatgctggtcaagacaataaatcatcaaaataaatgacagactggaaaaccagtaagatgaattctgcaaaagtgaatggactctcttatatttagttttaaatatgtagctgataatacatagtaagaaaaagcccaaaataacagtattagcttttaaacaaatacatcacattatttgcatgatgcaaatgtatggtcaatatgctaaaaacattaaattacctgtgatttaatcaatgtatatgctcaaataaagaatgccatgtactacatttcaagagaaatatcacattttgcttccattttgacagggtctgcttttccagagcaaagggcctgaatttagtcactgggaatttttgggtaaagaatgagtaactctctccctgtggccttgtaaggagaatccaaacaatggctaatagaaacagctggatgacactcaggttccttcaaagtctgagatttggttattaggtaaattactcaaggcaaaaaaggaaccccaggaaagtgaatgggaaaagrcagttgggatttttatatttccaatcatcaaagaacttattaaattgtttttcacaaagagccctcttgaaatcttacaattttgattccgtctatatttaaaggagccacaaatatgtaatttattaccatagattttttactgtgaatacaatattacatttagcttgattcaagtagtcatgtacacaaacacaatagatcaaagattattcaaatcaaatgttctaaagcctcaagttagaaactaatttaaaaaattgttcatgttctaattgttacttatcacctaaaagctagcttttttttttataatctccatactttaatgttttgttgaaaaaaaagacaagaacaaagatcaaacttgtcttgagataaaaagatgtaaagaggatcatataaatatttattacctatttgcaaccggtagcattaaggagaaatggacaaaggtatttcagttttgaatttctctactatatggagtgtggctgaatgagctgtcactctttttacctcactatatgtttgtcagaaatagaaatactcattaatcctcagtaattattagagtaggttattgctttgcactaactttaggttgctttccctctctctctcratctctctaatacattttgctctaattattttatctggctaaaattttctactgcaattcattagtcttacataagttacttacttttagcattttaaacaattcagtaaaaatatttcaagttttttaagctctataattacatttttgcagaaaaatatgtataaaattaggccaaaaaaaataaagttttgtttttaattatgaaagactttttttttttttttttttttttaataaatcacatgcttgtaaagtcagaaaacgggctgggcgcggtggctcgcacctgtaatcccagcactgtgggaggccgaggtgaatgaatcacttgaggccgggagctcaagaccagcctggccaacatggtgaaacctcgtctctactaaaaatacaaaaattagtcaggcgtggtggtgcatgcctacaatcccagctacttggaaggctgaggcaggagaattgcttgaactcaggaggcagaagttccagtgagctgagatagtgccattgtgctccagcctgggcaacagagactgcatctcaaaaaaataaaaataaaaataaaaataaaaataaatcaagtcaggaaacacttgttctttaggatgtgctgtgaatgaaatagtttgtttgcattcttatgtaggagttttgaaatcctcctagattttctccagcacatatggattaaggttttcatttaaaattttccgtctttcaagtaaaaaattctgcagctaaccagctaaagtttcagtctaaaaataaaagttaaaatcaattcagtagttaaagtgaaccaataactaccataaaccatttcactaaattggttcatttcaaataactggcttattgcaaaggtttgcattatatataaaatgaataaaatacatcaaaatatattgtacaatgtacaattcatgcataatatttccttaagatgaaatttgaaagagctttagatattaagcatcttgcattattttatttttatttaacattctgcaatgtagattttatatggtatgtaatgaaatattctcagtaattatatatagccccttctctgattctcaattatttatctttatagtgtctctatatttgagctgacaaaaaaaggaaagaaaattaaaaattaattagattgcctgaggttattccatggaatggggccaaaaataaaaatccaaacaaatctctcatctggtcagtctgttctaatggaagcagcacaagctcaggcagtaaacaactttgattgaatgttcccttaaaggccaggcatggtggctcaagcctgtaatctcagcacgttaggacgctaaaatgggaggattgcttgaggccaggagttcgagaccagcagcctgggcgacatggtgagaccctgtctctattaaaaaataataatgtacatatatatatatatatacacacaaatatgtgtgtattcccttgaaacttccaccatttctatctaattagaatttttccttgaataaggaaaaggatgggaatccattcygatagtaccagcttgaatcattaaaaattatttagtaagtttttattatgtctttcatgttgtgctatgtgaggtataaaaaagcctcttaagactgggttcatcagtgtactatatgtctaactagggggacaaatttaagagtcaaattgtatttttctttttagccagtagaaaacaggagaaggaaattgttagcatggactgttgtaataaaatttttatggatgaaaaaacttcaaccaatattaagattttatttcaaccattaaacagaagattttagacattttaagtttaagaaattttgaaattgttttagaatatttataaaattattgtcaataaacctattcttaaagaaaaaaatctccaaccagggtatcagatttgggaggatatagttttttttgacagaagtatagattcatatcatgatgtacaaaaatgtaatgaaaagagcaaaatggaaatggctattttagagtatgcctatgtgtgaattgaaaaatggttttcattatgtaggaccagtgccaaatgaaagagagcattgaggggccaaacatgtcatttttgaactaatgagacttcttttttaatagttttatattattttgatgtcaggccagtgtaagtttaacaaggcatgaagggtggttttgctatattataatcactcagttctatttcatttctgtgtgttaaaccaaattataattttacttatgaatgtatatgagattagtaatcattaattgataaccatgaatatacactgctaccaatccataagaaaaaagtgttttatttgttttgtttaatattctaaaacttggtgtacatttttcttagaaaccatgctataaatgatgctcaagtttctgttagcaattttcacaagaacttcttaataaattccatctacttgagatgagttattcatataaaaatatgctctgagttctacttggggtattaaaaactattcccctcctcgtacttgcatattagttccatactaatttttataactcctctcattcttaactatatacttatggcaatatatttattttcaaagtacagtgtacacaaccatctcccaaatctatgtctttaaaatgacttaaccccattcaagtataaaccaatataacctactgcttctaggatttttctacttgcatatctagggtatattcaattctacatatcaaaataaaatgtattctcttccaactagccctgtaccttatattcttctgatcctcccaaatgaaatttgtgttaacatcataaaaccaatcatgaagaaggaaatattgtgaatccattccctctacctctgcttttttcactactcagatctagtcaatccatatcccttatttattttatcttctttatgctattcaaattgtaatcattgttgggttatgatccagtactatctgtcacataagccattcttagttgggtttcagtcacttgcaactaatataaccctgaataccataaaagcctataatgtaaatcttgagtgtcattgatttggttcaagaaattatcccttttgcatcttatctcatttaatgaccaacagtcaattcctcctcaatatttcctcctcaatcttgccagcaagatctcttaaaaatgagagcttgatcttctcacttccccctaactagcccaactcctgtttacaaacttccaattatgatagattaaattctagtgccctctgcataacctgcaagatcattgatttactggcctttactaaccatctaaattctgtctgtaatactcatgtgttttattttccatttatcttatttatttatttttgagacaacgtctagctctgtcacctaggctggagtgcaatggtgcgatcttagctcactgcagactctgccttctgggctcatgtgattctcccacctcagcctcccaagtagctgggaccacaggtgcaatctacccagctaatttttatattttttgtagagatgaggttttgccatgtggcccaggctgatctcaaactcctgagctcaagccatctgcctgtctggcctcctaaagtgctgggattacaggtgtgagccactgggctgggcaatcttaaatatttataactcttcaaaatatgatgtcattttgtgactctatgccttagcacatattatgtgactctattccttcttcttactcataactcaactgataaggagattgattgttccaaatgttcactgggcatcacctccaaagtaaaacctctccctattcccaaacttccacactttttcttataaataattttcccactgcaaatttttctgaatatctttattataacaaatatcatacatctgtgtatatatatatgtatggataattttatttttacctttgtgtcttcctaattgtgctatgtgcagctacagagcaagatctgtgctatatttattcacgtttgccagtgcttgactgtaacgtggtcaattttattaatattgatcaaattagagcaaatctcccacctactacaaggaagaccaaaaaatctcaagaaatgttagctragaaatgggaatttagcacatacttaaaaccaggagcgctacaacaaacctatctggcaatcaaatctttctccatcactccctagcgtatcaaacaattgtccaaccattgtctctgaattttagtaagtgaattgattctcaacaggcagacgaccattcctccactccaatgtgaatttacttttaaggaaacacctgattaattattcataaaagggttaaacacttttttgaattctcaaatatttgttcatcttaccatttacaaactaaataaattgaattctgactgttccactgaacttttattttggcaaatttgattacttcaatcaaatacttagtaggaacttccactgaaatagatcaaaggaacaaatgtgcacatcaactgattttccctggctaccatacttcccatcttttgttagacaatgaaaagtacattttgtgtatttgtgtatttattttgtccttccaaagctcagggtttccagagcaactatttagttttatataaggttctccttttagtaacccccctcttggmcacagaagagagcatccaccaagcaaaataacaaaacgtttctgctcatgtatttttaaagctggggttatgggataagcatcctttattttggaatggaaatctaagaggggagagcctgaaaactgtctggtcaatgtttctagctttataaagacagtttgagagaataagacaagcagggcaagggaaacaaatatgagaacggaagagagaaaatgaaagtgctcaactgagcaagtggcttataaatttttggctctggttgctttgagatctgtagtttaattaatgagtcaatatagtttatatcttgcctaagctcatttttgttgagtttctgtcacttgcaactggtagaatcctgaatcatataatagcttatacattagtagctgtgacattgtatgttkaatgaaaatattaaaatggaaaaggaaaaattgtatctcacttgaaatcattgtaagaaactttattagccttgccaattttactaacatgttttctggtcatttgcctgtatacgtgcttacacacacacacacacacacacacacacacamaaacacacacacacacacagctatagctatttacaaagcactccataaatattaatctgttatgtgaaagcacaggtagatatttcattacattttgaatgagtaaaaagaaagagacaaaatttgacctatcaggatcatgatgaaaagcgtctatttataaatatgaacacatactctatacctcagaataaattatttcattccaaatctaaaaatattaatgcaattttgatctttawaaaaggcaacacaatgcttatgttgttgctattactttaatcactacagtaggaaaggtcggatatcttttaaaattctgttgctgaagtaaaaaatgcaaatagatacagccattctcacactgaaaattaccttattcacttctgaaattgaagaaatggtactcagaatatggatatacaagatttttctctattttgaatatctggaaatgcctcataaaatatgcaaaccatttcatacataatgaattaaactgatgattgagaattatacacttgtgtcacatactattcaaagttacaatttttttaaagttttagacaaacggttttatggctggtgatattgtaattttaaagaattcgtaaatatatcgccccacttaatatcaaggctgagaggacatgtttttacccattggatagataacatggttaattagtgtgcaatactttgggctgtgttactagtagatcatttctgcattgtgtgaaacttagatcctctgagcagcagaggctgagactgaagtttagaggggctagcaaagtttattggagagtaacacctattaaaaaaagggctgtgggtggggtgagaaagaagcaggattgtgtaggaggaactttcagaccacagtttggattttataaaatctaccagcccaacagggaggtctgaaagaaacattgatggttaggagagttcygtgtgaagcaaaaatggcccgacatttgtgtcatagtttgctcaattatctcctgtggccacttcaagaagagtgaccccagctcaaaagctgtgatgaaacagaaggagctgataggtggaagctgttgctcccaaccacacttttcagatctgggcaggtggttctcccttgcatctccataggcatggccctgactgccacatgtcagccacatgaggctaataaaatggagtgcactttaatcaacttactaaacacaattcattgagacagaaccctttaataaaaycctaaattatatgtgcttaaattagaaaggtttggttactaaagagtcttggcgttatcagcagggtgtgtctgaagagaaaatggaggaatatggaaataaaatcaatgttttgttcaaaaaactttattatgtggaaaaamataaaagctaagctkcatgcacrcaagtcttcaaaacaaatacaataaaatgcaaatattttcaaaatatgttaaaaattcaggaaaaagcagaaatagaaagcattatgactgaacatatgtcaaagatggatggaatggaaggctctcctgtatacacattaaatagatttgtatgctttttctccttagtcagtccacctcatgtcagtgatttttagtgagcctttagggaaaagagcctatagccctcacaataacctgtaataaatctttaaattgagatgtcatgttctctgatgtttgtcctaagccctccgcccacgcccgagatcatgggtaataaaacatttaccaatggcttatctttggcttaatttgacaagagaaatatttgttagtataaattataacatctgggaggaagataagataaatgtattcacagtacaaagtatacagtattcacattgatgtcagaatgggcaaaaagatgatctgtgatgtgacattrgtaataataacacagattgaccttagttggtagcaaataaagtttagggaaacycctcacwttcattgtcagtttcactgtttgactggattttctctaacttcattatacaaaattatatttgtataataaatttttctcaaattacaatatacaggagcttatatttatatwcttcctactcttatttgcctttaccacagyactatttctttattgatgatactttcaaaatatattttatttaaaaaaatacagttcttaggtccatcttgtaaaacagtaaaaaataaagtcagaggattgcctgtagttttagtatataaatgtaagtcctggtaatatatttggttcattaaaaaaactttttaggtgaaaacttcatttctgtaatcaagtagtataaaaaattcagattttgcttttttaaatagatcacaattttccaagctgttatatattctttaagtactgttttgagtggcagcaaaattttcaaagtaaactaaacgcattcgtcacacctcacgcttgattcttatgtttcacaaattgatcttcaaaatgtataaatacatcaaagttaagaggctgatcttagttatcatatatctgtaacttcgcagttgtcttccaaaagtcacactgaggtacatttctaatttgtatctcatgcctgtgttcttaaatgactgacgatgaagttgtcttccctgtaaaaatacagccagtgtgaccgctttgtgcaaaagtgatgaaagaaaatgttatgttttccctcatgattgaatatcagaatcattttgcttaaggaaaagcatgaataattcttataaataagtatatgtgtacatatttaratatttttaggtatatagacattttcatatgaagtgggataaaatcttttaggtaaatggatttaaagtgaaggataaatactatagaaaactgcctttttttttttwaatctcagtggtaaaatctaatgttatagagcttttcactcacttctccccacagatatgattgtggaggaaatacattcacctctccagaaatgaaattcttaaatttactgagctttccagttacttctttcaggcacactgaaagagcacactggagcagttacttagtaagcatggcaatatgtaatttggtgacaaacatggttactaggctacaaatgagttatgttgtccttagtgaatcctagggctgtaaatacccaaatttaaaaatattaaattcaagaagctggattatgatgtcagattgaaggaacaaaggcatataactcccctcccatctaaaatgccctgaggataaaacacacatttaaaaaaaaaaaactctatttcactgaaaattgcaggtataaaattagtcagctaggtataaaatcagtctgtcaaaatcagtarctttcacataaaccagctataacccattagcaaatgtaactgaaaaaaaactataaagtacctagaaataaacttatcaataaatgtactaattatatgatgaaatktataatatttttttctgaagaatataaaataactgaacaaatggtaaaatattcaatattcctaaatgagaagacacatttttaaagatgtcacgctttatccaactgtcctcctgttgatctatacaacaataaaatcccaaacaaaatatcatataaaacaccaaatcaatatcagtcatgattcttcaaccaaatgacagagatgaattccagaataaaactttggaatcatgtggttagctttttatttggattctgatattctgaatctggattattgattcagaaataaacacagtcattttctcatatataggattttaatccacctaaaggcttttgttcttaagggaggctcccacggaggagagagagattccagcacgctatgtggggacaacatcctcacaacatccagctctgtgcccagcaggtgtcaggaaacttgctttatgaaaacagttacatttacatctaaggaggtgataaaaacatggccaaggatgtgcataatactcccgcagtcatatgccacaaacaggctagagttgaaaaggcttgaagcaatgaaaatactggttactttaagaaaaggaaatggcatttttgggacatttggtcataaagcyaataattaaaggaagaatattgaaagagaaatttcccgaagcttaggcttcttctttgtttttytgactttattaacatctcctggacggggtgtgtgtgtgtgtgtgtgtgtgtgtgtgtgtgtgtgtgtgtgtgtgtgttgggagaggtattggtgtggggtttgggcttaacaggaaaactagtaactgtgtaacacattcactgtctgacatctactccctttatttgtctaaaataaarccattgcgttgtatgcagatttccctcaagggatgagcccttcctcatgagaccattcaggcctctcagaagytttcttcattctatcctggaaaactttgcagctcttagaaaaactaacctgttagatgtgtgagtttcctctatacagtaatatggacactaggattgactggatgttgacttaatttttataaaccgatgctgccaaaattgtttgaataagaacaatctagaatttgtataagggttacaaattaatgcatttaaattgtacatataagatataacagattctaccctaaactgattttacgtaaacacaatatttatcaagtagttatttgttaacaaggttgtatttctattaaaaaacattttaaagaaatacttttaaaatttatgattttatagtgctacgagagtcaactaaattttgaactttcactatctttttatttgtatcattcatttaagactctataaatgaatccatttactttattgccaaattaaataatttcaggtacactatatgaaatactttggggcaagtaagaaaaaaccatgaaaaaagtaataaatacaaatggtaatacagaaaagtaattacagaaaaagtaataaatagacataggcatggttacacattgtggcagtcttatatgaaatagaaacagttaacaaagcaagatacagtatataaatggcaatatgtaacttataaagaaggagtttcaagatcattgttaggtgcacaaaagctagcctcaggaaatatattcatatattcctcctgattgtggcacacttctgtagtctttcttcaacttcttagttgaaattwttctctcagcttcttatattatcatgctcttttgtacctcagttatcacattctgctttgtattatagttggctacataagaaactgtctccaatgctagatcacattatttattgtatcactcccattggtaccrcacaataaataactcttcaaatagaccaaagcagcattctaagtctttcttcttggtgtatcactagaaaactccataagtaatgtagtctttttaaacaaatgattgttagggatgttcaaattctgtctggggaaccctctttttagtcattgaatcaggctaagcattttaaagattttttatgccctttttttaaaaaaactgggatattcgatttaattagatgctaaactttgaaacagaaaattttcaaccatgaaactagaaagctcaaaaggttggcaaattcctatttgggcatttgatagcctctgaaaaatgtttgtgtatgactgacaggctttaagtgaaaatttcaattcctctgcaatggatatgtgaaggttgggttggagggaggaagccgggaggtagcagacaggaagaaaggctacaagaatgtttaacttcatgttaactgctcatttgccttaaaaaaaaaaattgaaacgacttttccctctagtagaagtatcacacttcagatacaaacaaaaattcaccttaatgctgacacctacggatctttacatctgctccrttgcactcatggttatattatcttcttctcctcaagtgcctgtatatttatatgcaaccacattgatctttgatgttacaataatatttcttgtatagacaatgaaattttgctgaaagctaagagcttctagaggttaagaagctgtcttattcatgtagcctctttgatactaatagaatgtgtatgaattcttggttaaaggaaattaattagcagttcattttcacatcccctaaagatatgagcccattagtaaattacttactactttgcaaaaccttttgatttttaacaaaggcttcctaaaatccttaccaaatattgaccaaaactttaatttattaaattgcagcacatagttatgtgctggtagtgaactttgctgagtaatagaactcaaacttttaacaaatttattgagtcctttactatgtggacataggagtcattgtaggggcaagattcattctggtttggggaggattctactattcaaatgcactgcatttgaaattatcaaaatgtgtgaaatctcctttatgcataaatggaaaaggcagttagttactttaatttcctaatctctatttgaaaaatttttacatctatcggttatcatttttcttaaagttaccctgagatgagtcttagcatattttgaattgctgtttatttgttttatattttgatacaccttgttatcacgagttttgccaatgttatttgtatatctgtcttagaatgatcatatttactccatgacaggtgctactctcattcaggctacacatacctcatgcctacctcttcaatgtcattctagtagttcttacaaggtagttaatctccaatggcctraaatcaaattaggttatgaggatccttcaaatacgctgtctgtttatattatttgtaacaagaattacttacatggtgattacctatatacttatgattccacatatcatctgtgaagttttctctaaagagagcagcttcgtttatcagcagcaccattgtttcagccagatattttaactaggtttatcattgctttcctgtttcttttgtgtgttcaagttttcaagcatttctttctattctttcagctacttccttctttccttccagcatcttgttgggcagggagctttaggctttgcttaaactgaacgtttacatcaatgctgttagttatttctctctgagatgactacattcttctgagatgcctctgagatatgtttatcctcagtcacttgaggcttccagaaggaagttagttgaatataaatagctctgaggacaaagttttgcttaaaggaaagcgtatagttcagatagcttrggaaaagtgtatacgataagagaaaaaagagaggaatcccaacattttagaaattgaaagagaatgagattcttatgaaggaaattaagaagcactaattttggcaagaattgttcacacacattttatttcttctcttattcactgtgaaactggaacaatggtaatacaaaatcttggttctgccctaaatttttcattagatttgttcttgcaaatgatttttgttaaattaaatgtccacatttatctcctaattttattctatttctcagcaatwtttttatartgttggtctcaccattattccagaaactttatttgcttgcctttcacaaccctacagtcagctgggagctcttccagactccttagctgattctcttgtctcctctattgtactcttccttttccaaatctcttaatgttgaagtttgttcaggctcagttgtagatcagtgtatctttgtatgctctatctatagtttgtcattgatttggaaaaaatatatacataaaaaggatatgatatgtagactctcaaatttgaacttgaacctaaacttctcttgagcatttcagctctatgtaaccaactatttactggttatctccacttggctatatagtaggtatctacaattttatatattttatcacacatatgtcttattttccatatctccttttctttcaccttatatccaacacataagtaattatttgttcttcctgcagaatgcatcttaaatatgtccacatttgtatatcttgccaccatatttgtaaccccctccccccaaaaaaatcacacttgcctggatgtctataatagcctcctaatcttctaaccttcaaatttggtttctttcgagtttattttcaattcagtggctggagtaattttttaaaatgcaaatcaagtcaaatcactatactgctgaaatcattaatgatttgctttaacttaggataaattagaggccttgcaaggctttgcatgrttttgctttttttctttttaaagtcttatcccatacctctctgacacttaatgtatttctccaagcattttcatcttcagtgctcacctgcctgaaatgctctacatcccctttaccaagagactgttcttaacggtcagcaccatggacatcagttgccagcttgttagaaatgcagaatctcagcacggaatgaaccattcagtttgaaggtagagaagacagagaggatgtcaaggttattgacttaggcaaacagrcccacacctccttccctttctacacctactgtaagcctcagaataggtaaaacatcttcaagaaagccttctttgatcccctaataaagtgattagaccggtaccaaaatcacctggagggcttagtaaaacacaaattgctgggccccagtcccagaatttcttcttcagttgggctggtgggaaakgctcagaatttgcatttctaacaagtttccaggtgatgctgaaagctgcaggtctgggggcccatacattaagaaccagtggtgctctcataaacacttcttagcctttgctgtgcagtagagtcaactgggggaggatttttattttaaccctaacatttggattctttacagttcttgtttagtatgaataatgttactatgaacatttgtgcacaagtttatgcatgagcatatgttctcatttttcttgggtctacacctaagagcagatttgctaggtgaactggtaactcaaggtttaactctgaggatctgccaaaatgttttccagtgtggctgcactgttacatgttcccatcagcagtgtatgagttttctaatatctccatttatgtcaacacctgttattacctgtctttattatartcatcctcgtgtgtgggaagtgatatctcattgtggatttgatttgcattttcctgatgaccagatattttgagcattgttttatgtgcttatcagccatttgtatatattattaggagaaatgtctgttaagagctttctcccatttaaaaatgatcagtcttttattattgagttgtaagggttctttacatgatctttatagaattcctttatcaggtaaataatttacaaatactttatccattcagtagtttgtgcttcagtttttttgatgatgttctttgaagcacagaactttaaaattttgaagtcctgttcacttacatattttctttttttgcttatgttttagtaaagtatctaagaagctattggcaaatccaatgtcagaaattttaccctgatattttctctaataattttatagtttttatacttacatgtaggcctatggtgtatttttagaaaatttttatgttgggtgtgaggtaggtaggggtctaattccatacttttgcatgttcaattgctaaaacaccatttgttgaaatgaccgtatttcccccactgaattgttttttcactgttgttgaaacaaattgtaaatgtgatggtttatttctagatttccaattatattccattgatttatataatatcctcatgccagaaccactttcttaattactgttgctttgtggtaagttttgaaatcaggaattataggtcctcaaactttattttattttatttttgttgattttgagacagagtctcgctttgtcacccaggctggagtgcagtggcatgatctctgctcactgctgcaacctcttcctcccaggttcaagcaatttttgtgtctcagcctcctgagtagctggcattagagasgtgcgccaccatgcctggctaatttttgtatttttagaagagatgggatttcaccatgttgctcaggctgtattttttttttaattttgaggattatttcaactcttccagcttccttgaatatttatatgaattttagaatcactatattaatttcttcagagaatccagccaaacttctgagttcttagatgtcagtgattctgtagatcaatttgggaagcattgctatattagcaatattaagtcattcgatccatgtacrtgcgatgttatatcagtttgctatgactgtcatatcaaagtaccataaattgggtggcttgggcaacagagatttatagtcttataattttggaggctagaagtctaagattaaggtatcatcagggtcttgctcctctgaaggtgctgaggaagaatctgttccaggtctctctmccggtagttccttaaattgtaccagtataactccattcttcacatagcattcctctttgtwtatgtatgtgtccaaattttccttttttgtaaggataaagtcatactggattaactgcaagcaattgtctgacctcatctacacctataatatccttaaaaaccctatttccaaataagttcacctattaaaagtactgagagttaagacttcagcatatcaatggggtagggggacactctaacctatagcatatctttccttttatttagatcctctttaatttgttttaacaatgttttatggttttcagggaacagatttttttaacttgttttgtttttatttttaatagactttattatttgagcactttaatgtttataggaaaaatgagtagaaaatagagttctatatacccccctcaatgcctcttctccccagttttctctattattaacatcttgcattagtgtggtaatttttttataattgatgagctaatattgataaattattattaactaaagcacatagtttacattgggatttgctctatattgtacattcttttggttttgacaaatatataatgatatgtattcactattattgtattatatagaataattttactgccctaacaacttcctgtgcctcgattgttcatctctttttcctccatcttatccccaaacctctgcaacccactgatgtttttactgtcttcatagccttttccgggatcttatataatttgaataatatagtatgtagtcttcacagattggcatctttcacttaacttacatttaatgttcttccatgtctttatgtggctttgtccattcctattgccagtgtgtttatccgttcacccrttaaaggatatcttggttgctgctaagttttggcaattatgaacaaagctgccagaaacatttctgtgaaggattttgtgtggagtagaagtggaaacagcagacacccttgtcttgttcccatctcaggaaggaaaaatttagtcttatcactattaagcaggatgttagctgtggaatttatagatgccctttatcagactgaggaagttaccttctattcctagttttagtgatttttccactaatcatgaaagcatgattagtagaattttgtctaatgtttttactgtgtctattgacatgattatatgctttctgttttttattctattaatatgatatattatattaaatgatgtttggatgtaaaccaagcttacatacatggaacagatcccacttgagcatggtgtataatcaactttctgttttactggatttgatttgctagtatctagttgaggatatttgtattgatattcataaaatatattgggctatactactttttcttgtggtatctttgtctagttttgttatcaatgcaatcctgtcttaattgaatgagttagagagtgtttatttctcttctattttttggaaaggattaatatttattctttaatatttggtagaacccaccagtgaagaaatgcatgcctggacttttctttttaagtaatttttgtacttgatttaacctgttgccttattataggtctatttggattttctacttaattcttgattttagtaatttgtgtctttttccttttttcttgatcaatccaactaaaattttgttaatacctgatcattataaataaaaaagtttatggattcattaattttctctacagcttttttgttctccatttcatcaatttctgctctaatctttaaaatttcctttcttctggctggtgaagctttaatttttctcttcttttttactggagactaagcyraaaatttaggttattaatttgagctattacttctttttaacgtaggagtttacagctataaatgtgactttagacattgtattagctgcatttcattggggtttccttgtaagagatgagtaagggacatgtttttctatctgctttcaagattctcctgtaatcccagcatgttggattttctctttgtcttggtctttccaacattttttttctttttttttattattatacttttaagttctagggtacatgtgcacaatgtgcaggtttgttacatatgtatacgtgtgccatgttggtgtgctgcacgcattaactcatcatttacattaggtatatctcctaatgctatccctccccactccccccaccccacaacaagctcctgtgtgtgatgtttcccttcctgtgtccaaatgttctcattgttcaattccaacctatgagtgagaacatgcagtgtttggttttctgtccttgcaatagtgtgctgagaatgatggtttccagcttcatccatgtccctatgaaggacatgaattcatccttttwtatggctgcatagtattccatggtgtatatgtgccacattttcttaatccagtctatcatttttactatggtatgcctgtgttcatctctttgcatttatactatttggagtttgttgtacctcttaaatttgtagatcaatgtttttcatcaaatttagtaagtgttcaggtattattactttgaatattttattgcttctaaatctcctccactcttattacttctgttatacatatattgatttccttagtgagataccacatttctctgagcatgtgttaatatttcttctttttcctctttattttttgactataatgtttctgcattatgtttacaattttctrtatgatgtgtgtaatttttctgttaaagcatctctaagataaaacttattaaaaatacagttagaagcggttttccaaaatactcgtaccaatttaatacaatcatatgctacaatacaaccctttgctataagtcatctccaacatgtgatgctgacacttgcttaggcgatgagtgtaaaytagcatcttattgcttatgtaatttgcatttccttattataaatgagattgaatatttctatatagatttttttattaatgtttcttttgtaaaatacctgttttttcgtatttgtaaaaaatgttgtttggcttgcaaaatttcactttgtatactgaatataaattctgtgttgctcatatgagttgcagatgtcttttctcaatttgtgttttgtttcttcattattcctttttgtatcttaaatcactcatctgggttcactttattatatcttgcaatatatcatttagttgtttcttgttttctgattttttaaatgcaaatcttttggcatatttctatttctttatttttctctttttaaggagtttgttctctctttattgaagatattactcccatatcttctagattccmtttttgctgttgagaagtctgatattaacttattatgttgttaatgtttttgttgattctccttcttagtagtaatttttattatagctcatattttactaaatgtaatagagaacaccacaatcttaaattggtagtagattggaaatatctacttcctgacagaattttagtctgtttctgatgatgaccagagatgctactgacaagttttatctttttcatggtctttagattaatgtgaaagatttaacttcaacttcttcacattcctggaagatctattttttagtatacagatctctgattgcttatatcttaaggtggaccattttatgttttatatttttcttgccttgtatcactgctcaattcgttgccgttgttttaagcttcagaaatttccttaacattctaatgaaaccagtagtgcatgacacttactgtatgttgtagttcatgcagaggcttagttgtgtctgacaaaacatgatttaaatgtcatacttctaaatctgaaattttacaaggaaaattcagtgcaaagacaagggctaagagttgttaaacatttttataataaataaagttaaaataaattatcccttagtacagattaggaaaagaaatctgttaagatttgctattctatttcagatgctttgttacattcttgctcctgaatttcattctcagtgtgccataaaaattgtttgcttttgttgatacggcccccttcagataaggaaaataaaatcgccaatatattaactttaaatttgtgaaaatataaccattccctctgagcaaccacgtaaactgttgcttcaggtgtgttggttsagtgaatgtctgaaatccattctctgaagggagggattgtttatttttttcctttcaatcatcacaatattttggtttggtgtggaagtcaattaattggaaagaataagaataagtaaggggagaagttctgcaatgaaagtagtagacgaatgataacggatatgttggaattatggaacgtgttgctctgagaaagaataacatgcttggaccaaaaaggttctggggaactgagtatataccactcatctaatgcaactctttccccaacttctatttgaacatacatgttaacacatacatgatacaaattaagacacctacacacagagacacacataaaaactttcaggtttgtttttaaagctcttcatatatctatatgaggaagaacatttttctcctatgagtatcatttaatatatcctattgtacaaccatataattacattaaattgactcttttatgactttgttttaacataaatgcttcagttaaagatatgtataatttctatgtatgtttcaaaaaattaaggattgaagaataaatcttttaaagtaaaagtttacatgtcgacaataattcaaccagaaacaaatggaatgccagaaacataaattaaaagatccttaacagaacagttttgtttttccatttctatataaagaagtttgttttacaagcaaaataacaaatggcttaaaacaatcttcttgttgctaggctctcagatacctaaacagaccttatactttttaggtttaaacataacaaactgaaacattataaagatacttagtaaaataagaaggtgaatcatctcaaaaattagaattttgctttcctagtaaatgtccttgatattgtgtataataaatattgatttcttttttttattttctccctttttaattcttatcttaagtaaaacaaactctctatgctaattaatcttttaaaaaatacaacacttcttaaaatatgttcttagagtatgacttatttcttaattgttataaataaactatttcattttgaagtgttttaaaattatttatatcaggtaataaatgtgagtttgatgatttgttggattayacaatgtcaaatataatataaaaatagattgaagaacttgattcaaatgttagaggaatcttactaagtagtacagatacagtggtaaataatattgagaaatgagcttaaaactacactttcagaagaccgaagaggctttccagtttctattcttcaatggctaggatatttggtacaagtcacattccgtttgaaaacttccttgtttcccactcatataatgacagattcctttgtggtgcaagacatttggaaacatgagggcctgatatttgtgtgtatgtgtgtagtttgtaagtggggacaaggatgctgttattgaactatgttatcttaaaaggtaggattaaatatcttattgtagattttattttattctatatgctgtgtgtatatatgttggatgaggggattcagtttgaataaaatagtgccatgattacgatgcaaagaaatatattaagaagacagtgtaaaaacaaatgggagtttggtttggatagatgtacttaaggaaatggagggtccattcattttctcttcaagccttggtctatgatttctttttttccttaaaactctgtcaaaagtcaagattaaattctactggaaatgttaagcagattgtgaaaaaccaaaagcacaaatgctgtagaacctatatggaataaaactacaaaatcaactgggaaaattatggaaaacttagcaagaaacccttaatactaagcaatatatatattctcaacaaatcaaaatgaaagagatctcaagaatacccatatattaataatattttatctattaatgtcaaaataatacattagatgtttaatatatattcattttgagacatctgaaaggaaaatatttaattacgcagcmtctcagtaatattagtaatgaaatattctccccttgaaattcaagattttccttttagattatagatgtagaaaacttcaggaaaacgttgtgacttgtctactataaataaaattttttaatttacctaatcatatgatgttgataagtaatcaaagaataggaattttactaattctaaataataacaaaagtacaataaataaacataaattgctggaatattgaygtttgattctaccttgttttttcatttatcttcattttaaaaagttatatttctattaatagaatatttgtaataacatctgttagttgcctctgtttagtggcatgtgttctgatatagttgcttctgatatgtgcagtcttgtacttgtgcgtgtgcctgtgtgtgaatgtacaggagaacaattactacagttgctaacattaatggatatttataaaagatctgattgtgtatgtttatttgtaaccagatcagtttttaatattgtaagtacatgtttaattgataaaacaaagaaagtgggcaaattgtaagtgtacagagcaatacatttttacaaatgaaacacacccatgtaaccagaaccacattcacgaactagaacaggacaaatgtgcctacttccttctggttactaccgcctctccaaagacaagcacacctccaccttctaactctattgatgagttttgcctgcttttatgtttcatgtaaacacaattatataatatatacattattattatctttctcagcgttatgcctgtgaagacttatacctgtcattgcttgtagttgtagctgattgcatttttgttgtgtagtatccattatgtgaattataccgcaatttatttttccgttcttctgatgtgaatatttaggttattcccactttcatgttattatgaatatgctgttataaacacatgtatatgtcctttagagaacacatgtaattcattctgttacatacatacttcaatgcttgttatttttctactagattattttcaggtgataatcatatgattatggtatgattatcgccagacaaaattattctgattctaagatttatgcttctaatattaccttatgatatacttatggtatatacaaaccaaataaaatgcagattttaattcattttttttccatcartcttagcattattgacatttttgatagcatatctattgattgtgggggtctgtcctgtacattgtaggctagttagcatggcctctacctatgagatgtccctatgagtagcaacttcctcacacacacagtcatgatcaaaattgtctccagaaatgccaaataacctggtcaaggaggggagaaatcaccatccattaggagtcactgggatgaaatttccagaaaaattaataagtaatagcggtttacgtattacagaagagaaattatgtgatttacttctcaagaaagttcatagaaaagttctctaaaaattttttattgtaaaggcaaatgtgattatgaacttctaattttcaaaaataattccaaaagaacaatgtttagttactctagatttcaaaatcctttgtcatcagctgttactgccttctattctcttcacgaatatcacacattcctatttcattaggtaatttcaatactgacaattctattacttgctattggtgttaaatgatacaaaataaattcgtattcctggatctatcgtttactaattttatgatcaaaagtgagctggttagtctctgcagttctcagttcttccacctgcagagcatttttgccactagcaggtagaattatgacagctaagtgtaattctgtatgtaaggtattgggataagcaaaacaacactaattaatttattaggtaatagaatgaaatattattataacaatgggatcgatgatgagctttaattcatttatcagcttgcagaaaactccgctgtgttaataaattggcctgtaatgaacacacttttcaagagggtgagaaatagcctcgtagggtagtgagttaagagtgatccattgctagagaaaacagatgaaaccttaaaagaaaataaggagttgtggggaccaggtaaggagttaattgacttaataatagtgaaatgtagtaaagaattcagaagtaatagatttttaatattcattccattttatttttaatataactaatatgttattttaattttaatgatagctgtgtttgacaactgcatcacaaaattcttgaaaatttaatgatcggctcttgtctcttctgagtagctactgtggaaacacaggagatatatatatgtgtgtgtgtgtttcacttcaaaactggttattacaaatcaaatttctttataacaaatgtctggccaaaaaatgtctctggattatcaaaacatctaaaaacccaagtttaggacttatattcattattctagaacaataaaaataatgaggacaatttcttctcagaattgtctgtttaagcttatctagtggagtggtccatgaacacaaaatgtgtctattcaataagtgtctggaagtaatcattttatctattgtacacttcgtttgwtttattatgtcaatatgacttttaattatagaggtttttttcttatggcatattatgcatactactagaattcaagaaagaaattaattgatgtatatgaacatgatttttttcattataaaactgggacttcattaactttagtaatgtgtaatatttgtatctaggaacaatgttataacacaacagatagacaggtttaaatatatctcaagtgaaggaatgcaagcatgacattttcaaaacatttttccatatagaatataaaaagaaagaaaataaagcacaccattatcagtaagtcaatcagtcatacaacgaatatttaatgagcaattacaacatggtcatttaattattctaygtatgtatgaaatagactacatccctgtactcaaagagattttattctagggataaaaacagacaatgagcaaatgaaaaaaaaaatcacatataatgctagatcaggctttgagacaaattaagtaagtgctatgaaaataaaataattcatgatatgaagattgcaagtgaaatgcaaaaggtattttaggtaaggggataaggagaagacttttgaaaaaaatattgaatttttattgaggactaaattaaataaggaattgagtcatgcaaatatctggggaaagaaaattccagaagacaaagtggaaaagtcaaagaacctgaaagggaagcatgtttggagagttcagggaacagaaagaagtgagccggagcgctttaaactggaggaagmgtggtagatggaagagataccaggtgcaaaatcacagcctgaagctgtaattacttcagcactgttagaatatatctcactattaagccacaaatgaggagactatgaccgtaatcatccacttgtaaaaacatagaaacataaaagaactttaaagtaaggttaagygattaatattaataatataaatataatgtaataatgtaaatgaacaggaatggaaataatgttcttactattaaattaagatgtatcctgttgctgaatatatcgtgttttaaaccagcctaaaagagaagtaaattataatgcatgcctttctcgcccctctttttcttttgaaaagggatgaagacttctcttcatttccagtggtaaattagtcattagcaatagtcagattaccatttagcacaaatctgattcaggatccggaatgaggaagagaggccaccttaattaaacaaattgttttgcctaatctaaaaaaaaaaagtttttttaatctgaggtctgctaacaagcagggattgaataaaatagtggttgagtggacaaacaataaatctgccattttatattacttaatttacttaaattgacaagactttcattcggttgcaaagataggtttatgaaccaataagcaaaaatgaatgaggctccaaatatatgattacttactgaattctaaaattaactgttactaaaggttgagttgaaaagtaatgatttaatattttttgaaattataccttattatgcctgttttgcttctaatcatccgttttattcatctgtatctaaatcatttagcataatctttcagtctctttccattatattcaaacctgaaatctagtaccattaaaaaattttgtgtaatcttattgtatgattaggaactgactccttttgctacccggtttctcaaaatgagtagatcgattggtttttacatttagtaccattcaccaatatttaaatcaccctcattaattgtttgagtgccatttcaagaattttaggtaaactgtaaaccatcttcacaagtaactatatatgtttacaaattatgcatacaatttttggaatgaacactgactttgtatgaaacccatttaattatgctgaaagtccatggacctcaggataacaatcttaatgtaaattaatatttgaaaaacatatcttcttcctattcaattcattcagctaattttaattagctggatcccaaaatgatacagttctatccaaaaatcacatatcaaatacttctgtggataaggctgtcagtttgtaagaccagactccacacaacctcagattaagatcctgtttcatcacataggctgttttaataatttattttttttgcaagcacttgaaaagtggtcatttttaatgacaaaatcagttctatttatattcattcctgctatccatgccctactgaagttagctggctttgttttcagcaagaataagtaattcatctcatatatttttatgaaaaaatataactctgtcttcctcacatctagtatttaaatgatggtccttaccataacaagaagtatgatytgtacactttgacaattcaataatacatttatattctctcctatcaaagtcgtatttcagacctaagctatttgagagagacagtctaataaattattaaaaatcagtaaatatcatgctgtgtcytcataaaataaaatacttggaatctcatctcactgtccaaagctacgtatctaaactgaaataaagtttgtcaatgttaatagtttttatagaataataacacaaaaaataaaaaataaataaataaaggaagaataaagaggaaacaaaagaaattatagttggttttgatataaaaatacacatgtgctaatatacacattcttatgcatgtaaattattatattatctgagtatatagtctttccaatttggccttattgatctatttaactaatagaacaaaggttggcaaactgcatatggcctgtgggccaaaactggatcaccagttgtttttgtgtgacctcaagctggatatggttattaaaggaaaatttttgcagtcaattttgatgatggggcacattaactttcagcccaattaagtgaaatgttatcccagaaaaaaagaattctgttcttctcagcagaattatastacaaaaaaattgtactcaattattacattttgaattttgtcaataaaaacttgtagaaattaaaaaaaaaaaaaggcttgaagacyctggaggtatctgtcatcttaaaaaggtcttacctgaaagtacattccctctttgagattaaaaaactgtcacatgccctatttgtgttcttgtgagaacacagcgactttggcaactcataattacatataaagccattcattaaatatttgctgagtgtgtgtaaggcacacagtactgaaatgagcacatttgaattttttattcaaataagaccatcattttttagcaggttgaggcttagtgtggagactgtgtataagagaaaattcaatctaaagggaaattttactctggcctggtgcagaagccaagtcaccacacagtgtttttacatccctgttcagtagtaaamccataagaaaaaagaagtcaacattcaaattaaataaatttttcaattttataaatatgaattggctgggtgtggtggctcacgcctgtaatcccagcactttgggaggccgaggcgggtggatcacgaggtcaggagatcaagaccatgctggctaacacggtgaaatcctgtctctactaaaaatacaaaaaattagctgggcgtcgtggtgggtacctgtaatcccagttactcaggagtctgaggcaggagaatggcatgaagccgggaggcgcaacttgcagtgccattgcactccagmctgggcagaacgagactccgtctcaaaaaaaaaaaaaaaaaaaaaaaaaagtattatattttcatgatagcagtttcatttactttgtgctctatttcctcaagtatgttttaaacttctaaaaatggcagggaacatgctttcaacttctctgaacctctattctacctgtcagagtgctcaatttccaagagttagaatgccaggtcaagatgccacctaagtgatggagttggagccatcacaacaggrgaggggattttgtctactctctagttaaacttcactgagaaagggtatttctatttgataatgcgataagcactacttttttcagcactcaacaaacatttactgaacatctattgtaggcttggcatgcgctagactctgggcacgagataaattctgtaaatcaaaatttgaacttataaaacatatacaataagaaattcatttttatgtatgtcaatagatatttattgggtacatactatgtacaaagtactaatgcaaagcctaatttagggtaatataggcagaggcaccacaggtaacatgatattaaagataaagagaaatagaaaaaacagtttaagaagagaaaaaaaatagagaaaggcttatggtctttataggacagcaatgtgtgtgaatctggtacttaaatgccttgcctccttttattctcatagtaatgtgttaggtggtcactgtgattaacctcatttcatagagaattaaagaggttagatcacatgaccaaggtcatacaggtattaattacatggtaggaccaggatttgtttaatgctgacacctatgcttttaatttttatgatactatactggaaatgaagaataattttttgaaaggaagaaatataagcaaatagttacacattacatttctcagcaagtacagcaytagtaacctaatacattgacttttaactcacaatatgttttcaattctgycttttgcraactatttttcctttggaatacacctttacttttaaaataagaagcaatgagaaaactaaaaaaaaaaagaaagaaagaaaagaataataatacaagaaatgttagattttgaatagtgattttgggttcttgataaaatgtggtcccagacaaatgtgtcttacagagaattccagaaatatgtttgtctgtctctctacagatttgtttatacattttatcagataagaaaaataatgcaactgaaagttttctttatttattttagttaagaaggaaactcagtgcctaattgtgtgcttatctgttatcagtscatcttaaacgcctaaacatgtttactctccagctcttcttacttgctctgtattctgtttaatctcttagataccacctttaaaattatattcagagccatttcagcatcagtaggcaacatatgcacatttttaaagcaccctgatattttgtgtgttctgagactaggagaccagatgcagaatatccatagttttctagattcctctttgcatatgggcacacacagagatgtgtacctgcttaaatacttgtgtatttgtatgcacatattcatatacaattgacacttaaacaatgtatgggttagggggacccatccgcagcacaacaaaatatttaaatataacttgtgactccccaaaaccttaactgttggccaaagccttaataaacagtcaactaacacatgttttgttgtattatatactgcatttacgacaaagtaagctagagaagagaaaatgttattaagaaaatcattaaagaagaggaagtgtatttactattcattaagtgaaagtggatcatcataaaggtcatcatcctgttgtcttcacaatgagtaggctgaagaggaagaggaagtagaagtatatggttgtttttgctgtctcaggggtagcagaggcagaagaaaattgcatatgagtggacctgcaaagtttaaacctgtgttgttcaagggccagctgtatattagagcasggaagagggagaaaccacaaaaacagtagggaaaagaaaagtcaagaaacacatacatatttctcattgtgtttcagatgctaagattacttcctttaatattagcaatgatgctttaaagctgctattaatcatcttcctattttgcaaattatacatatacacacagactatatatagtaatgttatttaaaaaaataaacttggagtctccattaatatgtacctgtgaatgtgattgttcagtggttggagctgatttgcccatattatgctgaaaatatgcaatgtacctggattcttgtaaatatagatatacatgattgtctcctttctttgaaaggagagcgtctttttataggagagtcttcatataaactttatataaatcagaatttgaatacacttaaaaaaaccaacctatatttagaaacatgaaaacttgtttttatttaaattctattagtaatagattaattgattaatacgttgatagtatatacattgtaaaagccatgaagacatgtattacatggacaataaaaatgaaaaaaatgtagcaaaattataaatttaacaaaagatgtgtgtgtgtgtgtgtgtgtgtgtgtgtgtgtgtgtgtgtgtgtgtgtagtgaatggacataatcacatcaatagctggttttataaccctgaagcagaaagtcattacaaggagatatttaatcatttacaccatgggagaaacaaagacggggcagggaccaccctgatataaatkaaagcctagtcccctccaagtgtcaccactgcaatgatttaagtattctctgcccttttgtaacaytgctcaaggttcacattcctagaaaggcaagttttattggcctggaaacttggaagcctgagaaacaackcagcaggatgacatgggaatgggagagtaatcatttaccaaaggaaagtctaagtctgctgccaaaagaaggcgggggtggaggatgccgagcccgcaaacaggcctgccctgtgtttccctgcaatcctgagctatgaccacctccattcctaagtctttttccttcctttcctgcttctttttgaagacatgaaaaatcattatagacaaatcaaagcaaggcatttgagacattyaaggattggtaaagaaatagaaagagtactttagaggtatttgtctgccrctatatgagttcctcctactgtacccttcagaaggttccaagccctgtctttaattactctctaaaactggggacagtgtacaaggaaattatgtacctcccatgttagtttccaaaaagtaatgacctcatgctcaattttagcctccttttcattttgctcctgaaataggagtttctcttcattcaaatgcaatacttctatgtgtgattttgatccaatttagtctatttttacaaagacaagttcttcatcacttttctacgttcttgtttgtacagtccaatctctatccagtgacctcactttgctctgaaaatacattagagtttacctatataaaccatgttaaaaacctacagaggctccttattgctcaaactcaaggctctgaaaaatcatgcatcttagtttcttctttctgagactcatagtcaacatcctctgattagccacccattcattacttgctgcctggattagcatttcccaaactgagttctatagtcttgctactcaaaatgtagttgatggacaaccaatgtgggcatcaccagagaagtttttggaaatgaaaatccctaaacatttagaattagaatctacatttcaacaaggatctaggatgacttgttttgagaagcacttttatacaaaatattagttccatgaggtttttgggaggaaatggggagaaagacagagtgagaaaagagataaagggagagaaaagagaggagaggaaaggagagaagaggagaaagtgttacttgcttcttgggtatccacaatgtaattcgtctgtaaagtcttaccatacagaagtagtattctgcatgtatatacattgaagatcttgtaaagatcatcatgtayatagtaactattttacattcactcgtttcctcattttctataaaattactgctgctatttatgattactatgacctgactgaaaataactaatgaaaaggtttatttgcatgcattcagtagaaaatgcatgtgatagtttcatttattttatataaacttctttttttgtcaaaaattgtctgatgggatattttaattaaaaacaaaaaccattttggttggcattctaatcattgacgcctgttattaagccttggcgaaactcttgtaattcaatcaaaactcaaagagttcatcttgctgttgctataartgtttttctccttgataaatagctcagtgtgacacacctacctcttttacaataaatgctctcttttttgttagttattccctttaaaaacagccacaattcacagatcgataagcctgccaaagccactttaaattggaaaaccatttgcggtctcattagaacacataaagagacaggccccagcaccacgatttgtcagctgatattctcagaaagaagcaggcacttgaatgctttcctgtacagtaatactcaaattagctctaaggcttctctcaatgttagtacataatgtgctttcagaaccaggagcctctaaatgtaacattaggctgtaggtagaattatggctgcaaagaaattcagttatgtgggtttactttcattagtttcagtcactgataaaaatgcattaaatttaaaaacttggacagatgtcaaaggacagatcaataaccacatggagttttaaatcaagttaggggattgattgaaatagacattctttattgtaagcatttgactttgtttctcacctgcttcagtattaattcttaaatatacccttctttgcattttaattttacatgataaattttattgtgtcaggtagaatattattttagagtttataaaccaaacaaagattggtagaatgtatgtataaagatcacttttacttgttgaaattagtatctgatgatttcttrttgcttgtctcttctctagtttgaagtctactttgtacattcagaaagtaatagcttaaccctaaaatgattaaaaataaataaatgaaaaccaatttttaattcaatgagattatagtatgtcaagtactccagcactcacagaattgataatctagcatattttcacataattgcttgcttttctctatatcacacttgtaattcatattacaaagacttatttagaccatcaacacaaaaatacataatgtttctgttgaaaatttttaaaaagagatatttctctcctgtgagcaatttattacataagtaattttggatattagtgaagtcaagagggaaacataattcaaattatttctctgctgatcaaataaatggaaggtgaaattattcacgaggtttaagcactgaaatcttgtttattgaacccagagctgacaagtcattcaaatgctcagtttttcctgagggaattgatcttctgcagaaataaaacaacaaaagggtattcaggcccatagtattttgctatgctatggaaaaaatttttcactgacagattgtcatttttctacagactcaatgggtggatttcagagaggaacatrttgggatatatagtcaggagcacaagctttcatgattcttggcttatgtgctataattgatttaaaaaaaagcaattttttgtaattttcagatatcaaccaaacagaggaacttctagggctgttgaaaattagatatttttaatatcttaaatattaatcataatcgaagarcagcaaaacataaaagagacaaacgaggaaatttgtattctgtagaagcttgttaaactttacaggttcctaaaatttaaattcatgtattaatragaccttagttgcttttttatctttgtatacattagttttggaaattgaataagttaaaaaacatttaaattctgaggactgcagagaggagtaagacataatttytatcctgaaggaaattttggagtgatgcaattagcacaacaataattgtttgaagaaagaggcagaagagagatacaaatgtcaatgaaaaatgcattctattcattcaatacatagagtacacatatatgatatgcaaagcactatgctaagagtaagaatttaattgggggcaaagggagaatttttataggcccatcagatttaagagaggaactgaaggattgatagatccartttgcagttacagagaaggaataggacatgtccaccagcgatacgaaatggttgtgatgtaatgagcattatggaaaagtttaagtatgttctgttgatagaaaataatcgaatagaaaataattagtgatgttttagtagtagattaacagggaaacaaagatttattgtaagggagggaaattctggtagttagtgcctctcaatgccaggttcatcatttttataatatgctctgtgacaacaaaggtgggagtttgcaaacccatctctaagattcccttaccatccaagaggtaatagtgtgagattgaaaggacagaggagcagataggaaactattcttgcccccaggttatttcagcttcagcagacagtagcagctccagtgccatttggtattactggacygaccaaatagcaatttccaaggtggacgaagaccatccataaagttcctatcactcactgcctcttttttcccccagcctcccactaggtaccaacaccagttgcctggaagccctttggtggtcaacagattagctttgataaactcctagtttctggtgacccttatgatactttggttctcaagccttaggtgctatagctgcttcttttagatcctatattgttttgcgttattaatacctgaggaaccaattatttacattaagtgacttatgtttgaaattcctagcatgatgtctatgttttgaatgtgccttacctgatatggaaagcattgagatattttgcccataggggtggcataaagtaatgtacttttaaaagtataattttatggtttgcagtattaacagaatrtacaataatctgacyaatgatgttcattacgaagaactattagtagtttaggtaaagataaacagtctttattttttccaaaatggctgagtggaagcatttccatcatgcttcatctacttaaaagaaccaaaacagtgtgtggtcaatcacactttcaatacattatcaaagagcaaacatgggagttcaacagaaaagcaaagggaagatttgaaatctgggatgaagaaggaaaataggtagcctgagtgtctgggactggctgggaatcaggagtaaatccccaccacaggagagagagagtgagtgcctttctgcagcccatcttcccacatgggatttgtacagtccagaacatgggagagcaccttgaccctcccaagctataagcctaacttgggtagcagctgggagactgtgaaaagaaacttctccaatctaggcagctgttctggagtgtcattttcaatcctaactcttggcagtctgtccatggtcctgggaaccagcagcattgattgcagctgttggagaaactcaggtagtacttgcaaaaccagggcttgagcagggaatggactcctgcagccagttctgagaagtgagtgtggagtgggctccagaaactggcaatgaaaccaggtatccccaccccccgacccaccccgctccctgggacctgaacagttgaagagttgctcctgaggcttagtcttgagccaggtggtgtatcttataatccaggacttagcttcagaagatgcacaaactgctggaagtgactggttggcagactgtctgccacagccgtggyctgagaggaatccatgttgggactaggtcataagaggaatgcaagttccactccctccagccaaagctgtggctatggggactgttccaccctccgcattccaagatctcagcacagcaatggtcacttcacacccaagcattttcaccaaaggtctgaggactgccccactccccctatctagataccaaaaccagacaaggacacaacaaaaaataaaaccctacaaaccaatatttcagatcaacatagatacatagatgcttttaaaatactagcaaactgctgggcacggtggctcacgcctgtaatcccagcactttgggaggccaaggcaggtggatcacgaggtcaggagtttgagaccagcctggccaacatggtgaaactctttctctactaaaaatacaaaaattagctgggcttggaggcgcacgcctgtaatcccagatactcaggaggctgaggcaggagaatcgcttgaactcaggaggcggaggttgcaatgagctgagatagcaccactgcactctagcctgggcgacaggatgagactccatctcaaaaaaaaaaaaaaaaatactagcaaactgaatctaacagcacatcaaaacgttaatacactataaccaagtaggtttaataccagtgatgcaagatggtttaacatatatacaaattaataaatgtgatacaacacataaacagaattaaggacagaatcatatgataatctcaatagacaaagaaaaagcattctataaaattcaacataccttcatgataaaaatactcracaaaccagacatagaagaaacatccctcaaaatacagaacgtcatgtacaacaaacccacaaccaacatcatactgaacagggaaaagttgaaatcattccctctaagaactggaacaagtcaaggatgcccattctcaccactcctatttaacatactactggaagtcctaggcagaacaattaggcaagagaaagaaatacaaggcatacaaactggaaaagaggaagagaacctatccctgtttactgatgacataacattatatctacaaaaacctaaacactccaccaaataacttttatattgataaatgaattcagcaaaatttcaaaataaaaatcaacttacaaaaatcagtagcacttttatataataatgaccctagctgaaaacaaattcaaaaaggcaatcccatttacaatagctataaaaaactaaatacttaggaatatattcaaacaaggaataaaaggtctgtacaagaaaaactacaaaacactgattaaaagaattatggattacacaaccaaatagaaaaacatcccatgcttatgaattggaagaaatactgtcattcaaatgaccactctgtctaaagcagatttaatgcaatccctatcaaaatgcaaatttcatttttcatagaattagaaaaaaatcctaaaattcatatggaaccaaaaagacccaaaagaccaaatcaatcctgagcaaaaagaacaaagctggaggaatcacatgacctgacctcaaattatgctatagggctatagtaacaaaaacagcatggtactggtgtaaaaaatagacacacagatcaatgggacagaatagagaacccagaaataaagccacatattctcagccaagagatctttgatgaagctgacaagaacacatattggggaaaggacacagttttcaataaacgatgctggaaaaattggattgctgtaagcaaaagcatgaaactgaacccctatctctcaacatatacaaaaatcaactcaaaatggattaaagacttaaacgtaagaccataaactacaataatactagaagaaaacttagggaaaatttttctggacattagtctaggcaaagaattcataactaagacctcaaaattataggcaacaacaacaaaaatagataaatgggacttaagtaaattaaacagcttctacacagcaaaggaaataatcaacagagtgaacagacagcctgcagaatggaggaaaatatgtgctaactgcattctacaagggtctaatatccagaatatacaaagaactcaaataactcaacaacaacgaaacaaataatcttattaaaaagtaggcaaataagatgaatagacattttccaaaagaaggcatacaaatggccaacaggtatatgaaaaaatgctcaacatcactaaccatcagagaaatacaaattaaaaccacaaccttactccgatcagaatggctactattaacacatcaaaaaataacagatgttggtgaggatgcggagataatggaacatttatacactgttgatgggaaagtactttagtacaacctctatgaaaacagtgtggagatttctcaattaactaaaaattgaactcccaatttattcaacaatcccactattggttatctacccaaaggaaataatatcgttataccaaaaagatatctgcactcatatgttgatgacagcattattcacaagagcaaagctatggaatcaacctaagtgtttatcaatggatgactgtataaagaaatgtgatgtatatacacaatgtagtactagactgtataaagaaaatgtgatatgtatgtgtgtgtgtgtgtgtgtgtgtgtgtgtgtgtgtatacacaatgcagtacttttcagccataaaaaagaatggaattatgtcttttgcaggaacaagccattatcttaagtcagtctcagaaagataaatattgcatgttctcatttgtaagttagagctagataatatgtacagatggatgtcaagtgtggaataatagrcaatggagactcagatggatgagggagtaggagggggatggatgatgagaaattacttaatcggtacaatatacattattctgatgatgtatatcctaaaagccctaacttcacccccatgcaatctacacatgtaaaaaagtattgcacttgtcccccataaatttatgcaaatagaaatattaaaataaaataaataaaaaatgaacatacacacaaaaagaaactgtgtgattctgttttgacaggaggtcactgatgacattcttaaaagcaatttctctgacaaattgcacacagattgcagataacagtaggatgaggcactggagaagttaatatagcatgtgtatatcactaattagggaaaaagtatttatttgtgaaagaacagagaaattctgtaacataaaaatatgtgtgatcagagattatttttgagtgaacagaggaaacaagatatatatttgttcattattttgagaaactaaagtgaaattctgagaaaattttagtaaaatcaatgtatcagtaggataactaggtatttagatggttaaagttttttgaatatttgaaaattccttgtgtctccatgattacaactaaatagatttctataaactcatgcactaggatgcaagctctacaagttcagggctgtttgttcacatctgctcattaaatatctgttgaaagaatctatattttagcatatttatcttaaatcataaatagaattttaaatgtattttgttttcaagttgaaaagacttatatttaattagatttttcaaattcacagactatttcattagttacacttctcatgtcatctagatgtagcactatgaagggtacatttgtagtaactatcttgcctttttatagacttgctcagaatttactataaattgcatccaagatactagccaataatgtaattcttgtaaattgaatcttaactgagatctcaaaatcagaaattttagagcagattttgcatataaatatttaggaaaaaagaagatgcaaaatgtaagtcagctgctactttatgtacaacttgttatcatgttttgaaatattcttttgatgatcctgagtttgtttttcattctctgatatttttctatgaacatagatattgtagcttaaggagaaaatgaggaaatggtaattgaaaaaggtatatttttcttcataaaaagcagaaaacaatacacctttttaaaagtatatataattcaacctttattttaatattttttgaccatgacttctgtgtttaatactgccagatttgtgtaggagtttgcttttttttgtatagttttaaaatgtttcaattagagagctgatataaagcaaagcaaaacaaaacctacctagcatcctcatagatcaggatggatattttttaaaagataaggataatgtgtggtagaacagatgttttgccatacccactttcagaaagcaaacaaacaaaaaagttaaataaagtgtttcaaacttaaatcaatgaactggaaataaaattaattcttagtggttcaaactaaggaaagggaggaacttcaaactaaggaaaagaaggaagtcatagttaaggagaccattctaatgaactactgtctccttatcccttaataaaatcagaccccacaaattctaaatcatcatttatatagataagtaaaagtatctaccagccaaccactccaacaagaaactccgagaaacatggcctgtcttgaaagttgatgcttggtgtagacaaataatcatcatcatcatcattccagtgaatctgtaaaaataaacatgctccttcaagagtctgcagcccaaattttcactaacctggtatttcaaaaccgaaagctcagaattatattcaaatgaaagggtcaccagaacccttccaaccagatggaagcaaatacgaatcttctgtagggaaccacattcagcaaagcatcaaaggatttccatggtaaattttaaaggaaaatgagcagattgctgaaacttacaaaacacaaaaaaagaaagcaggcactaccaacaagagctagaagaaataattaataccagattcactttcagagatattacatgttgggtatatcagaaataaaatataaaatacttatgttaaatatatttaaagaaataaaaataattgttgagaatatgagacagcagcacaagacataaaaattgaccaattaaatttgtaaaaacaaaccaaaaacataaaaaaaatcttgaaatatgggacttctggttccatgacgatagagaagcttattcttcacagatcctcccacttaccactaaaaaaaaaaacaaaaaacactaaacataatgcaaagcaatgagaaaaaaataggaagattccaaaaggtggaaaaaaagtaggctagctgtctaggaacagcaggacttgaaaaatgaaacattcgaatattcaatcaaaaatgactcattatatatcaaaagcaagggaaatcacaaattaaatgagaaaagaaagtcaacagatgccaatatgaaaatgaatcaaatggtgtggttgtctgacaagaattttaaagcagccataataatttccttcaaaaagcagtgataagatctcttaaaacaagtgaaaaaaatgtatgaaatgtaatccatcacagaaacagtttaaagaaaaatcatgattatattaatagatgcaaaaaaagtgtttgaaaaaaatctattcatgataaaaactccctgcaaactaggattataggatttttctttcaatttggtaaagaaaatctacagaaacctacagttaacttcatactcaacggtgaaaaactgaatgttcaagatcaggcaaggatttctgttctctctactcttattcaacacaatatcagaacttttctacccactgtgataaactgaagaaaagaaataaagacatgcataytggaagtgrgggggggacccaattatkcctatttgcaaatgacatgaaggtccacatagaaaatcacatagaaactgaaaaactaaaccaaacaataccttggaacaataagtgaattttgcaaggttataggatgtaagatcaaaatataaaataacttgcatttgtatatactaattatgaacatatgacaactgaaattaaaaacacaatacgatttacaattgctctaaagaagatgaaatattcaggtacaaatctcaccaaagacgtatagaatatatatgctgaaacttaaaaatttttgatgcaataaatcaaagaagacctaaataagacatacsatattcatgaattagacaactcaacataataaaatctatcaatactccataaattgacctataagtttaatccctttyctataaaaattcaagcaaagccttgcatctggaatacattttaaaaatctccaaactcatcagtaaaaatcaggcaatctgcctaaaaatatgcgcaaaatacatgaacagatattcatcaaaggagatatactgatgacaattgccatgtgactcaatggttttactcytcagcattaatcccagagaagtaaagcacatgttcacacaaaaactttttcactgatggtcacagtagctttctttgtaataggcaaaaactggaaaaaacttaggtatccttcagtggacgaatagttgaacagactttggggcaaccatatcatcagatactactgggcaatcaaaatgaaaacattattaatacataaaaaacttgagtgaatctatagagaattgtagtgagtgaaaaaagccaatcattataagttacctattgtatgattctatttatataacaaatttaaaaagacaacatttgagaaatagagaaaacatctgtggttgccaggttggggacaggggaaggagagaagctgtgcagcagggaggttgatgtgattatcaaaaggcaacctgaggaatccccgtaagtatatataaatgtaataaaattgtaaagtttcccatgagaggagctgggtaaagggtacttcagtgtttctgtattatatcttattactgtttgggactctacaataatcataatagaaaatttaattttaaaaatatcatgctgtgccaaattacacaaaattcaatgattactattgaaacaaaacaatctagaaataaaaaaaaattggaaacctttgatggatgaatttttattagattaaacctatctgaagagggcactagtgaactattaagatagatctgaccaagtcatcaagaatgcagctcggagaggaaaaatatgagtttcaggattgtagagtgagaaagagtctaatggatatatctgattaaaactgcaaaaggagagaagaacaaaagtaccacagaggaaatctctgaagatataacacctgagaactttttataactttggaaagattcaggaactccataaactaaaaagagaaaccaatttcatagtgaaattagaaaataccaaagaaaatagaatttgccttctaggaaatcacaatttgactgacagctgaatcaatagcaatattagaacgcgtaggacagtggaataaaagcttcaaactgcccagagaaaatacctgtttagaactgcatacccagcaaaaatatttttaagaactatagaaaaataaatacaattctataacaaaaatagaaatccacaaaaccaagaaactaaacagttagaatgaggagagtgtcattagagctcagttacaggtagttagtaatcaagacagacctgccttctgccttcaggtcatattcagaaactttattgtgagaataggacaaagctttttttttttttttttttttgagatggagcttcactgtgttgcccaggttggagtgcagttgctcactgcaacctccgcctcccgggttcaagagattctcctgcctcagcctcccaagtagctgggattacaggcatgcaccaccacacccggctaatttttgtatttttagtagaaacagggtttcctcatgttggccaggcttgtctcaaactcctgacctcaggtgattcgcccgccttggccgccaaaagtgctgggatcacaggcatgtgccaccgtgcccggccaggacaaagcttttatatagaggagtttaaaaagattttgatggttgctccatggagaatggattggagaaatgcaagaatgaatgccagatatcaaaagggatgaatacaatgtttcaakgaggaaataatgatggtttgaactacaatacagaaaaggaaaaggagaatatatttgagattatgaatttcaaataattttakataatttgtcttctaacttgcatattctacaaataaggaaacagagctttgagtggaaaagtgacttgtttaaaaatcacaaaagcatataatctcatttatatgtggaatcaacaaaagacaatctcataaaaataaatagaaagagtctcatagatatctgattggagctccaaaaggagaaaaagaacaaaagtgcaataggggaataactgaagatataacacctgagaactttttataactttggaaagattcaggaagtccataaactaaaaacagaaataaatattatagtgaaattagaaaataccaaakaaaatataaattgccttctaaaaaatcacaatttgacagacagctgactcaatagcaatatcagaacccataggagagtggaataaaacttcaaactgtgtaccaaaaatacctgtttataattggatacccagcaattctagaagaatggttaccagaagctgtggtggaaaaggagggatggagaaaggggagatgttaatcaaagaatacaaagtttcagttagactgaaggaatatattttagtgctctattgactgcatagtgatcacagtaataatatgttgtctatttcaaaattgctgaaagaatagatgtttcaatgttctcatcagaaaaaaggatgagttggtgaagtgatgggtatggtgtttagcttgactcaatgtatcttcaatttacacagagctcaaaacataacactgtatctcataaatatactcaattattattggtcaatttcataagagttttaaaatcacacaactatttagtagcagagagaggataaaaattcaggtaacaatactatcctagctaacaacttaggatgttcttggctacaccatgctgaaatgaagcaagtatatatgcttctgcctcctgtcttctaaaccctgctgttattctatatcatttttgtaaagaattccccaacttctctttctcaatctccatacccaccatctttgagtgacggcactatctaaagcaatgtagtatgacaatatttatttttatgaagagccatactactcccctaataagtctgatacacacacacacacacacacacacacacacwcacacacamgatggatacacatatatatgtagacatatatacatacatagtcttcatgttatactagagacagtgggagtatagacgtacatggcaccccatccctggaatctattaaattaatcacctactctcccttccctttgtaaatgtcgttgctctggtttagcctttttaattatctgctttggtcatggaaacagtttgtaattgctcttccatcttgcttttctttccattttttttctacatcaatatttatgaacataattctacctctactaaacagcatgttgcataacattaaggaaagacgctctttgtcgaagtcatcattttagcatctcttctgaaaaatgcacttattgtagggttttggtaaagatttttacagttctgattgaatgataagtaacaaatagtttgcaacatacctcctaatcagaacacagtggattgggaagatactgaggttaagaaaagcttttctatactgctactgaaatgactgttttaaaatgtagatttaatcacattgtatcttgctaaaattcctttgaaagacatccacagtttttagggtaagtttcaaattccttagtatagttgtcaaagtaatctctggtttaagtcttgccttccactcttgggcccacaaaacacattagcccaagttttctcaatttctgccatgttgacattttgggtcaattattttgaggagctttcctgtgtattataggatggttaacagaatccttggcctttacatattttatgtcactagcactgcctktgccctagtcataacaatcaaaaacatttgcagacattgcaaatttttcctggggagcaaaataacccttggtggagaaccactgtgatacacaaacaacttacatttttcacatgggttatgttatttttctaatgatgttcggtttggtatagacatcaccttttaggaattaataccyttcagtttttaggacaatattacctttgcagaaaaattaagcaartagttccgaatttgtatatacccttctccttctccattttgccagcacacatcttgcattcgtgtcctacatctcttataattaatgaacgaatattggcacaatgttatttcatgcatccacaattacagtttcatgtagaatagttttgacaccctaaaaatctcacctactcaccacttcccctctccctccaaaacctctggaaaccactgattattttactatctctctagttttgccttttcgaaatgtcagatgggaggaggtgagkattgaaaaactacttattgggtactatgctcattacccaggtgacaaaataatctgtacaccaactcttcacaacacacaatttacctatgtaacaaatctgcacatgtgtccctgaacctaragtgggaatggaaaatttaaagtgggaatgaaaaaaaattaatttaaaaagaaaatgtaatttagtatgggagtcttttcaggcttactcagaaaaatacwtgtaagtttatttatgtctttccttggcttcatagctcatttccctttatcaccaaataatatttcattttagagacgtaccctagtttacttatcttttcctctgttgaaaaacatcttggttgctttcagttttttgcaattatgtataaagctgctataaacattcctgtgaagggttttgtgtggacataagttttcaactcagttgggtatatacttaggagtgtgattgctggatcatatgataagactatgtttaactttgtaagaaactgccaaactgtcttccaaagtcacatttacattttgtattcccactagcaatgaatgaagttctggttgttctacttcctcaccagcattgcgtattggagaatttttggattatagacattctaataagcatatcatggcaccttattgttcttataatttgcarttacctaataacatatgatgttttatatattttcatgtgtttatttgccatctgtataccttctttcatgaggtgtctttcatatatttttcccatttttaaattgtttccttatgattgagtttcaagaattcgttgtatatttttactaaaagtgcattatcagatatgtaatttgcaaatactgtctttgaggctgtagcatatctttttattctcttaacagtatcttttgcacataagttttaaatttaatgtccarattatcatttttcttttcttgtatggatttcacttttggcagtgtatctaaaatctcatcaggaaacacaaagttacctagattttctatgtcatcctctacatgtttgtattcattagtttgttttgtattgctataaatgaatacctgagacagggtaatttatataggaacgaggtttattttggctcatggtttgcagactgtacaagaagcatagtgctggcatctacttctggcgagggcctcaggaaacttacaatcatggtgcaggaggagaaagcatgtcacatggagaggaaaggagcaagagagaggggaggaggttaaacaacaagctcacatgtgaactaatggagtgagaactcactcatcatgaaggggatggcaccaagccattcatgagagatacaccccatgaccctaacactttccactatgccccacctccaacactggggatcacgtttaatagctcatttccctttatcaccaaataatatttcattttagagatgtaccatagtttacttatctttttgtctgttgaaaaacaccttggttgctttcagttttttgcaattaaaaccttgcgattggaggggacaaatatccaagggatatcaatgatttatagttttgtgtcctacatttattcctataatctgttttgaattattttttgtgaaacatgtaaggtctctgtataggtttctacatgtatgtatgtatacatttgcatatggatatctaatttttccagcagcacttgttgaaaagactattttttctccattgaatttccttcactcttttctcaaatatcatcagttgactatatttctgtgggtgtatttcttggctctctgttgtattccatatctaatttggctattctttgtcaataacgtgctgccctgattacagtagctgtatagtaaatattgaagttgggtggtgtcagtcctccgactttgtttttcttcagtattgagtcacctatttctgggtcttttttgtctttccatataaactttgtgtgtgtgtgtgtgtgtgtgtgtgtgtgtttgtgtgtgtgtgtgtgtgtgtgtgtgtgtgtgtgtgtgcgcgtgtggtggagtctcactctgtcacccaggctggagtgcagtggcatgacagctcactggaacctccgcctcctgggttcaaacgattctcctgcctcagcctcctgagtagctgggattacaggcacctgccaccacgcccggctaattttttgtatttttagtagaggcggggtttcaccgtgttggccagttggtttcaaactcccgacctcgtgatccgcccccctcggcctcccaaagtgctgggattacagacgtgagccaccatgcccagccccatataaacttaagaatcattttgttaatatctgaaaataacttgctgaaattttgattgggattgcattgattccatagatcaagttgacatatagatcaatattgacatcaaaacaatattgaatattcctactatggatatgaaacatctttctatttatttagctctcctttgatttttttaggactttgtaaatttcatcatatacatcctgtatatattttgttaaatttatacttaagaatttsactttactatttcactgattttagagtaaatggtattgtgttttaagattcaaattccagttgttcattgtcagtrtatagaaaggcaatttaattttatgtattacctttgtatcctgcaaccttgctacatttgtttattagtttcaggaagcttttcctttgtttgtttcatttttgttgttcttttttgtacttttacacaaacatgtctcctgtaagagttttgttttttacttcccagtatgaatgccttttattttcttttcttatctacgaagttacctagaacttttagtacaatgttgagtaagaatggtaagaggagacatgtttttattgttttggattttagaaataagcacttattttctcatcactaagtatgatgttacctgtagatttattgtagatattctttatcaaataggggaatttctctcctgttagcaattgagatttttcatgaagaatgggtgttgaattttggcaaatgctttttcggtatcaattaatatgatcgtataattttttctcctttagcttgttgatgggattgattatattattgattttcaaatgttcaactagccttgcattcctggaataaatcgcacttggtggtggtgtatagttctttctatacgttgttggattcaatttgctaatatttggttgaggatcatttatgatatataattgtctatagtttttcattcttgtaagggtcagatttagatatgagggtaatgctagcttcatagaatgagttgggaagtggtctttctgcttgtatttttttgcaacagattttagagaattggtattatttcttccttaaatgttacaattcagcaatgaaactgtctgggaatggtgtttctgctttaaaaggttaatcattgttcatttaatttctttagtaaatataagyctatttggattgtgtgttcctgcttatgtgagtttttatagatcatgtctttcaaggaatcagtcctttttaactaaattataaaatttgtgagaatagagttgtgtatagcatttctttattatctttttattataaatgggatcagtgatgacctctattttgctacagatgttagtaatttgcatcttctctttctctctcttgttagtggcctggctagaagttcactaattttattgctctaagatctaacttttgctttcattgatttttttgctattgatttcatgttttccattctgtttatctctgctctaacttctatttttttatctgattgttttacatttatatagctttactttctctagtcctaagatggaagacttgattgttgatttttagatctctcttcttttataatatatcaatcagtgctacaaacttcccctctcagcctgcttttgttgtgttccacatattttgacataagtattgttttcttagtcatttagtttaaaatattttaaaatttctttggagacattttatttgacttatgttatttaaaaatgctgtttaatttctaaatattttrttattttctagctatctttctgttattgatttctgcgtagttccatttgagagcatactttgcttgacttataacctcttaaatttgttaaggtgtgttttagggcccagaatgtggtctatcttggtgagtgccccatgggaatgtgaaaagaatgtgtattctgctgtcattggacaaaatcttttataaatgtcaattagatatagttgattgatggtgatattcagttcaattgtatccttacagattttctgcctgttggagctgtcaatagctgttatagaggtgttgaactttccaactataataatgaattttctatttctctttctatcattttttgcctcatgttctttaatgctctgtttttaggtgcacacacataaagaacaattatgccttcttagggaattgtcaacttcatccttatgtaatgcctattttatcccttataatttttattgctctaaaatagactttgtctgaaattaatacagttaatccagctttactttgattagcattagcatggtttatctttctccatccctttaatatatttgttgaatctttttttacatgtcctctgacaagtttttattgtatgtatttagatcaatcatattaaaaatgactatttatataatgggattggtgtctagcttgattgtaacttcttacacattgcacttgctctttttttaaaaaaagtcgttccctctttcactgctttcacttcttttaattaactatttcatatgattatattattttcttctattttattatattattatacttcttcaaaaatgttaggggttatctcagagtttgcaatatgtattggcagctaatctgtgttcatttttcagtatagtatactgtttcaaagatggtacatgcatgtaccgaataacagcatatatcttctttttcgcttttattccatataacattgttgtcatccatcttacttatccataaactataagcactccatacattattcttattatgttgaatagttatctattagattaattaagaataagaaaagcaaaacattttattttaccctcattcatgccttctctgatactctttctttgataaattcaaatttctgaactatatatttttattctctctgaggaacttgttttaacatttcctgcaagacagtattacaggtaacaaattccctgtttctcttttgtttgtttgtttgtttgttttctgagacagtctttatttcttcttcccctttgaaggataattttactggatatagaatcctaggttggtgggtttttttctttccacactttaaatacttgwctccactttcttcttgcttgcattgtttctgattagaggcacagtgtaattcttattcttgttcttctataggcaaagcatttattttctcacatttgtcaatattttctctttgtctttgcttttctgcagcttgaatataatatgcctggaaatatatcctgcttagtgttctctgagtttcttggatctgtggtttagcgtctgccattaattttggaagacagctgttataacatcaacaaatttttcttgttctttcttccttttcttatggcgttagggtcacattcggtgattcaggccaggctggagtgtggaggcttgatcatagctcactgaagcctcgaattcctgggctcaagtgattctcccattccagcctcccaagtagctgggtgggactagagacatgtgtcaccaagcctagctaatttttatttattttattttttgtcaagacagggtcttgctgtatttcccaggctggtctcaaactcctcagctcaaacaattctctcaacrtagcctccccaaattgtggaatcacaggtgtgagccaccatgcctggcctcttattctttcttatttcttctctttcagatgatgcttatgtttgtaattgtcccataattcttggttagtctgttatactttttaaattatttttgctctttatattttatttcagaagaccttattttcctcctgtgttcaagctcattgattctctcctcagttctgtccagtctacggatgagaccatcttaaatcttctccatttctattacagtgttggtgttgttttttttttctaatttctagcatttccttttgattctttgttagagcagtcttctctctgtttacattcattgtctgttcttgaatgttgtctactttttccgttagatcctttaacatattaatcctagttattttaaattccctatttaataattttaaaaatctgtgtcatatctgagtctagttctgatgcttgctttgtctcttcagactttgtttttttcttgcttctagtatgctttacaattttttgttgaaacccagacatgctgtatttggtaactgaggtaactgagcctttggtgtgatcatttatgtcaatgtggctaggagtgagggttgtacttaatatttgctatattgtatgtgctaaaggatttagtttctcctagattcattttctttcsttttgttattgggtttcccaaagaacttcttcttagttagagtctgtatcttgtagctctttcagtggtaagccctgttgatgaagttctaagtatttgggcgtgtagttttctataatcttatgattaaatctcagttttcttagtggatctgagtcctttggcagagacctcagatgggtatatcagcctttcttttccttccccttatgtgaaacaagaaggaatgatggagctgagctttttaattgatgcttttccaggtcagagaaggctctggcaaggtatttctcttgagagcaattcttcattataaatactatggacttatttcaaaatcattaatttcccctgtgatattttaaaacaattactttttcccttcctctccctaaagcatgagggaaagtaatttttctccagtcttcaccatgagaacctagtagggctacatttaactattaataccagttacttgctcaagtgttttttcctaggtaagctgatctcggctgtgattctctatgtttgcttgtctcttcgattttgtgggtagtagtttactctgtgaactccatttgctgattaacctaagaaaagttattgattagcttgcttagctttgtcttgatgtgtggatgagagtgatgacttccatgccctttatatgttggagtgagttgaaactataagtcaaaagattttaccattattttttatctagcaagtcatccttgaaaattcttcccaaatgtcaactaccccaggaaaaacttccgtgtcattttcttcccatttcaatttagtttgcctccttctttgctcttccagacctacttttcctattatcactctcctctgaaatattagaattgtttcttgggttccacctagttaaaggtccttaatgtcagagaaatatatggcatttgtgtttgtatttacagtgattagcacaatatctagtatgcaggacacaattttcttactcaaaggtaataaatattatgatgattaggatacataacctcaagaagttacatgttttagtgagagcaacaggagcattcatagaaattttctagaaaatgtaaaaagtgccataatggtggaaacagaataactgctcagtatgcatgtgcaaaggtagtcaacagagggtgaaatcgtatattttccagaggagaagagaacagagcggagtgtgaaataagggtttactgtgtgccaaacaaagcarggaaaaggtcacatcgccatcaatctttcagggcagagaagacatcttgagtactgacaggacagtagtatgaagactcactgatccacaatgctggaacattgtgagtgaggctggcgaagctaagaagagtgctaaccagcaccacctttcttgatgaaactgaaggaaatgacatcttctatgagaaagaaagttgaacaaagtggggcacttgacgagaaccacaaaatcggaaagaaatggtggagaataattacctttgacaagtgaaataaggaatattcatttaaaataatgagggataacttaaaaggaacagagaagtgctttctgtacgagacaatatgaaagatggtctatctgtaggtaagaggtagacgtatgggacactcatatgtgtgggaaactctgcaccctacaagagaaatggagcctggagccacagttaacatcataaaatgacataagcgataaaacctatgatgatagattttcacgacaatatttagccttgacactggcgtccacttagtcctactttgttgcagctaaggaaagaaataatgatgaattttgtggctgaatctacataacactaaatactttttattttaactccattaaaacagttctgacttctcatgtaagctattcaacagcctcctgcgtggtcctccaggtgcttgtctcattttgttccagcgcattctacctattactatcagataaattaccccaaccagtcccccagtgaactcattcctctgaggcacactctaaatgtttcattgttgcttgatctaactgttaatgttcttattgcaggaaaataaaatgaattctgcttacytgatgcaaaattataatattcaacaaatatgaagtagttgactaactaaaagaaaccactataggactgggcttagaaacattaggaaataggcctatttggagatctagatatgaaacatatgaggatgtttcttgtggaatttatcacctccaacagctttgcatactttagaaagcttaaatttctagagagagattccggttcatctaatatatgtccacttggccttggaaacaaagttgcctctatttatattccaataaaattgtattcaaagaaaaatcagaatttgttaccagaagaagggcgcaggacactgagtagaagcaaacaaactaaaacaagtacaaaacaaccagaactctgatgtgttttgaacatagtccagacattttagatattagccagactttccttttttctggcatctgcatactgttttattgacatataatattctaacatgttattatgtaaacaaagttagaaactctataacagagaatggtccattaattttactaattgccttcatttttattttcacatctttggtctcccatctgaagtcaaatgaaacarcgttgtcgcagttttgcagttttggatcatartacccagatgcttttcctatagctaaggtacttgtgaaaaccgcaggtggacacmtacatctttctcaggtgatatagatttgaaaaagccagtctgttttttaaagggaaacacagaaaaagaagagatttatcaacagttcctgaatttgttaattcaatttacacttgagtagttaataaatcattaaacttcagtgacaaagcaccagacattgagctgagtgttggagccatagtgggaggaaaaaaactctgagartcctggtacttatagagcttataagttaataacattgaaaaatatttaaaataataaatatactgtataattaattatcctaagcccaataaaaaaatgaaaatagaaacacttatactccaacaccagaatatgaaataacttaagatcaattatttaaaatattttcagcatttggacaggtccttacacaactacacttattgatacagtgataattttggtagtgcttctgattccattatttttttcaaagaactaaagataagcaaataaaatatggcccttctgtcaatgagttcatactgtaattggaaatcactacaaaaaattgataactataataacatgttttactacatgtatacattgtaaggtcaatatatatatattaagattaatgagttaatggctgtatacagttatttcttactttggcataaagcatatgatacatactatacattgcagtaaatatgcatgtgcttgagatagattacaacatgaaaaaatgaaagaaagcttgaatttggagtttaattaggttattaaattatcacccccaggtcatttaaagctaatataaaatatcaatatttcaagcattagtgatattctatactgattaaacatagattaatcaactaactgttgtattgccctcagcattcaaatttcaaatcttaaataatatttgtctctttaaagtggagaagcaatgtagcagaggtgttaagaataggaactttggagccagattagagagattcagtgcttttgtcattcccacaggttgtatatctttggataaattagttaagttctttgtacttctgattgttcatgtgaaaattgaaagtaacgagagtatcttcttcgtaggatagttataatagttaaataaggtgttatttgttgatcatatatcttagattaaatcctaacataaaagtattttttctcactaaaatgaacaattttggtagccaaaaaaagaaaaccaaaagtttccataaaggtttatgtcttccagtctttttcttttaatatgttttggaagaaatcttttcaatgcataataaattacttatcataggtgtgttttttgttttgttttgttttgttttgttttttgccttctcctaatatataaggttctttctttctttctttctttctttctttctttctttctttctttctttctttctttctttctttctttctttttttgatggagtctcgctctgtcacctaggctggagtgcaatgacgcaatctcggatcactgcaacctcygcctcccaggttcaagcaattctcctgcctcagcctcccaagtagctagggactacattagtcactagtcccaattagttgagactacaggcatgaaccaccatgcctggstaattttttgtatttttagtggaggcaaggtttcaccatgttagccaggctggtctcgaactcctgacctcaagtgatccacccacctcggcctctcaaggtgctgggattacaggtgtgaaccactgtgcccagctaatacatgattttgattatttaaagcatcattaaatcacagtgtcccaagattatcccaatggaacataattttcccctcttaattttgatgtcagtttctattgatgtaaaagtacacattatgtgctaatgttttataaaaaaaactattccacctcaaaagccatttttagataaatcacccaagacaaatatggtttctgaattcgggtcatcccaattgaggaataaagtkactgatttttaaatatatatttaatcattgttttaattatgcaatgtattcttattttgcaatctgacatgtgataaaggccatttgcagatttaaatttttatactagccaagaaacctcagttttaaacattgggctgggtataactattttaaacatgttaaatgaaaaacatttttttttcaatttctacaaattattaaagtgcttcttaacaacactctacatagacctatgaagctaaatcccagtaatatagtgcgtgcataatattgatattcataagrataaagaggctattaaaagcatataagaatgattagtacaaggcaacattgcacaaaacaacccctctttcagcatctttctttatgctgagtttttttgagaatctgacatttyaaaatatgrttataatataaagataagacattattcaccgtaggatgaaacgaattggctttaacagacatagctgtgtgagctgcacagtacatacatgatgaagtttttcttcttcaattcttcaagttggatgcaggaaatgtacaatagaaagccatcgctaaaagcataagagttaaattttaaggacatttaattgaggcttagaatgagcctttctattttacccacacattttattattttaatatccatatttatcttccagccagtcatagactgagaaagttaattgaagaaatgcatccttactttttcaaactaacttcaaggacaaataccacacagatggctgatttacaacagtgaagataatgataatgagttttgttattacatttccacaattatatagcatctgttttttcaacaaagtgctttgttaaagtcaccccaaaaccagtctatatgtatatgcattttgatgcatactgcatgaggctatcattactgttacaaatttttccactcttcctttcaagttacctgtctttatagaagttacagaaaggtaagatttcatttaataaaaaatagctctaaggttaagtcacatataagatatgatagaaagctattcaggccctccccaactcagccaaaaaaaataaaatgctttatcttaaggcattcttctctaaattgtaaacaatataaacagatttaatcatttagatggcttaaagctagtgtatttatttgcagttgatagcatggtgttttaaagatttagctattagatggaggttttctgttctctttcaaaactgacatttaaaatgattatttgatacaagtccatatcaatacaactgaaaatcttttcagtgccttctgtgtgcagggctctgtgtaaatatgaatataatttggcctctaagtctaatgtagagacacctaaatggcctccagcgtgttagaaagagtgatgggatattgctcaagggttagagtgggtatagaagaactagttaaattggcctatgtagtttctcaaaaaaataaaataaaatcacaatatgtatgccttctctttttttaaacaattggtctaaataataaagtgaggtcatgcagtataaaacgtggacattttcaggaacactgtgtggatgaccattgctaaatcaattatagtttactccacatccatcactgagacagccaaataaatggctgggctatattacagtctgctaattttccacataaaacttcagttggacaactacaatttctctgtcacagaatttctatgctgtgctttaaatcgtgttttgctgcattttctgtggttccttaattatgtgtccagcttaggacttcacacattgtgggtggctcagaaagtttgactgaatatcttctyccctaattaatattacttatcattgctcagaccactttataataccaggtaccttcatcgaagcagaggaagaattgcctttctgatttaaaattgcctactaggtcaacaataagcttgctgcccctaagaatcattcagattctgccatcaccattcagttacatattcatgtataaagaaataagaataatttgaaagtcatatacttaaatattaacctcagaaattatggtttcaatgaagacagggcacacagttatggaaaccattacccctgtgcacatgtgtgtgtgttcatgcacgtatacatgtaagcgcacatgcagaatgctgccaggcactgtgctatgtgcttcacacatgacacattatttgattctctcaaccactctgtggggtaggtgctatggcatcctcatttcataggtgagaaaactaaggtgtagaaaaaaattattttcccaaaatcatggagccagtaattaacctagctgggaattgaagcacgtctgttttgtgacaaagccaggaagtccagtggaaaggcctgtaaatggcctgcccagaaattagtgatggtgatctattttgttagtttcctctcctgtaaaagaggagaattggacccaaagagatctgaaggcctatcaaatcccatattttatgatcattattcttttcaaggggagtgcaataatatcatgtcttttctgaatctctcctagccttccagcttatgtcccactgattcattgatttaaaaccartggaaaagctcccgtatggcactttgttaaatttaggaagtagctatcctctcatgattaaagccaaagttggtaaggatttaaattattgagcaatttattttttttgaaagataaaatacttatataaaaaatttaaagtgagaatacctttatttatgggattgtatattctttaaaagataaagctatatcctattgaactgtttcttttcccaatgctttgcagataatagatgtttaataaatgtttgttgaaaaacattaacatgacaaagtaatttttaagcaccagtttacatacagtgctgtgattaaagatggatttctggaggccgggcactgtggctcacgcctgtaatcccagcactttgggaggccaacgtgggtggatcacgaggtcaggagttcgagaccagcctgaccamcatggtgaaaccctgtctccactaaaatacaaaaattagctgggcatggtgkcatgcgcctgtaatcccagttatttgggaggctgaggcaggagaatcgctagaacccgggaggcagaggttgcagtgagccgagatcacatcattgcactccagcctgggcaatagagcgagactccatctcaaaaaaaaaaaaaaaaaaaaaaaagacagaraaaagaaaaaagatagatttctatctaatgtcaataacttctgatacttcacagtttaagtgctgtctctcatcatttattttgtttgtttaagaattaatttattaagagtgatgaaaggtaaatgaaagttgtcttgcttgtaatccttgatataaggccaacattttaggaacaagcacacataaatgtgtagcaatctgtttttgtttttgttttttttttaaggctctagtccagtaatcacaagactaggtagggatttagaagtcaaaaggggagtagagagagagctgtgaatttcttagggattaaataggaccctgaaagccccctcaggaaattagattctagataaytttattgattgartttgtatagtagaaaattcattttggaggaatcttaaggacaggcattattgtgcagttctgtggagcctgtgagtgatagatatgaaaggacacttagagaccctgagaagtgagtcacatccttaaagtgccagttatttagcagcagaaaaaagacgaaaagaattcaaacacccttatttccagctcacttatcttcccaatgccctgcactcacagattaattcattcactcacgtattcaaacgttattttactgtgcacataccactttctaagcactttggtagatgctagagacgcatgaatgaactaagcaaacatggcttgcttttgctgttgtacagtttgcaaacttttgggttctcttcagtaaatgactatcattaaattacaaaatttagtttgggaatacttgttttgatgatgaaggagatgtagatgaaaattaatatgattcgtttctatatattttcacaaattgatgattatgttgaggaatgagtatagagcaagttcatttttctcttattttttagattgatgaatgataaacagattcccatgaagtttctgaaaatctagtgatgggagcagagaagcatcttggagaaatgggcacagtgttgtaagggagtgatttgtaagttttaccacaaaatggaaaatcttgagttatgagtcaggaataagattcaatcaccaatccttaactgaaaattttcttcctccattaccaaaccttgtagttttaagagagtggttttttcttaaagtgaatcttagtaatgctataagctgttaaaaaaaaaaaaaaaaaaaaactaacaagatggatgttaaatactcattaccaattattttaacatcttgtagttcttccagctctacccagaccagatgtttagactccttcttatttataatgaagatmgctaataaattatgtctctcaataatgtttagagtgttagtgctcttcctaaatatgatttaatttcaaaatgggagtaaaggtaaaacaaaaaacaataaccaaaaagatcaaaaagaaaaccctgctaaactacaaatggcaagatcctgctagttatagtaagggatgaatttgttgagcagggcaagtttaaaatcataccatttgtggataaagttggccttttgtatcaaaatgtatwtctatgtgctagagacttcttgtgcctacttccttacactgcagtgtacacaagtataaaaaaggtactcttcagactgttaataatattaattgtgtgatacaataattatttaatggacagacaacaaatgaagagaaaaatagctatttggcatcatgtttaattagaattttgacgttaaaaaattctggatgctattcgcatttaaggtattatatgatttttaaaacaaaatattagcctctgataaaatctgttaaaattgaagttaggctggctttggcaaattgatatttgttggataattgataaatgctttgctcattaactggtctttgtttagctaaaggcagtataaacacatcagggaaagatgtattatttaatccttttgggttattttcttccttctgggtcttttcttatatttkctttcttccgtgttccccctctgtttaatttaaccctgattaaccctgattacacaagccctaacaactgggaaaaaatatggccaatatgaaaagtactcagaggcagaaataattaaaggcgtgcattacaaataaaatcaaaaggaattaagtttatttttagctcagacaactggaggctgaaagtggattaaaagtactattcaattaagtgatgtgtgtgtgtgtgtgtgtatttaggaggggttgttcatgattactcaatctacagaacaagaaagtgaagacagactattactagagcaaatgttactagtaattaagaagtattctattctttgggggatttgagaacgtcttccatttctaagttctgccgaatgtcatattttttatgagaatatgttggagattaatgagagcagccaataaggagagcaaatgaaagttaatagaagacagaatcaagttggttttaccagagtctgtagctgacagagagatgttaatgcattgaaatcattgagaatattatatagataagttaagagcaaccacgggacttctatgtcaagataccccgtgtataagctggtaagcacactgcttaataactgtctggttttgtacacagtccacaaaaatcttgattattgacttacttacatttttcttaccctaatacactattttacacacgtgcctcaaaattgttatttttatctgtgccctgattggttacacatacatagagtttctcccaatatttaactgcctttctacttcatccatcctccagtcacctgctccgaggttaccaagccggaatgcagcaagagcgtctgcagctgctacaattggtagaagtggcttcggcagatggttgctgaacaatgacccaccaaggactacagttgtagaagggagaggggagacgggtatcatatttcctccctgagatgtatagtgagtggtagtaattgcagtgaatccagctcactgtctcaacagcctctcacctgcaccgtctcctcccctgtcttataactggaccagcagttaaacagctgtatagccttgtctccctgtctcattttcccctgagctccatcagcaagagtagcaatagcagctggagaagcggcagccagagataggcagggctggtgcttgcagccgcgcaaatcgcctcctcctcaacacacacacacacacacacacacacacacacacacacacacacacacactgcacagacttccaatatcaacgcgtcttgacataaatcaaggactaagagagactgaagaagagcgttagtcatggacaacaggtatttcatctctgacaaattgtttccttcagctgcttactggtttggatgataaaataatcatttgtgatagctagcttgagtgggagtctggaggactgggggtggacgcgatagaggagcggggatgaagtgggaggagtgagaggtggggaagggggacgccaaagatgactttcaggctccggaaacctacgtctttcagcctccgctgttttttagttgcaaatgatcagagacgggtgaactgcaggcagcctgtgttgctgcctggaagtagatttccatctttcagacactagttccaatgggccgggtgttctggaagggggtggcagtggggaggaggatgctgtgagcagagttcttgaagctccactcctctggggaagccgagctgtgtgggagccttcttactgtgccgggagcgtgtgaattggaaaggatcctgagaactggctagtcccagttcctctccggaaaagcagtggctctcgcttcagagatgcgctcagctttcgcctgcatcacactgcagtaagttaaactggacatggttggcaaattgagtggcttctgggtgtgtggtgcgggggaagggaagctgggaagaaatgggkaggaaagttagagaagcatagctttgaattctccatgaaatgttaaatcggttcgtctccctgactcctgtcctagttatgctatagtaggggtgctctgtgatttgcaggcggatgccgcttgtgtattagctatgcagaaagtgccctgtccattgtgattttgggcaacataactgataaatgttttctaaatttaattccaagagtggtctcctgaaagttaccaatgagatagcagcttgtcttttcaaaatgtaattcataaagaggctggcttggactttcaaatgccctagttaattgttacaagttccagtccagatttattcctaatctgtgaactaaacaagcaagcaagcaaacaaaagtcttcgatttaccttattaaattaaaataaaacgtgaagtagktctctagataactgctaggcaacagcctaggccacactgatgatatrataaacattcaaatactcttcagtgggtgccacatggagggtcccctcagtttcttcctgctgcaataatctcctccacttgctgaacagtctcttkcttgtgattttaaagtggcratttttacatagatggctctatacttagaaaccaagcagcattgtgttcactggcagaaaatgaaggcttaaaacttttataaaacaacttcaactggttgctcaaattgcagataaccaactcttttaaaaacaggtcagcaaggaccagtccattgtaaagcaaatgaccaaataaacatgaatgcaagcagaatactgaaggtcttttctagaaaataaatcagaaataattaatgttaaaaatgttggggtacctaaccaggtcctcttgcattgaccagatttttacagtggtggtggggcagtggggggtgggggggggtggaaatccctcaaacagaaagsatatattacacaaaaatgttagacttagttggaggatcattggagaaaacactgtattagtacatttttctccaagaaaaattattgacaaaacagaaattacctaaaagagaatgtaagattttaatctggatacgtccataggctagcatatattccataggagaagaagcttcaaaatttgtgaaataacaattgtgaaaaacaaagtaattctgaaatcctctgtctttagaaaatgggtaaccaaggactactcttatcctataatttcagttttaaattgtgctactctttctctaatccaccaaatcttcatgcttttaccaaaaataaaacacgtcaagaatgtcattggaatagtcttggctaattttctactcatcacggggatctccaggtataaaggcttacttaatattttttggcattgttggagtgcccaatttgttataggcgatccatgccacacacatacatagtatccctgtgcataaagtctacatgtgaccttgtgaatcactgagtaaaatataatgcagggaatatatttgctacaatagtgcatacatgagggtggttaaaaatttttgacagcaatgagaaagaaaacgaaaagtctatatgaagaatagaagaatatggttggagcaaatttgcaagcagttccctaatactctagagtcaactattattacctgaaatctttatgtagctaaagaggaagaaaattaggttaagagcactgataaaaatttgacaaaatttttttaaatctagaaacttatgtagttggagttgagcggtggcaatgcctttgcttcatactttcttgtcctactggtaagcaaagctcaagttatgactgggaagattataaaaatcatttgtgtaataaaacaattatttaaattgttttaacaatttaaaaccattggtaagttttgctgggatagtgtctgaactagtatcctatgactgatgctttttcttgcacactattgaaagaacggagagttgtagtcagacaagccagatgaagatagctgctgatcgcgaaatctaattctgcctactgataacgactatgatgtgatctataggcttgaaatgacatttcaagatgatcctctcctggatgtttcttctggctgccttcaggaacagagctgtatttatatatgcacaatactgttgcagtattctctaaagagtagtacctctagccgaggagcacttgcccagagcaaactccaggaaaaatagtgaagaagcctattcctrttgcctctcttccagcaatagcattctctttctcttgtaaaacaccaacgcaaattctgatcaagtgagtcacatatgttatgtcccaataccatagtcaatatcttgggtatttactatgaagtaggttcaactacttgatagccctggattattttctcatgtgctttgttcgtcacacaacgaatgagtagtartgggcagttattttgagtgcagcagttgcacatactgtgtcaagagctttacatatgctctctcatttacatatgcccctcacaggagggagayggcattttctcccctttagaaaaaactcaaactcagggggaataaacaaatttctgaaagcaacgtatttagtgaatgctgggttagaatttaccactcgatgtgactaactctaattcttaactgctttgctacttaaaaaaaattaaaatggtactctactatggatcagggtggggttgagcatattattttgtggatgccgtgggtggatagtgcttgagagatcttccttctctgatgatacccaaaattggatccacctaaactggaatccacctgcattgaccccagatccaaagttggcacactcacgattccaatttcaggctttgctttggctacccaaactctgaaaatgaacatggggacatttccaggaaggaaatggaagataatgcagttaatatgagaggagaaaagttggaagatctaaacacagagaggtataaaaagaaaataagggaatcatatagtggaaggctggtccaaaaatatgtccacactctttgtcctgagggacactaaataacaaactctttggggtgtgtgtgtagggtagagatctttagtcacagataaagtgcagactcaaaacatctctttaaatagctgtaaagtcttattataaaaattagattatgctagtyatcagataatctcctttacatactctttttaaaagtggaaaaacaatgattcaaagacaagtggcggagaaaggccagatgctgactgaagaggtaaaagagtarttggacatatcgctgattcttgcacaatcactttctgaaaatttgccaggaagcaaaagccatctttaactggtgaggataaaaacaaaatggttcatttaggtaaaatgtgaagtgttacagagactaacatgattactgtcacttgtcttatcacagaagacaaacactaacaaagaataaagtgaaaatgttatgggcgtagagccaaacaatattttaagattggtctttctcagcatgctaaatttaaacagccgaaattcttttttaaggatattctgagtcaacaatttgaaatgaaggatttgccttttaacagggaatttgtattgcattgtaaacttgaaacacaatgtccccaactcagttatttttgattggcaatatgccgatcactatagattcaaggagcacaaaagctgttaccttcaaaatcagagaataaatggactcgctccataagcgaactggatgctcctgagctattgtcagatgtgtatgtggtgacagagctttgcaaatacattcacattgttggccctgattcattctcttgtcatttgtgacacttcaggttggggttgggaatagagttagttttcaggattgatttttgaatgtggtgctaaaatcagctctcttgctcattggctcccttcctcttctagtttaaaaataatgatagtaactttcattgagtgcttactacatggcatttgcctttataaatatcttgcatatttaatcttgatcatacccttatgggataattattatcctcattcccgttttataaaagagcaaactgaaggacaacagggttaagtgacttgtcacagttacaaactggtaggaatagagccggggtttgaacccaggcagtctagctctggagaccactcttctaaccaaaaggatctaaatccactattaaccacmactggcttattataaccctccacagttcgcacaatgttgcaccttctttgtctctgcttacatttggctctctgtaatttacttttggacacccaaactcctctgcccgctctccatgctaatgtgtttcatttgataatgtgtttttgtcctttaatctcctactctagtatcatgacactttgaggtatctagttggattctaccacgggcccaacagtctttctatatggttccactgaaacttgtgcttgcctttattattgaatatgccacagagaattgaaataatctgttttttacattgaggaaggggttcaaccttatttatctttggaagtttagtgcttaacacagtgtctaatataatattggagcttaataaacacttcttttaatgaactgtattacaggctctaattctatccgctgaaggaataggtagtcccacttccacaatattttgcctttgccccctgcccaccaaagactagagaactggctttcaaataaaaactatgatgtctgagagcaagtgtgtattttaataagtagaagtcatgattagtataaaattactcagaacacatttattaccttctgtggtgttacatatttagaatacgtggggcaatattttggaatatgatggataaaatatttatttccatatcacaaaattaaaatttttactgatacctattttctggtttcaggttattaacatagatttagggagggaaaaaaacccaaatrgtagaataagtggttcatcaaagatgttttgctcttgtgggacaatagtgtgaagttgtgaaaaggtgatttttaattgtttcttaaactcttatttccctttagaaaaaacacactgattttaattcaatcatagctcataaatagtgaatcatatctgcaagcagacattcaagacttcrctaccactagagaagagtaaagtgatggttgatggtgggaaattcaatccagaaaccctgtcctacaaattatcaggttatgtgataattaaaattctaattttaaattctaatttcaaattccatttttatacatttatttcatttagtattcaaatattgtatctatgtgaactgtataacacgtagggctttccaaatacaattttttttaaagtaccatcttaggtcaaactatcctattttagtcttctttctaatccacatgaatcagttatcaaataatcaggggaaggacagatgggatgagaaatgcgcagctatttaaaatgtctttagagttccatcaatagagtaatctcggaatgagtttcccccagtgaggcagctgggccatgctttataatacactttcttttagaatcccaagttgtgtattttgttctgattgttcataatgagatggaattgtgaataaggttatggagaagtcaactctatatataatttctcaatatgaaaagaagttttattgagtttcatcattttcttaggtttgatgatataggacttgaaacttactttctgcgttcaaactgtctggatgtaaaatccttactatttggatgaatttaagcaagtaacttaaattctatgctttagacttctccttgtaaaacaggaataatgaaaatacaagccatttcataaaattaaatgacgtaatcatgaatgtaaggggcttaaacagaatacacataataaacattaaaaaatattagctattatttccaacttacttggaatattgtctcagagaaaaagtatcagtagtaaagaaaatgttctaaatgaaatctaaatctaaaaatattycttagttttatattaataaaatatttattkwggctacaaaatttattaaatattattataaacactttgtaagatttcattacttaccgttgtgccccaaatattcttattaaaatataaaaagaggtaactattaacatagataagttaaacaacacacataaactacccagaagaacatctggcatgcaattaatcctcagaaattttaactccctttcccttacctaaaatgatgaggaaaggtctttcattctttctcctctgatcttctgaaaacatagtcatarctatcatcctttaatatacaaaaggatattctgttttgctttatattggctactctgctatttgtacctaagcatgttggggaaatatgatctctgatgtgaggaaacctattagtttctagatcaaactccctttggattatatgaactggaaaggaagaagaaacagaggtgctatagaaaagcatgacaagatccttgacctgaaaacaaaacttcacgcagaaaagatgagtttgtagtttattcagtaacttgttttgctgagacagaaaatataaggaagtgtttcttgtttggctcttgaccaatgaatctgtttgttggttccttaatgaaaagaaataagggctggagaattctcacttgtcttgccttccctagtgtgtatggagattgtcagtcatactcagctagttctgggaagtctaagattcatatagagatawgaaaactatcccttaggagacagaagtacttacttataccacggtcctgtatcctattcatcctttagtcaytgacgggctactctgtgtcaagcattctgccaggatcggtgaaagaagaggaatggatggaaaagttcctacagtactaaaggttgcactttggtgaaagacggatatgaacagacctaaacaaggaaacaagtccatgatttgctgttgtaatagtgctgtgaaaggaacaaagagctgatgtttagatgagcagaagatcctatttgcataataggaataatataattaataggagaacaagctggtttcaggaggcataaggaccactcctgccccacctgcaaacctccattatgtttttttcattgtagacctggtctgtcttgttgacagtgagtataacaggtggcagtgagtagaagaggcttatacacctgaagcaatttttaagactaaaacagatgaactcacagtgaatcagaattttagaattattaaacaaaacattttcattcagtcaaaaacataactcccacattgcttttcctgttacctgtatattataggattattctgctttggacagcttttaaagattagaaaaatgcaagtacttaatgttgcttagtaacttctcttgcctgtcattttgggctgcacataaacaacctgtaacttcctcacacttgtcccacatagaaaaacagcacaaaaagctgatgagtcattttgctatcatgttgttcttcatgagaattctgatcactaggaggggtgctctattgttatataatgttgtttgtcatgatatatrttagaagtttctatttggcaaatagagatttcttctttgttacacattaaagataacatagcataaaagccatttatgggaggactgttgttttgggtgtctggctttgaatgtactctatccaaactactagaccacatattctgaaagtgaagtgataaggcttttgagcttcaagtggaaattttgttttagagctattaatgctttttttgtccaaggtacctgcataactgcatggtggtacatttggtgcttaggcaactatattatcaaaaagataatatcaaaagtgaaagagcactttcagtaaacaaaacaaaacaatggcttgaatgtggctgtaattatattgctattctttatggctaggcaatgtcctgaattagtgactttgtagaaaacaaaacacaagaagaatatgttagatttgatgtatttgtcaatatatagcaatgccatattgataaaaaatttttctccactaagaagtttcaaagctacattaaagaaattagcgcctgtgtcttatcaccatggagcatcctgatcaaagagaaggtgccatcctctctggttctctaatatgcgttttgctkatcctcatgagttaaaattcaaactatgttaagarataaagaaagactgtttgaggaatgctaatacgtatgttaaaagaggaaaagagaaagacatcttccttatttaaatattaaataaagttgaacagttttttattttaggaacttcttatagtccttcacatgagaatcggcatctctaaaacaggatttagtataaacttccctggccttatttaaccacagaatccctccttctgggagcatctattaatatatatttggaaaccctggagcacattttaggaagtactggtctattggcatttaaatgttcacttaaaatttttgagcacctaccatacatcagagtagtaggttctggaaaaaaaaacttatgaacagaacccgattttgacattatggagatcctatactgggatttggaggaagacacatgtataaattataataccatgggctatgtgcagttgtagaagtaggcacatgttgctataggagatggggagaacaagagactcaggaattaatcacagataatttagaatttgagttagatcttgagggaagaatagaaatttactcaagaggggaaaataaaagcaattctcaagatatacctagaaatcattattcttttatcctcctgtgaaaacgagtatttctttcatttattcaagtgtaattctagagtgaacagttggctatatgattaaagagataacggcaacgaactaggaaagagatataaaaatttggtggcatagatggggaatgaagtcttggcatcgctacaaatccctgggaagagaacgtagagtgaaaaaggaggtaattttaggaacaaatcttgacatatcctaatacttttaaagtgcattggaatagaagagtttgcaaagaatgaaaacaatttgttatagaggaagaaaacagcaacagaaacctggaatgttctaaagaccaggaaaaaacgtcttttaaggatgacaaagtaatcatcactgttggatgttgctgagaggttaattgagatgagaactaaaacatactcattggatttgaacactggaagatcactggtgattatagctaaacatgtattgctggagtgatgaggggtgaaacccagacaaaaacttgttgagtgagtaggagttcaggaaatggagacagagtgactcattcaaagagttaatctatgaaggtttaaagaaaggtagagctgtttctggagaataatagaagtttgaaacagcttttatgtttctgaattgggaatttttgattatgtttaaatatctacgaaaagtgtatatacacatatatacatatatacatacatctatatatgtatgtatatayacacacacatatgtgtgtgtatatatacacatagatatgtatatgcgtacatatatacatatacatatgtgtatacacacacacacacacacacacatatatatatatggtattagttgactttgaccagaatgtacactgcctataaagaaaaagcagagaaaagaaagaatataacaatttgaacaggtatttaggttttatagtcataagttagggatatttctggattttaaattttctctgtagagtttgaacaaggtggagaaaatttgaagtttatggataaaattagacaggttttggaccagagtcatgtactatgatctaggttgtattgtgggggcaggtggagatggatatttgacaagataatcatgaatttataatgataacaatttaccttaatgtgtaaatttattcatatgtatttatatatacacatttatttatatgtaaatatatatgtatatgtttttcattttgccttgattacattaccaccatctacccctcagtgtcatctattatcttccttattactctttctgatttagaggtctgtatggcaattttcctttatttatacctcttgtcatcgttaggattggttagagtacataggtaaggtaagtcaattatccttggcagaaatcccttaatcgccttaccttcgctgacattctacttctttccacgttatccactgggcattgcctccattctggatcttggtattacctggaacttctccactttgaaatcatgagatacactaagtgataacattgctctctcttcctcccaycaatatccagtagcttgacccacctcattttcttccatgacttttttctcattctcccttctcttactgtccaaagaagacctagtatacaatataaatagctctattgcacaaatctttattttcctgtattactcttttccttcctttttctgtctggcaaaatccttaccctttctcaatggctttgcattttcaattggggtattgaatgctattgaaaatcacaaaactatgaaaactggtgtcataataagtctatgatctctcatctcagtctgaccctggtaattcttctaaatgtccatgttttatttttcttttcactgtccacagcagttttcttacagagccctgccacccaggtacttcatattttcttatgaaaagagagataagtattttgacttcttctttgtgtcatttatttttattttgggtactagcattgaggcatttgaattaaatttggattttaatttaaaaatcattaatatcctcaatgacgttaaccctacttctctctactcacaaccttctctgtatcccttgcttttacgcaaagcttcataacatggtccctctttatctcttcagcaatacctattgtcactttgttctcttccaatctaatgttcctttgacattaagctgcttaaagtattcattctttcagtgctgcttttccgctttacttgcactcctattgtgtctctggttctttgtttttytccagtggtttgaacattgcctggcataaaacaggtacctaaaaagcactgaataagtaggtgaactctgataatgcccctttcttgattagggatgatgagttatctcataaagcatctctctgggtcaacagtgtttttatcgttttgtctacgttattaaagaggtaagtgactatcttcttcattctctgaaatgcactatattgtagtatatatagagtttggtactattagcggtttcgcgcatctacttggtgctttggaacgtattccctgtggataaggtgggagtactggtacctcctcttggtccatttatcagtatggtttgtactgatgctgaacaagtacctgtacgttaccatattttcctctcttttatgtttaacagtaatacttatattttcttgttctggagataatactcaataatgttattctattttgagagaatgaaattatttttaattcgactaagtgtagtcattggagctttctttaatcaatttcagaagcgtaagttagatttagggatttttttttttttcatttgtggcattctgtgaattggtcatgggtattcagattgtgaacctggatataaagaggagggatgaacgttattttcggtgtctgacaagaacaagcatggagtctttgaggtcttataggaagtaaacagaagtctaagaggtcacacacgtgaggagaataggtgattagccggtgtattttccccagtgctatgtcaytttctcggagtctcatttaaaggataatatgcccacagtaacagaaagaaratgtttttctcagacacatcccatatttactatatgaagtgtggagaaatgcttattaaagatttttgtcatgatttccaggttcagttcaggagtgggtggtcacttgtgctaggacttcatttcttacagccctatccccacatcatttttccayggaagtaaatattatctaatgagataagcgaaggcatgttagaggaaaagcatgatttatagcaaactgtagcttcaaatggatttatccatagtagtatactagtctattttgcaagtgtacatttctcatctatcaaaaatcatgctatttagcttcagaaatcataaaatgagattgtccctggaataacttttaaatatctggcatttctttcctatgtaattttacgtaagctatataaatagggttagctgtgacctaaaaaatatactcagtcattttgtctggaacacaatatagcatgtgccctcattaattttatctgtgggatttttaatggtataactttgcaagataatgaaaactgtatggaatgaaaagactctcagactgaggaatatcattagattttatgattaggtaaattctgacaagttgatgcattttttaatgcatacatgttttacttttcctctttttcattgtttttatacatcacccaaaggggttaatgtatttctgtattatatttatcccaggccaatcagaaaaataattgaaaaacttattttgactttgcagaaatacttccttgacaggtctgggttaaaaattatgtctacttctatcaagtcaaagttgtccctatcttatgctgttcagattccaattccatactttttgtttttgtcagtttggagtggaattttatgtctttattttaggactcttttcctttccatttctactttagattgcttagagattgaatataaactattgatccctatgaaactttttttttcttttacaatgagaaaaactttggtggtctgttactattcaaggattatttattctttgctagctggatacacaacttcagtttcccaaaccaagcagtgatttgtgagatgagcttcctctcccatctcccatctccttttcaagtgggttttttggtgggccataaccaggcctactacactggaagtttagatggtctaagaaagcactaagaaataaaatgcagaggtgtttatctgaaatgccacaagaagctcccctaaaggggctagccctttagtcctgacacaacctcccattcagatgattataagagatcaaattcccatattctgcactttgctgactgagaggattgctccctctacatggaatgctggtagagctgaactttggatatgcccttgtgtggaataaaataaagcctcagggagcatctattcacttgcattcttaatcttgtgtttattcttcacaaggataatttgctgatatgatagtaaatcaaagtgaatgctaaacatagctgagtcatggtcctcattcttgccaatgctggaacctgaacagcctttttattctgaccagcgtagagtcttttgtggactgrctcctgcacttctagctgcttttttaataatgtaattaacatttcctggctgctacaatccatggtgttactcttttacccagagtcaaacacccagatgcaagctacaaagtccagctaagagttttcaaaatcattaaacttagaaaattatgacaggccaggaaatattacacttaccaaatccttatgtacttatacttcccaatttcaatatttaaataagaagcttcaaacactacctaaatgtagccaactttgaaacttaatttcacaacaatgttctaccctgacaattttcagatatacaaaaccttctttacacaaagatgaaagtgaaggaatagaaccaagggaaactttgaagaattaacaaatattctcttttagattgctcagtcttttattggtattccagtttcactttgcttttaaatctaccagtggcattttattttccttacactaacaaataagtaagggggatatcatttatattttcgctgtaaagtctgaaatgcaacatgaaatgtaatgtattctaagcaatgatcaatcctcacaactttccgatgtacggctccttattcacacaaagaggaaaatgaagagggacaatcctttaggatttaagatgcccagtaaggaagaggactttttaagtatgtgtgagaggggtatggctatgtttgtgcaggaaatttcaacactggtgtatggaatgaaaagaaccsgtgtgtttagaatagtatctactgtatcatgcctacctttggagcctctgtctctgtgcctcccactacttccttagccattaccatctgctatcagtatgcatcatacttaaattggctttgaaatgatttgataacttcctaattattaaatatattttccttctaccagttcttgtctttcttgcatttcctgtttttactagatttacaccttgttgcaactctgtcctcctttgtcattggtaagattgcactaccctgatattatttctacttattcaagcagccaaaaagcatttaataactcccattcaacaggtattgggaaaacaatggtaattaaacacataagaagtttatgtctccattgagttttcagtgtagygacagtgattgatattatctgtgacgtaatttcacaaatatattttgagcagctacttgatgccaggtgctgttctagacatcggaaatgcagttttaaagtagcatattttaaaattttcattttcttggagaagatagagagtaaaaattaaatatatgatacaattttatatatatgtcatgaagaaaataagtcagggcaagaggaacaagagtgatggagagtgggtgctgttttaattaatgtgctattttagatttatttttaaaatgtgttccattcctctatcgacataatatatttgaaatgtctctaagatctccaagtgatgatgttaagtagacagtggttatatgaggctgaaattaaggggagttgttggagacaaaaatctgggagttgtttgtagacctgtaaccagaagagaccccttagggactgagtgtacacagagaagaaggtccaatgctaagccttggagtaaaccaatttttttgcaatagagaagaggtagagaaatctgcagagtaattaagaaggaacaggaagagaaagccaagagaacgcactgcctctgctgccaagaaaggaaacgtttcaagaagaaagagctgtgtcaattgttgctgagaagatcagcaagatgattgcagatcaactacaggattgggaaagatggatctttgctggccttttaaaggggaatttcagtggtgtggtggagcaaaagcctgattgaggcaggtaaagtgtgaattgttggtgttaaagtggagagaaaacatatataataaccacacaaataaacaggaaatcacaccagaaatcttttaaatatgacactattatctgacctagtcaagagaatytgaaaggctttttgaagaaataattataaattgcgatttgaaggatgagtccgtattaacgagataataaagagaatgcagaaaagcatgtaaaaaggctttattgcaaggctgacttaagagctagaagtccattttggctggagtgggtatgataggagattaagcaggagtcagatggcgcaaggctgttttatctttaaccttagaacattggaaataattgaggatttaagggaggtgaggatatgtggacagcataatttatgtttcgatgggattactctagctgcaatgtgctggatgaactgcaggtgggccagatggaaggtggtagccagccagctattgtggtaataaaggtgagtgattattttagcccagattactgcagtaatggtgtcaacggtgagaaagagaaattgtagtgatatttatgaagtgaaattgacaagacttgtgatagtctgaaattagtatatgaggaaatgatgtagaaaagtcaagagtggcctttagccttctggtatttgcaacaggggagccagtgccttgtaccatttgagagagagagttcgagcaggagtctttggtttgctgttatttttgtgtctcatgaattcagtttaaacatgttgaatatgaaggacttttgagccgtcctcatctcctactagatttttctgtgtatgtatcttgctgtcacctcaagaatagtatcaaaactgagcttatctgcatccttccaaacacttcttcccatgttcagatctccgtcagcttgaaatggtccctctttctagtaacctcccagcttccatattggctaattgaaattctatcttttaatcttttctgtctctgttgcctctcacatttgtccttttctttcaatttctgcccgtactagacaattacaaactcttacatttcactcaactgtattcttaacttgctatatggtcttttcattttyaatccattcttgcttaatacttgtattccatcctcctcactatcaattttcttgtatagggttttgattttcccatgttcttgctcaaaataattcagtagatccttcctttatttttttctaaattagccgtagattcaccttggcctggcattcaagcaaaaagaaaaaaaattctgtagatttagcttgctacaattgtttagcacagtgattaagaactacttggtttaaatcctgactttagcacttactagttgtctgrttttcattaaatcatttaatcacaatgttcagtttttcaaatgggattaataatagcaactcatttaaatgattgttttaaggcctaaatccatggaattatcttagcacagtccatggtacaaaattaccatcaattgacgcaagtcctattattattctattaataatagaataatttttaactgtgccccatccatgtatgtaggcacgtttaatcgcttaatgaagcacaccttttattttatctctatgtgccactgtacactccttgcattctccttcttctctcatagcagttgaccctcctcacgagtttcttcctgtctaatttcttccatctttccaggagcagctctattctcactctctccaagaaacattgctttctctcccaaccttttcttcatccacaactccaggttctgttattccacctttgtatgtattttgatgttaatcttgtttgcctcctatatgtctgtagctttcttagatcttctgctacatggttgtccttgagtgcaggaaatttatttgtgtagtgcccatagttwtacaatatttgagaataagtgattgcagtgttagcaatcccttcagttacatgtagatattctctcctttccttcctacacagactgattttggctctactcatcattcaaggaacatcaagttacctcgctcagatgtttcttaaaaataggagctttcaagtcagcaatcgtctaaaccaatcaaggctaatgcatttttctgtgctcccaggaagtctaagagcatttcaactaagcccttctgtcagtgatgggcctgcttttgcgttctaaagtccttagttttttgttgtttttcattttctctgagttttacgtgatttaaggaaagcaggcttaggagaaatcatgaggttaatattgtttcactcagagatatctaatcattggcttcttaacaaaaagtggcatgaaagagaatatttagtatcttttctgtttcctacctaatttcctctggtctaaattctgacaatggcctttggagcatgagttgccgttttgtaggatgttctaaaacatgaatcaggattgattcttattttattcatggctatacttggtggtaatttacagagcctgagatgagggtttatttttcccctctgaaggtttcagggatgtttttgtcaggatttggaaaatgtgctcaaggagcagagtgataaattgagtgctgcctcagaaaaagtcaggctgtcagggaasatatttatctccatgtttgggaagcagagcaggagaagtacagatattttaaaaagctgtgtgaaaaccttccaaggtaagggacaaggtcaatcttccatggcttcctatccattttatttataactaaaggctgcctggaaataaagaatgaactgaaattcacaatcattcaaggatggaccttttctttttttcctgtaatactgagggaaaatggatagttaaatggttccgtttcaataatggatatagtataagagaaataaataattatattaaaaattctctcagtgttgcctagaacaagggtctgattgtatttgtaaataaagttttattggaacatggctgaattctttcgtttgcatatttttagggctgcttttgcactgcaacaacagagatcactagttgcaacagagacctattggcccacaaactctaaaatattttctacctggtactgtaagaaaaagttaattgaccacaggcctagaaggacaccttaagattcagagatgtttattccttttggctcactttgttttctataatgacattaatacaaagttggctgtcactgtgataagtgacggaatggtgatggaagcacctatttattaattggtggtcttattctactaatccacttgtttgttgggtatcattgggtttagaacagggataaaagtgaaaagaaaaaaatgtatatgtgcttctttcactacagcatttgttatgaccttagttaaatgtggcacataattaggtattatttgcagagctcctgaatccacttatgtgtgcaaaatgccaattaagcctttaggttcaggtttcttcttttcataaaggttccgaaaaagggactctcaaatttgttcaaaagtatgaatagtcacagtggttaatacaaaaccacatggctctgagtgtacactccagcttgcagctatctcaatctccatacaactaactctatcatctctatatctctatctctatgtatatatgtgtgtattctcccactttaatatttattttaaaaagctagaaaatttgatttcattcaatatattctagatctacatattttgtgttacaatgtgcatttgtttgtgtttcactggcattcagtgatagtcatttaatcaaacattaccactgtgctccatcccaaaggggagcaaaatggcttgcttcctaattttattgaggcttcatactttaggggaagatagacccttaaaactttgcaaacaaatatataggtatatattgtatatgtgtatacatatatgtatatatgtaaaatgtataagtaaattacaaatctaagttaggcaaagacaacaaaggaggaggagaaaatatatcccagaaaatatctttatacattcatgattacaaccaagtactccactgtaataatgctacattttttctggaaagcatgctttcatgtcatcagaaatgacacaacttttctattcttcttaaatcttcagccattaccttttaccctactctcagatagccatattccatatttcatatagaaatataaatgaataatatgtcaaaagatacctgcactcctgtgtttattgcagcactatttaaaatagcaaagatatcaacctaagtgtccatcagcagatgagataaataagcagataagatagggtaagataagataagataagataaagaaaatgtggcatatatayacaatgtagtaccattcagccacaaaaaagaatgaaatcatgtattctgcagcaacatagatggaactgaaggttattatcttgagcaaaacaagccagacatggaaaggaaaatattgcatactcttactcataagtgggtgctaaaaactgtgcacatgggtataaacagtggaatgatagacaatagagactcagaagggagaagggatgggaagaggatgaaggatgataaattatgaatgggtcaatatatgttgttctggtgattggtacaccaaaagctctgacttgaccactacacaatctatgcatgtaacaaaattgcacttgtattgcaaaaatttacttaaataagaaaaagaaagtagaagttcaaacattaaaacaaacaaacaaaaaacaatactacctactaatctataatcctacctcatccctactctctctccttttactattgtgagcaaagaagatatggtccttgtgtgaaatccaagactctggtataaactctgactgtcaaagactgcccttttgtggactacatccttcaggtattcattctctccctctttctttttctcttatcctcgatttctctttcagactcccaaatatatccatatttactttctcacttttttaactccaaattttcctactctctattaatctttttgagaccatgaaaatctcttgcctgggaatgttctgttgaagtagaatttttttttaagttaaaaatataacttacataaaaaatacaaaataagcttatttcaaatatgttatttggctcattccttagtaaaggaactagtaaaatagcaggactgattmaaaaaaattaagagatgtgagatttatagagttgaacagttaaaggaatgcagaaacaaatttgccaaaagttactagagtggttaatggtgtacaaggcaatatatactaacctttaggttatggtataaaagtcatttgtttttcttttggacaaaagttatttaaatttttctgaaagaagaatcattagcatttcactcagtcttctacaggttaactacggctcttaaagagttcaacatattcaggtcaatagtaaataggaagttgaagaaaggtacacaaccctacaaaatcagaaatctgcaccacagtgttcctggtacaaaacaactagcattctacacacataatacctagcaatcattttgcctatttcctaaagttaataaatgtttatgacttaattgttctgcatacactcttaattcccaatttactcttgagaaaatggcaagaatgttcttttggcaattttgttatatagaaatttaaaatatcttggaaaagttatcttaataaaaatcaaaagcaaatgacttgttgagagaaaatacttgttgtcataataggcaaagggttaatttccctagtgttcaaggwtgtactaaaawtgcttcaaaaatggtgacaggactatggaaataattcaacagaataagagcaatcaatttatagaggtgactctaatggccaaatatgtgaaaagatgctcaacttcaataatagtcattgaactgaagtaatgatcacaataccaacaacaacattataagccaaagttctctcatcagattggcaaaattttaaaacatttggtagcatctagtctggcaatggtgtaaggaaatggtttcttataaattgtcataactctgtaaattactgtaaaatattagaaatatattttatcataacttattaaaattcaaatttcctataatctttggcctaacagcctcattgttatttatttattcaataaaatagacacttgaatagaaagacatatgacaaggaatttttattgaagccttgtttactgtaacataaaactggaaacgagcaaataaacataagtaggaatatggttgaattagtagcaaaacattattccctatatattatgtagttgtataagcaaatataaatctatacactaagttttaatggtgattaaattaaagttacgagcttggtatgaggctcctagagacgtcgttagttttgatacttaagcattttgttaaaaagagcataaacttcacaattatagctacgaataattakaagttattatacattattgtatctcagcttccctgctcaaagtcttgaggggcttcttatggcatgaggatgcaatccaaacctcttccatttgtaagttccttgcaattcaactagctattgttccaacttgatcttgagtaactagcaatccattgcttcatctagaaacaatatgcaacttttatttgctttatttatttatttatttgagatggagtctcactctgttgccaaggctggagtgcaatggcacggtcttggctcagagcaacctacgcctcccaggttcaagcaattcttctacctcagcctcccgagtagctgggactacaggtgtatgccaccatacctggctaatttttgtatttttagtagagacagggtttcaccatgttgtccaggctggtcctgaactcctggccttgtgatccgcctgccttggcctcccaaaatactgatgaacttttattttattttgaaagaatgcaactctttcttaccttagaacctgccctttcctgactcactacctctggctggatccactttttccatattctgctacttccctttaaatgtcactttcctgaaattaccactttgatccttcaactgaaattatttcccccagttatgaattctcatraggattcttagggacacagttttttaaatagaaaccaaattgtcatcttgtgaggctgagaaatgctaagtaataggaagattttgagtatgctgggcatgatgaactagaaattatatataattttttaaaactagattcctattatgagagaaaacaagaatcagacatacaattgtcatttattagtcattttgcacagtttctggattatttcactttaagagaattttaacttgtcatacaaaagtcttataaggaaagattctttcagcattgaggtattttaccatggagaagaatgaatggcttgttgattattcttcccaactaaagggactgttactacgaatgtttttgttgggtcaaagaaaagggttttacaagtttgtgtactaacagaaatattaaagatcacagggagatacttggggcttcatagccttaggtcatttcagatattttaaaaaagtttctgccactcaggttagtaccttttaaagacataaatatttacatagaaagcaagttttactttaagagagcctgacaagataacgtatgaaatagccaaataacctgaaagaaaagcaaagtgtttttttatatttaaagagcaaactcacatctgaagtgatagaaacagtcgttcaaatgatacaactgatcctgaccgcattcatttactgaatgcaaagcatggaagtttaccatattaaatatttttttagatagactgggctccctaacatagacaaatcaggaatctaaacagaatattctatacctcaggtcatgaatattttgaaatacactaaagtagattatttttatttgtcattatttgagaagaactactttaccttaatctgtgaatcattgtcttgatatacattagttctttgctaaaacaaatatatcaaggatctgtgtgacattttcctctgtctagtaacaagaccatgagtatttaatttactataacataaaagcatgtgtttttgagcaccaaaatataacaatttatagagctataaaatttattttggtagtgatgtttaaatagatattgatgacttttgatatgaagtagaatggccggcagatcttgtaacctatagcctatatgctaaaacatatgcaagatttgcaatggattcaatagaaggaaagaaaaattagtttgtgagatgttttaataaatcacatgatataaataataaatatttaagtctttggttttttttttttgtttttttttttttgttttttgagacggagtctcacgctgttgcccaggctggagggcagtggcccaatctcggctcactgcaagctccgcctcccgggttcacgccattctcctgcctcagcctcccgagtagctgggactacaggygcccgccactacgcccagctaattttgtttttgtattcttagtagagacggggtttcaccatgttagccaggatggtctccatttcctgaccttgtgatccacctgcctcagcctcccaaaatgctgggattacaggtgtgagccacggtgcctggccaactctttgatatttttaatacccamataaaattatagtttataagtgactcttcacctactttcgaattatggagtgaaatgtatagtcacataagtgctctggctgctgacagtcttttaaagctatgatgcagagacattagaacaattgcaaaagagaaagataaagccgtcagtaaaaattttactctacatttccatttgtgaatgcagataaaatcaaaaggtggatgtaaaaactattgttaacttgtgaattattattgccatgaatattttcttgccaacttggtttatagatttatatgtgcaagggtaatacacagataatttttgtggacaggctctatttgtttatgtacrtatttcactgataaaatgctgttggcttttttttttttctgttttggggcaatcctaaagtcaccataagwtcgatgaattaaaagtgtctatatttgtccttctataagaattattgtcacaaatagagattctttatttgaacaaatacataaaaattggcactaaagatataaaaaatttataacatgataatcactccctcaaagctgggagtttgatttaatttttctatatacgatttttcctaatagcaagtcagtatattttcaaaagcttcaaggaattattgtttgtggaacttagcattgtgaagaattatttatttcttggtaaaaggttaaaatttgaagtcaacttggtaaataaacattcctcaagcatttatcacaagctcagttttctgcagaacatttgaaaacagaggttataagttataaaccatttatttacgcaaacctcacagggtgatggaaatgcaatgccagaggggtcacccaaaataaaatttttctttacttttctttctgttttttgttttttgagacaaagtttcgctatttttccccgggctggagtgcaatggcgctatctcagctcactgcaacctctgcctcctgggttcaagggattctcctgcctcagcttcctgggtagctgggattacaggcatgtgccacaacacttggctaattttttattttcagtagagacggggtttctccatgttggtcaggctagtctcaaactcctgacctcaggtgatccgccagcctcagcctcccaaagtgctgggattacaggcatgagccaccacacccggccataaaatttttcaaaaggatatttaagtaagaatgagaccaaaaatttggccagctctcagcaatcgtataatagggggtaaaccacatgtgaattctgaattctctgagattaaaaagagagacaacatgtggtatatagttataaaacttccctagcatctcagcattgttatatgagaaaaaagttctcgattaactgtggttatatgagttcttttatgtattttccacatatttagtgcttcttcgtagcactaaacacagttttagcacataaaatgtgcaagatattgaaatcacaggcatggtctaatttttcttttctgtaaacagaatttggaggatattgctaatcttgtttagtaaacaacatataagaaaagtaatttgraatataggttatttataatttgattcaactgaatacaaatatttacactgaatgtatgataattttgctaggcacaatatacttttaacatactttgcctagttagttgaggaggtatatagaattttgagtctatgtcattgattgacaatatgtagcatcagatgattgagtctcaacatcagttgtacagctaacgagtccaggaaagcaaccaagttgcatgagctgaatttgatgctacttgtaaaaacaacaatataaaacttacaccatagaactcatagtaaataagcaacaaaatctaagaaacctaagaagtttaggaaagttgattgagtgctagcttgatcagtaaccaagttgatgctgcaaaggcgagctccaaagtgaggcttagcccgcgagtgttgttggccttgcccaggaaagaattcaaaggcaagccagaggcagaagaaaacagctttactcaacaggcagtgttatgtttgtggccttgttacrgctctgtgcctgctcctgcagagcagggctaccccttaggcagagagtagcagctcactgtagttttgcagtcatatttatatctcctttaattacatgtagattagaggctgtttatgcagaaatttttttaaaaggggtagtaacttttgggtcgttgtgtcactgccatagaaaaaggcagtaactccctggtgttgccatggcaatggtaaacagacatggcacactggtgggcatgtcttatggaaagctgcttccactccgccctgttttagctagtcctcaatttgatacggtgtccaaaccctgcctctggagtggagtcctgcctcctacctcaaaggcagaaatgtagacaggatagtgataaaggtcttattttttacctgaataatgctcaaccgtgtaaggagatgatttccttttatcccaagagtgtccaatcttttggctcccctgggccacattggaagaagaattgtcttgggccacacataaaatacaactaacactaatgacagctgatgaaccacaacgacacaaaaatcacaaaaaaaaaacctcataatgttttaagaaagtttacaaatttgtgttgggccacaaccaaaactgtcctgggccacatgtggcccaacgtgggttagaaaagcttgttttatcctaatctgttcactgggattaaaatgtcacaggcacacaaatatgcaacgtgttcaacatgtacacacttattaattttcatgaatttcataatgatcttcactgataattactgagcaagaagatcaacagtagtcctaacagttttgcgttatctacttttaccaataaataaacaaaggtgaaagcaaaagacattatattatgcttgacacaggcattcttatttcacaatgttgcaaattggtatatttcagattatagtgtttaattacctatgtggcttaattttttaaaaaagcatggtgactcctraaaagtgaatgattaaagtactcccagattttaagttacaagcaggtagaagcagcagaattttgtttttgaattaaacaaaatagcattcggcagtcaacgaggatgttagaaacagccaggtggcaaataaatatagaggtatgaaacttattttgtttgtagtttatagagacagcttcatttcttcataatcatttatcttactgtgatattgatcaaactgatcagttattgttattgttattattattattattttggtattctccctatggctttcaggggaattcatcttagctccatcacatctatttagtggtacaccaaacttctccctaaacaatgggtatttttttctcacagaagaaaaactccttaccatgtaaaggcccttgtggaattatgtaaaatatctagctgtttaattcttttktacttccccgttacgctagcaaaataaaaaagagtttgggaagggaagatactgtaaagctgttttttcctacttcttttggaaaaccaacttgaatatttacatgcaggggactatgtgatctaaaactttatattgtatctactaataaatctgtgtgggggaattgatttggaataatgcctagaagatcggcatataattttgttgcagttcttgcttttttcagttgttcctgtaaaaagcagtatttcagatggctttaatcttttatagcaatattcccccacttcttttattattgtttttccatacagaggaaacatattaactaccccatttatatatagatatgtgtgtgtgtgtgtatatccttctatatatagaaaaagagagagagagaaaattatatgatatgtgctttgtaaaatattgtagtggacttwcctcactataatctcgtaagattttgtagatacaaaaattgggattctcatagattatgttcatctgataatattaatacaaatgaatgaaaactatacattaatgttagtggattaatctgaaatgtggaaaatgcatgctgtttccaatgctaagctatcaactaacttgtctctctaaaaatcgtatttttgtaaatgtatgtctgcttaaattatcaatcagttcaagtgtggtttagtaactcctaattaaagaaaagtgagaaaggcagccaaagagcctgagacttaccagagaatatcaggctctgaatttgtacgtattttaaaacaagtttctcaaggaaatgtttgtccttgtgtatgtgtaagtggtgctgctagataactgagtacatcccttcttcatcttcaactggagaaactcaacctttgtttgatacataggtgtactggtagaattttatttaaagacagattactgttactaaaaatgttttaaaattagtactgcatattatttgtttcattgttagtaatacagcattctatttttatgttttgattaataagattgttattccatattttataccaactgcttatgtaatattttacaaagaggataccaatgtaatacatacagccattactaaattctaactattatatttatttttagaaactgaatacttttaaaataattttcacttaattcagacttttggcaatcgtgaatctataattttggaatataagggcaactttgctagaaacagtggactcaaagttaactataaattgttgtgtatgtacatattattgaaaaaygtgcatacatatgtatgtgtatatatatatagtatatgtaaacttctataataagaagttaatggagattaggttggtaatatttatctttattcttttgatttgaatctttttccaccaaaattatagatacattgttcaaaataaaaatctaatgttcctgaatttctatagtttgttatacttgagtaaatttctaaacttatagcagccttattatcttcctgccttatatctttactctgtgatcagaatatagaaaaattaaattccatgttttaagacgttttcagttatggtactattaaacaggctattatcatgattaagaacaaaatatgaaaatgcctatttgtcttttatacatgaacaagtaaaaatgggctaaactaagtgagtatttgaatgcaagaccacagaaagtgtaatagaaagggrtgctagccccattgaccttatgtcaagaaagttattaccagacaagaacttcccaaagataaaaagttattcctgagaagtttaacgaacattcatgaaaattctatttctcagccaggatgccttttgataacaaaatattttagggtagtttgaatttcccattacctaagtcaattattgtagattattttcgtttctggttactttttagaacttacactttggcatcggaggcaagggattacattttaatgtgttatgattatcattaaatatttgtgttcttactctcttgattatcaaataaaatgttgaattcttagctccttttgtattggctctgatttttaaattggaaaatctttttaaattggaaaatattaaagctttatgaaatatattatatacattataaatataaattatattatatacatatatgttacataaacaatcaaatttagaattttaggaagcaggtcccctttcccagaatccaagagtgaagctacaagagtgtccttgagtaaagaaaccttgaggccrcacagtatctaatgtctgtgaaacaagctttgatttcagaatttttgcaacaacttagtttctttaaacagtgagtataatggtgtcactgtgctttataaacattcaccaaaatactacattattcgtttaaccaaaatttatccagtatctaccttaaataggacctacgttaagcayagagagtgcatataacataaggcagaaacttagctgtgaagttactttctgtaaattctgcaattctagagcaggtgttgacaaatagttttcatcacatatgccaacatcagtcaaccggtagtatttgcctatagtgtgctctgcggagatcctgagtctgctgcctctggaatcatcagcaaaatgttttaatcatttatttgtgattgttgctagtggtagcaggtatagcgtatgtttgttattcctgttctgccgctcttatttagaaataacatttcattggagaaattggtgtcatttataagttgcatatttacgcaatgagaaatatgaacagattaatatatgacaggttcttattaaaccctagagatgacttatgatgcttgatccttcatctttgaaaaattcatatttatttttagatctagtgaatcaccactttgccctttgcttcacaaagaacttgtagaggttaatgttcctgagaatcccggttctgtcttraagatcgctgtatttagggyaaagtgccgtataaatcatagaagctttagcaaaaaacttcagagaatacttgtatttcaaacttctaaaggttatttaaaataaaagtatgaaaactaaatgggtaaaattgaaaattcattttaattataatccactaatgtctgcatgatgccatccatcaccacacctccccatatatagcaatctgcctaataaatatgttaacatttttgtaaaatataaacagtgctaggcacttagaaaaagctcacaaatgcttattaatgatttgatagatgagtgagctgcgtgttcctaatatattttctcagcattgtgttacgtatgttttataagaaacagaaggcctaattcttctcagtcagtctaaattccaggtgatcatagcataccaagtatctaggcgtattagcatccccataccagagaacagcaacagcttcataagtaagtgataaactgtacgagattgactctgaggatagtagattggagtagggtggatcatggtaactaaagacaatctttttcaaagtgattagactatttactctttgaccagcatctcccctttcccrtcacattttgtcaacccccaccagcctctgataataggaggaatgagttctggtgacctattgcacagcatggtgactatagttaataaaaatgtattatgtattttgaaattgctaaaagaatggattttaagtgttctcaatacaaagaaatgatacatatatgcggtgatggatatgctaattagcctgatgtgatcattccacagtgtatatgtgtaccaaaacatcacattttaccccataaatatatagttattatttgttaattttcttttttttttttttttttttttttttttttgagacggagtctcgctctgtcgcccaggctggagtgcagtggcgcgatctcggctcactgcaagctccgcttcccgggttcacgccattctcctgcctcagcctcccgagtagctgggactacaggcgctcgctaccacgcccggctaattttttgtatttttagtagagacggggtttcacygtgttagccaggatggtctcgatctcctracctcgtgatccgcccgcctcggcctcccaaagtgctgggattacaggcgtgagccaccgcgcccggccaattttcttttttttaagacaaagtctcggtctgtcacccaggctggagtgtagtggtactatctcggctcactgcaacctccccctcctgggttcaagcgattcttctgcctcaacctcctgagtagctcagattacaggtacacgccaccatgcccgggtgtttttgtatttttagtagagacggactttcaccatgttggtcaggctgatctcaaacgcctgatgtcgcgatctgccctcctcggcctcctaaagtgctgggattacaggcatgagccatcacacctggccaattatttgttaatttaaagtaaaatataatgttaacaaaagttcgtacttaagtctttgtcagnnnnnnnnnnnnnnnnnnnncctaattcttctcagtcagtctaaattccaggtgatcatagcataccaagtatctaggcgtattagcatccccataccagagaacagcaacagcttcataagtaagtgataaactgtacgagattgactctgaggatagtagattggagtagggtggatcatggtaactaaagacaatctttttcaaagtgattagactatttactctttgaccagcatctcccctttcccatcacattttgtcaacccccaccagcctctgataataggaggaatgagttctggtgacctattgcacagwatggtgactatagttaataaaaatgtattatgtattttgaaattgctaaaagaatggattttaagtgttctcaatacaaagaaatgatacatatatgcggtgatggatatgctaattagcctgatgtgatcattccacagtgtatatgtgtaccaaaacatcacattttaccccataaatatatagttattatttgttaattttcttttttttaagacaaagtctcggtctgtcacccaggctggagtgtagtggtactatctcggctcactgcaacctccccctcctgggttcaagcgattcttctgcctcaacctcctgagtagctcagattacaggtacacgccaccatgcccgggtgtttttgtatttttagtagagacrgactttcaccatgttggtcaggctgatctcaaacgcctgatgtcgcgatctgccctcctcggcctcctaaagtgctgggattacaggcatgagccatcacacctggccaattatttgttaatttaaagtaaaatataatgttaacaaaagttcgtacttaagtctttgtcaggatttccataattagagaaaacaggaaaataatttttcagagatggttgggaaatttttctgagccagaaggcaaaggtattttctacagaattaactcattaattatgtgtttactcttttcattttactcatttattcaatatcgtttgagcacataaaatgcagattacaggaagctacaaggtagaagaaacaggagagtggagagggcactttatctgaggtatctgtaggctacgtagttaaagatctccagtgagtatatggctctgtgggcctgggtgttaggtgagaatggtgggctgcagttaggtttagaaaggtttttcatacaggtggcaatggaatccatacatgtgaataagaccactcagggaagagcatctagagccaagacacccaagatgcaactctgggtctcaatatttaacatgttgatagaaaaaactgctaaataaaaattttaaaatagagaggttggagaagtcaggagagagtgtaataaaaaaatcgtgggttataaaacaktatttaaattgtcttccagatcataaactagatctggtatagcatgagcattagcgagtcatctcttgtttgtttattactgtgtcataacccatcaatactgactggatatgtgtaaatatatgtaaatataaacaaaattaatttaaatatatgaatatatattgtgtatataactgttgaaaaacattagtaacttaagtatagaatagagaagtgcccatgcatagtaattatgtataatatattcttccctattaatggtctattttcacatagttcagtgagaataaactgacagaaaagcttttgttgaagtatgattgattatatttcattttaaaagtaaagcatgtaattgtttgatatgaattattttattttttcaagaatgagcattaataaaaaataccatgatarcacatgagtttaaacacttttgtaaaaatacaaagaatgtttcttaattggaggagtgtatatcgattgtaaagttgtaatacaatgtgtcaggaaaaaataaaagaaaacctttaagctttaaaatatacaagaaattacggacccagttaaaccttaagtgtataatcctgtcaaaatctgacaggatttcaaagtctccaaggtaaaccccaatgtgaagtaaaaggcaaggctaaaatctaaattgaattttgttttctaagaactgcaatagattatttttagttttcattactcattttgatgaagaacaattttttttaatgtaataytccctttggcawgatgccattccttatctgtatgggcttggttattttatagattgacatgccaggtcagaaatgataacatttagtcatgaagaattctgacaatgtttggattaaaacacctagaaggactgtccttagaatttgaaaaaatgttctatctttacctctaagacaaacagtggtgaggatttctttctccaagtgtcttcatggagctgttttatgtcttgatcttccctgaggaatttaaaatttgcatccatgcaaggaagcaaagaactaacagtttactaacactgatttagtgcttaaatatgcaacagaatctgctagattctgaagtattgcctttaatttcacctcagctttgaggtagtcaccattttcccacattatagttaagaaggaaaatttaccttctcttccatttctaaagaggaagaatggaaagtggaaaattggagaaattgaggagaagggcaatttctcattataggtaaaatgatggggagagttaaagggaagaagtgagaagaaattgggatgaggggcagagctagagctactattccacatagaaggtctgtgaagtccgaggttaggagttcgagaccagcctagccaacatggtgaaaccccatctctactgaagatacacaaaattagctgggcattgtggcacacgcctgtaatcccagctactcaggaggctggggcaggagaatcgcttgaacccaggagatggacattgcagtgagccgagatcctccactgcactccagcctgggtgacagagagagatgccatcttaaaaaaaaaaaaatgaaaaggaaagaaaaaagaaagtctgtgaagtctgactatagaaaaaagtggcaagaggcaagcatagggggcagtgacagaaggggcattttgctttgaagaatgtgtaccatagctgctgcctctgtatttttccacaaaagcatccacaaaattcacattattgtcagtgaaagactgaccctaggagggttcttggttacatcagagccagaagaagaaggtctagttacatggacatatgttgatgatgaaatggagacgcagaggtgttaattaggattaaaaattgggattcaatccacgccggtctgacttcaaatctcaattgttttgttcccgtatctcttttcgtgcaatttgaaatcagctgtaaatccaatggggagcacctcaagaatgcagcaggattcttcgctgaagctaccttaattagtgctaatgatgtttgactgggacagctgatttgattgttttggcagatacctcagttaaaattagacataggttaaggaatccatgctaattgtttttacatgcatatgctaaggaaccgtattttcgctgctcggctagtatatttataaagagcgctstcaaaggagtaaacagaagcttaaattagttttacgatatattaaaatgaaaatatgattagggatatttatatgagttaattacatttatattttaataatttatrcatatttagaggtttataattagttttcacaaacagtatgcagcaaatgaggttgaaaaaagttgtgctccactatcaggaaacacaaaatcagtttttaaatgtaagaagtatacattggagcaaagatagtctttcaacaaatgaacatccacattaaaaaaatgtggaacaagtgaacatccacatttaaaaaaaaaaacagaatctagacatctagacatagaccttacattcttcacacaaattaacttgaaattaattgtagacctaaatatccaatgcagtagtagcaaaatcttagaagataagagaatacttagatgaccttgaatatggtaatgacttttcagatacaacaccaaaggcagagtccatgaaaaaaattgataaactgaatttcattaaaattataagaaaaacttctgtgaaagacaattatcagtgattgagaagacaaggcacagactgagagaaaatatttgcaaaacacacatctcataaaggacttttatccaaattacaaagaattcttaaaactcaacaatatggaaacgaataactcaattaaaaatgggccaaagactttagcagacacttaaccaaagaaaatatacagatgttaaataagcatgtgaaaagatgttctacctcatatgtaatcagtgaaatgcaaattaaacatcagtgagatattactacacacttattaaaatggccaaagtctggaacactgacaacatcaaacgctattaaggatgtggagaaactggaactctcactcattgctggtgggaagcaaaatggtgtagtcactttgaaaaacagtttggtggtttctacgaaatgaatcatattctttctatatgatccaatcatcaagtgccttagtatttacccaaaggatatgaaaaattatttccacaaaaatctgcatatgaatgtttatagcagtttcattaataattgccaaaacttgaaagccaccaaaatgtccttctagggtgactagataaataaatgatgatatatccagacaatggaatattattcagtgctaaaaagaaattagctatcaagccatgaaaagacatagaggaaacttaaatgcaaattactaagtgaacagctatatactatatgattctaagtgtatataacattctgaaaaaggcagaattacagaacagtacaaaagattagtgtttgcaaagggttgtggggagggagggataaataagtagaacaataagcatttttaaggcaataaaactactctataaaatgaagaacatgtcattatacatttgtccaaacccatagaatgygcaagagagatcctaatgtaaactatggactttcggtgattatggtgtctcatggtaagctcatcagttgcaacaaatgtaccactctggtggggaattttaaaaagagtggaagctagggatgtatatgggcagggatatgagaaaaatcgccgtaccttcctcttagttttgctatgaatctaaaattgctctttaagaaaaattaagtctttaaaaaacaagtctatgctcctcttagccaggactcttgtgttggaagtaaccttcctctattaccacttctcatctcccttctattatgatctgtatttttgtattcatctctgtgtctttggttatacagtgaaatgccttattttccaccttaactcatgaaagttatattttaagtggtctctttaggttttactttttctcaagtacatttcaagttattctgagccatacaaagtcctctatccctcaaccttacctctctcattttagcttaactctattcatggtcttctttttactcagcacgtgctttcggagtaattatctctcctatgcacatgatgactcccaaatctttaaattcgacttcaactccaccctggattaccactctggcatttactcattctcactgtatatgatggcttgaatattctacagagaatccaccaaagttcagccaagatacaggaaccattttaggcatttggtaacaaagacaatggaaaaaggaagccaaacggagaatagcaacagcaggaagccactactactttagaattgaagacggtaaagagaagttttaacaataatccaaatgttgaagctgtcctgggggagcttagtccacaktgggatggccaataaggtgaggagctagaattataaatgagatgcagccaactgccagaaatagmactatccacatgcaggcagggcaagagagaagaaataccttgagtactcctacttgcttcattcctatgagatagtttggtaaacccagatggcaagggcgcccaggaaatgtagtaggagaaaaggcaatggaactgaggataaataagcaagaactgggattcacagatagagaaatgcaayataatttttattcaactcattttttcttaacmctawcacaastctgttgctcctccagagttccattaatggaattaacatttacatgggtcatcttgatcacattttagttcaccaataggtcatcaattctttacaattttaactctggaattgccttttcctcttcatccctcatctctgctgctgtgacttttgcgtctactcttaatatgtctcttctagtacccatgcaaggcattctcattagcagctccacctccagtctttccttaaatgttagcagaattctgtctggaaaatgaatgaaaccatgaaattctcccacttgtattttaaaaatagttacccatccctaaaggattaagtcttaagacctgatctggcttctagccccatattttttttttttttgtcatcatctcttatccctttgtccatagcctctgctcagtcctattacatggcttgtaacaccccgactgttgtacatttctctgtctttaagtatattgttctttctgcctggctaatcgctgctgcttctagaggattctgctctgatatcctattttctgcaaaacctcttctctaaagcccggaatcaattgtttcctatcactcaatatacctgggcataactctatttgtatttttctttctatattcaaaatacatacataacatttatttccaatcagactgtataattttcaagggcaaatattgtgtttcatttacctttgtatcactagaatgtggtaacatgctaggcctattgtggacgctacataaagacatattgattgaaggatggtgcatttcaagtgctcatatgatccactaagttagctctactctgattacatgggtgtgtttgtatgtgcatgtgtatgtttgtttttattgttttttggtgaatatttgacatagattctgctatttaagtgatttaaacacaactaggaaaacacagaaagttatctgtacgaaactattatgtaaaataaaaatcatataattataaaataacaaatacaattggttataaattttccaataatttcaattttccagtgtcaatgttccctttttttttttttttttgamacagagttttgctcccgttgcccagactggagagtgcaatggcatgatcttggctgatcgcaacctctgcctcctgggttcaagtgattctcctgcctcagcctccctagtagctgggattacaggcatgtgccaccacgcctggctaattttgtatttttagtagagatggggtttctccatgttggtcaggctggtctcgaactcctgacctcacatgatccaccctcctaggcctcccaaagtgccaggattagagacatgagccaccacacccggcctccatttttaagttaatttttttttaatttaacatatactgccccagaatcattcttaccacaaaaaacatgaaaagttgatgtggtgatggatgcgttaattagcttaactgaatctttctataatgtacatgtagatcaaaacatttcatcatatcccataaatatacacaattattatttgtcaattacaaataaatttaaaactttaaactatattttaattcatattacagcattcttatttaggtagcactgtaagtatgtagtatatgcccatctctattatgtttacagtgattttctactttctcctatattaaagtgatgtggtttagaattaatataaagatgaaattttccaaatagtgtattgggaaattttagttttatagttaatttaaattatttaatttttaatataaatattattaccttcttgaccatagtttaaaaatatgactaataatttttaaatctaaatgagaaacatatttataaaacataaaagacacagatggttagtacctaatataaactattatattaagaaaattggtagaaaatactcaaaatttgaagagacaattcacacacaaactcacacacacacaattacaaatgcttaataaatatggaaagtttcacaacatctctaaaatttaaggggatacaatttaaatggtttggcacttctaccacataaaaataaattaaaaataatattattaaaaatgatatcaagcatttaatttcagccctccaccatgaccaaatttacatttcctgactttttatacaaatgttgctattgtgacctcttacagtatctaatataaaatgagttctgtcgaaaggcatttaaaataatcatttcagagggaaagcagagaaaaaaaatcaaaggttagtatactaaattttgtggctatataatatgtttaacacagtagaattaaagtggctgaaataaaacacaaatatccaaaatagtgaatgttgaatgaagttgtaaagttgcattatatgttaaaaaacagtgaacaatttgtacagagaagttataagcgttcttgattcttttcttttggcttttttcgctttgaattctgtacttttaagtacaagcaaaaaacatttagtccgtatataagggaggcaacagagtatagtgtaattacaattggctaagagttgaggctcctttattgaactccaagagtttgaattctggcttcattgcttattaacggtgtgacttttggcaaataatgtaaactcttcatgtcagttttcttatctgtaagatgaaaataatattattataatacctcacccagaaagttgttataaccactaaataaacataaattctaaaaaatgtacttaggttatagagaacacttaaaaatcattagcagctattgtagtgtacagcatggtaattatagttaagaacactggattatttacttgaaatttgataagagggtaacatttagtgtccctatcatgtacatacacatacrtacacacagtggtaactatgtctggtgatgaatgtgttaattaatttgattgtggtcatcatttcactatgtgtatgcatatcaaatcatctccttgtatgccttgagtatacacaatttttatttgtcaattttacctcggtgaagctgggggggaaagaaaataagattctcaagttcattaatagttaaggaagcaaaaatttaaaatcacagtatcgtttcatatggatcatgttgactaaatataagaagtcagatattatcaagtattgatgataatgtggatcagtggtaagtgctggtggtcatataaatgagaaacactctttggaaaacggtgacgcatcaccttacaggtataagaatattcctaacagcatttccataagaacaaatcttgcaagcagctcaaatgcccttcaacagtagaagagaataattaagatgtattcagacaatggaattgtcacagcagtgaaaatgaaggaattcagttctatgcctcaatgtagatgaatctcaaaaaacataatactgaggaaatgaagcaagcacagacaaataaatagagtatgatttcatcacggtaaagttcaaaacaggccaggccataataggtggtaaaactatatagataatcataaaaacataatgagaaacagtgtgaaagggagtgctttaagagacaggcaaacaggcatctaatgtgctggtaatgttctatttcataaactgcatagcaggtacaagggagggtactttattatttttctttcaactttttatataatcctatacatttcctatatgtacaatgtatttcacaagtgaaatgtttaaataatgaaaaaaagatcagctatgtttactatatttgaaagcttattgctaacaatttttttggtttttatttttagctatatcagaaacttcttaaatatggattatattgaaagtcatattttaatacgtttttatactcaaaaaatctatgtagtaacggtattttctttttgaacatataactgagcagaaatagttttgtacatcttattggatgcctcaagtttagagaatatgaaatataaaatataaaatactcaaacagtatgaattatataccaagtatggtggtcagagaatttcagtggtctaggatttattacacacatatgccagatacctggaaatacaaagagattgtgtgaaaatcacttaggttttgcattctgagtctgaattctccctatattgatctcttacatcactgctaagaaagtgattattaatagcaactaattgccagggatatagtgtggcatgcagtgtttatgaaggacatacattgtgtcttctttaattctcagaaaaatctattatcttaatatttataattgtattttcctaagaaaatgtcacaaaatctatamattttctaggtatgcatccatatttatacagttttgcacataaaatcaggttgttcaaagaccccctgaaaatatacatgaacaacttaatgccctagggaaagactcaagccaaggaggttcttattacaatcctctaaacatagtataactgtgtgctttgaaactccaaaatcaataactaactaacagtaaaaatcatctaattaaaatttttctctagataaatgttcggccactgaaatactcgtctcttaggatttacatattattcatttataagaggtgacaaaaacagaatggagcatatatctttgggaaattacagtaaaataccatttttaaaatcctcttttccttacctacttatcttgggttttgtcygcccttcatgaaataatttcctgaatattaatttgttaggcatcragcacacatacaaaagaaataaacaatggaagacgtgaatgtatgcaattgtcatcaaaattcaaatttgatctaagaaacacttatgttacaaggcaggtgatgaattagaaagaatgaaataaatttttgtaagaaaatgcttacttctttatagatttgaaatctraaatatttttaagtaagtgatttatgctctgaaatttcacaatttctaaaatggtagatattttaagtttatattatgctgtcctttttagtcaaagacagtattgaacaaggaaaatacttggcatattgttgttagagtgtatcatgtaagtatgaaaatacagagctgctttttccattatttcagtrcttaaagaaactgttttctttttgtcgttttgttttcaacagtgaaaaataagtaagtaggtatcatcaaattgcttcttatttcttaagaagaaaactttctgggtcatattgcctaactttttatttctgggctttgggtacaacttcggtgaaagttggtgctgtgtccaatcaactgcccatgttgtgtattataaagtgacattataacatagatgggatcattggctttaacacaagctattgtgagacgcasagttatgcatttcagatatttgcatttagtcagggaaggaggtacggggagataggaaaatatttattaaacaacaggtaagtttcataattaaagttccgaagtaaatgttgcatcaagataatrtagttactttcagagggttggatagagaatggaaaagaaaatttgtgaattccaacaacaaggaaaacgaaaaccctgaaaatgtgtattttctcccattctcagctttttcttttatgccattgcttctatatctattgtaacccactagttacctctgtcactcttgcacattctatagagtgcagtgttcccctgtacttgagctctctgcttcaccttttgaagtcattttcttatcttctttctgactcacctatatagtccgtttctgactctgaacaaatatatctaatgaagtaataacattttgtggctttcacatataactgggaaatcaaatctcattactgagactgacaaaggagcctcagactttgactctgcctccctttttaccttcctcttttcttgatattcaggtcttttgtccaggtacaaactgctttttttcccagacytcagtttctatttccaacatccacccacaccccatactctctgcctcgatcatttcttgattactgatcatgacatttctgctgcctggaatttgccttctctcctgttstctcttttgctcctggtgaacaacacataatcccaggtcagactttgattccacttcctctttcttggtttctctactgactccagttagaatcacactttcacctctatgcttcccaagcattctgttatttatcaagctgtctcmtatgaagatgaatatgtttgtctgttttccctaatagactgagattattgaaatctgaggcactgcttaatcatgtttacttttcccggaacctatgacagtgacatgcacttgtcactcaataaatgtttggttagaatatctgtaatctgttttgctggctagtctttatcaactgccttgatgatttactttgtctctatattttggtcaattacctaaagctcctactcatatctcggctttctgctgatctggttgatctttctcttttcctttactccttgatctcttgccatttgacaccgtgacaacttaatatccctcacggtgctctgccacctaatgataatccaccttctgcagacccagtaattactgcataaccctttgaagctgccatcccacttaacaaatcttgtttgttcctgctccacrgggcaatatcttaatcaaatatggaggttactgtaccctttcacaaaagtctttcattgctttttcatatattcatatttttctgtacatattttctattttattttctcagaagaaatacattcatatcctaaaataagtaagagaaaagtatgttcataatttttctttgatgtgtattactatttattttcaaaggcctacagttaaattgtagtcattcttgaacwtagatatctgctgtagacaatttggttgtggcaagmacataaatacgttgaaatactggctgtttmcagcgaagcagcattgtattgtggcaatttaaagcaaaagagaagccctaaaattggttccagggtatgtttttaaactgctgattgttaatattggaaaacaattttaccatcaaatacccgttcctcactcctgtcatgaatatccatttgcattacaatgaaaaatgctgttatatgtgactggaatataagccttaataatggctgagaactactatcctttgagcattaattataaaggttcaccagtcaaataaataattatccatatggccaaagatacattcacattggacacatattttctagacttcatgtttcttaactgagatagttaaaactgaatgtggtatgaaaaaagtgtataataaattataaaatatgtattgatacatttaaataaagtaaaatttaaaatcctaacaaaaaaggcaccaactagtaccaccaactgaaaaatgctttaaacaaagaagctatatatgaaaaacccctatatataaaaaagaaaaaggaaagcatyccaawagaaacatggaaaaatgatataaataggcagtttattgaacagaatatttgatgtttcaaaaagcacataaaaatatgtttagtgttttagaattttaaatatggaaaataaaacaaaaataagatgccatctcataaacattctattactttatgttttaacaaattaccacaaattttgcagcttygaacatccgctatttattatttcagtttctgtagatcaggaatctgagcctggtgtaggtgaattctctgcttaacgtctcacaaggttgaaatcgaagtgtctgtgggttgtattctcatctgaaagtttgactagagaaagatccactttgggggtccttcaggttgttgacagaatgtattcccttgaacctgtggaattcatagaagcytgctccttcagtgccagcaacacacacacacacacacacacacacacacacmacacacacagcagggggttgggtggaagagagagagagagagagagagagacagagagagagagatcttccttgctgcttcaattctcttacctctagaccttatttttaaaaattcatctactagatggagttcacccagaataagcttctttcgatgaacttaaagtcaactgactaggaattttgattgcacctgaggttggacatataatgtcatctaatgtagggaatgacatcccattcatgttgccatgttctattggtcaggaacatgtttcaggttttacccacatgcaagggkaggggagctgaggttaggggtgactcatgggtgcttaccctaaggtgtgttccccatactcatttatgggcaaatacttaagaagctgactaaagtaagtmcagtttgggaggaatttggcagcctataataaagcataccctaaaacccagtaatacaatgcataataatgtgtccaagagaagtgtgggtatgtttttgcattattggttttaataatgaaaaattaaaaataaagcctaaatcttcattaatagaatactagatgaataaattttatatatatatacacacacacaatgaatacttttactctacagcagtgacatcaatgagacagagccacgtgcactaatatgaatacatctgaaaaacttgagtaaaaaatgcaagttgcattaaaaggccatctgatacaagttttataaaagttcaaacatgtaaaatggtactataatgtgtggatactatatatatttcacattcagtaaaagaataaaagaagcatagaaataataaacagtggtattaacatctggaatttaaaaggtgagttttctgtgaatgtggaataaaatataggcttaccaattgaaaaaacatcaatcatagttgtatacttttatttttgtatttcaatgagaatcttatttcaaaggatagttcaggatctttgtgttttctgttctactgaggtagttttcaaattttaatctggaattttacgactcttagaaataagcctcaggagactaataaggaaacattcataagttgaaagtgattcacttatgggttccttataaaaagtattcttaatgccattagacttatatctgacttttagatctgattttatctgtcattaaacttgataggcatatgtgcttcaaaattcaagtgcactgtagaggtttaggagtatgttaattatktgtgtgtgtgtgtgtktrtatatatatatatwcacattatctaaattagcatattgtcactaaatactactagtattactagaaaagtagcaatattttaatatagtgtgtcctacatacttcatgttaaagttttatgtttctattatttatgataagttaatcaggataaatatttttcaaagatatatatgagttgctctttacagaaatagaattgaaattatatcaaaagtcctatctaatccacatcaaataaggtgttaatatttaggaatgaaaatgaggacaagaaattaaatatgaaaagaatctgggctttccaaaaacattatgatcaaaagaatttttggtaagtaaagcaataactgagactttccttaaagaacttactcacctataacctaggaaggcaaaatgctgaatcagcatctgacaaaatgtgtgcatatgcatgggggtatgtatgtattgtgtgtgggtgtgtgtttgtgtgtgaatgcacgtgtgcttatttgggttggaggtcagctatgtctgttggtcaatgcaaatacagryttatgtaatcaaattttcagttctagatcttttttctagtatgtcctactatgttatatgtagcacatatttataataaatacctcaagattaaaactatatacctaagtagaagggatatatattttgtctctgaaggaaccttgaagaaggaatctgttagttgaaagtcaatgtcactgtgtgatttaggctctccctggatttccaagtgttgctaaatttagttcattctaaccaggagaggctgaggcatgctatttctctgctgatctccaaacagctgctgctgttcaccaatctttttttgagatagacctaatttaaaatattacaacctcatttcacaccttgaatttgtcttaaaaaggagtaatttatttctagtagctttttttagaaacctacattagagcctttataatatggttcagtttttttagagtttctgttcatttgaagggtgtctcttgggttctcttgaatgcattacatctcatcatgcaattattccagttcagaatttgttcatttttttaaatcattctttggttttaagagctattacgtgtctatttcccttcatataggccacgtaacacagagtagaccaattttattaatcaatcagttattttgtaattctgtggataaacttctatagattaaaaagaaaatcatagctcgtactaacaacccctctttcagttcagtcatctactacaggggtccccagcccacaggcctcataccagtactkgtctgtggcatgttaggaacygggctgcacagcaggaggtgagcagtgggccaggaagtgttaccacctgagctccgcctcctgttagatcagcagccgcattagattctcataggagcacaaaccctactgtgaactgtgtatgtgaagaatctaggttatgtactccttatgagaatctaatgcctgatgatctgaggtggaacagtttcatcccaaaaccatctcccccactccataaccacctgcctccacccctcgtccatggaaaaattgtctttcacgaaaccggtccctggtgccaaaaaggttggggactgctgatctactataataaacgttgtggcaggtattaagtgtcttacacaacagatttagtcctcctgagatcatttatattatccttttgctcaccatgagaatcaggtataaagaatttaaatrtcaaagtgacagttttaggcagattaagctccagagttaccttactgaaatgtcacatgctaatcagttcagagtgtatggctaaattatatacgtttaactttgcaaatcgcatataatcctatgggtaatataaaattattaaaagatgccagatgaggaaatcatatgcagatagacttttggaaacagtatgttgatcttaccgcagataatgaaataaagggagcttactgctaatgagtcaggcaagatgtgataaaggtgtgaagtaattcaatgaccagagggataaaagcaaaatatattttactaatagaatgtcatgtgaggtttctaccaattaccattttatgataaatttttttttttttttttttttttttgagacggagtctcggtctgtcgcccaggctgaagtgcagtggcccaatctcggctcactgcaagctccgcctcgtgggttcacgccattctcctgcctcagcctcccgagtagctgggactacaggcgcccaccaccactcccggctaattttttgttgttgttgttgtattttcagtagagacgtggtttcaccgtgttggccaggatggtctcgatgtcctgaccacgtcatccrcccacctcggcctcccaattacaggcgtgagccactgtgaccggcctgataaattttaaagaataattatatttcaaaaatgttttaaactcacttctaaaagtgtttgcaatttatggcttaaacattcctagtcatgtataatttttaaacaaagcacacttaatattctatcaagcagaaaaaggcaatattatagattttagtagtagcaacaatacagaaaacaagtgagaaaatgatattgtaaatgtttcttagtggtatatttggtgagccagtatgtacatgaaaggtataaggcaatgctttcagaagaaaataaaagcatatacagtcaaaatatgtatttttctattggtgacatctatgctgtgtaaattgagtccatttctctgtttttatactgtgaatttactacaagcattatttgtttctcagtgcagacatcaaatatcgtttggtaaaaaagtccctcgcgtgcttcaatagtgattttccttaggcaattttgtactctgttttgaggttgaataacagcattagagtagattattttccagggattaaaggtttgaaagatattagttctttgcccgcaatcatcagtttccaggaagtgctcgttactgaatttataattttttaattaatagaaaaaattgtataattggttagcacatgaattcctaattcaatacaaagtcagaatatgtattatatcatagtgtccttgggaaaggagtttttcactggaaaattatttttrgtaagtttctgttttcttaagctggggatggaaaataaagataaatttatcaatttgcaataatcaacattctaggaaatatctgtttctgttgaaaaagccccaggtcagatagattgagaaagccattcaactgcattcttctttaatcggtattctatcctggcggggaaggaaagagttatcctttattcgtagtcatttttctcctcttcgtttgggctcatatttgtattaggaaaatttttatgaaagacaaaaacaaatataacaaaaataacaaaacatgtcctacaaaatggatcttttctttttctgggcttagaacctttttctttttccagtgtactatgcttgatttctgttttttttttgactttcactattttagctattcctctttgcaaagtccaaagcaagaagaaaacttggattaaatatttatattcaactaccaaagcccttccttattattcacttcagagggagatgagaattgataaacaatatgcacctggctatataatgtaagaatggtaaattaaattaaacacacacacacaaacacacacacacacacacttctttcagcatatgctaaaatgtaaaaatggtaacaataataacttaataaattaagagttaaacatacacacacatatacttctttcagcatatgttaaaatataataataataactggaatagtaacagtattttaatttcattttatatgtgtcaaatgttacctgaagtaacttgttgtagttactattgcataaccaactaccaataattagtgctgtaaaataatcgttttactgtgtttatagatttggtaggccaggaattcagaatgggcatagtagaattggcttgtttctgttctatggtatcctggtagctcagctgagaaaacttcaaggttggagaatggggctactaggcagacagcttgggctgcaatcatctgaaggcgtctttactcatgtttgggggtggaagctggcttgctgactgtgacttcatctgggctgtttcctgttacacttatacatggcttcttcaagtgatctcttcacatgagctactttgagcattctttggatatgttggcaagcttccaagaacaagtatcccaagaaagaaaggctgaagtgtgtgacaatttatgatgtacatgcagagcatcacttctgctataaggtatagcttcagaaagtcacaaaggtattaagtgcaaggggagaagccatagacaccacctgctgaagaagtataacaktgttcctgaagaccatgtgagatgaaaggtatcgtatcatcattcttggaaaataggatctatcatagcattttacattatttcatattgagaagattctatccctatggatagaatctatctttattttcacctaacctgccagtctcaatactaaaagatattttaaaatcataagtgaaaagaaagagaatagaaaattcacttgaaggaactttcttaacaagaataagataataaaccaaattcaaaatcttaactttaaaaacatacacagtacaaagcttgctatattttcctcttttgcatcaccaaagatttcccttgaattttttcttttagattttttgtgtcagcagagtccaaaaataacacaattatgaattttatattaagccacccacatactcctctaaaagagtttagatttccaatcttttcccccgtatatgtactgtatatatgtccaatttcaattctactaataaaagcaattctacttgtaaaagcaaagagaaaataaccattattgagagtctcttatttgttatgtactgtgcacatgctatttctttaaatgctaatgctctgtgaagtgggagatattatctacttttcatgagaaaggaaagtgaggctcagatagatttaatgattcactacacagtgaagacacatagctcagaaactgaatgaggatgcaggtctatctaactcaaatgtgtaagaatatgattatttgtcctttagattccttagtctataaattaataattaagaggaagctgattgttktagctctaagttaatgaatagtaatatgcaattggcttttaactctgctgtttttactatgtctttagtgagatcacttcaccacatttttaggtaattttttcatatattcacactgttatttccctcttcccccatcatttcctcctaactcaactctcagttcatcactaagacttatacatcattgagaaaacagaagtaatcaaccagacatcctccatttcctaaacactaaatccacaaaactacttgcatctgtatccatccttaagattaattttggccctcacagactttctgggacttatctctccctcttttctaaggagtttaaaacwctactcagcttctctctcctgaagtttgaaccagtctcactaataaactcttctcattaactttaaaatcgattccagtaatttctacaagaaaaaaaaagtctctygatttcatattttttctctggataactacttctgtctctctgcttctcacaatcatactctccaagggttgatgagtcagtcttcacttcctgtactcagtttcatcatgccacctttactatctaacttgcccagcttcaaagaaattgctattgctaaagtcaccagtggccaccatgttgccaatggatgcttcaattgtcatttaattgctcagaaacttttgaaaagtgtcttctagtctctccttgagggattcttttctttctcttctgttgtcttttttgacaccatattctttcacttgtttttaggggatgggktgaggtaggataaagtgggggaggctttttccacctctaatctctaaatataagaactcgtctcctcagagctttgttctgtgtctcyttcttccactacactcttgccccatatgtgatggatagtgtctatttttcccctttagatcctccctttatccttgtyttgaggctctgtgcctcttgagattgtttgaaattggtgagactgatcagtggtggtctgtgtcctctggcttatggtgaggtttggtcagtgtgaggcactggaggagaatggagatttggaggataacattaggtaatttattactccacctcatgcccagctaggtcatccaaaaagaaatgtgtcctgttatcaaaggaaatgactcctgtctcagtccgttttgtgctgctcttaacagaattactgatactgggtaatttataataaagagaaatttattttataacagtattggaggctgggaaatccaagatctaggtgccagcatctggtgagggccttcttgctgcattgtcacatggtggaagatggaagggcaaaggggcaaaggaggctgaacttgcccttttataaaggcattaatcccatctagaagggtgaaaccgtcctggcctaaatacccctcaaaggtcccacttgataatattgttacaatggcaattaaatttcagcagcagtgagggggacaaatattcaaattatagctactcctatcagatgaccctctatatacagctactctggggtttgttagctaaaacatccttagtcccttcaggatgttcaataagttgcstactattgctagttcaggatactgcattagtctccaatagctttccttacctgtccacatttcctaaataatcttttcattaaactcttaattatcaattttaagtgtgccatctgtttcctactgggatcctgacatgtgggattcttcactaggaaacaaacaccaatatggagatagggatgcaaacacatatcagataattattcctatgaaacacaaaaaggggaaaaaagcaagcagaattgggcaaggaaagctttcagattgtaatacaaaactgatgcttttgaaaagagaaggggatatgcagggttggtcagaaatagcctcagaccacagtgcagacctgataaattctcawccagcccattggggagctctggaacaaatatggaccatttaagrggtctccattgtacagaaatwtcatggtcctaatacatccatcatctttttgttattgattcttgtctgggaaaagtgtgacctcagttcaaaacctaagttgacttctgaagacaagaagaagtacaggctctaagaagtacagactgctaattgcagtctttgccctgaatggcaagttctattttgaagcagagcttaggggaatagctttttgtcaccacatcaggcaaacagccattcccaattcttgaaatatcatctatatagaaaactgataatattatacctcttatctcttatcttagctctaagcttaactcaaaatctactagtacattcaattcagatatatgataatcatctcaacttaatacatcccaaaacaacatagtgatttttctgttctcatcaatcctggttctattctagtatttggaaattgtttaaattctacctttccatttcctgcactcaagccaaaatacaggagtcattcttgatcccctctttctgcacagaacttatcctattcattttcaagtcctacttcaaaaatatgtcttgagttcagttttcaaccttgatctttattgccattccctaaagccaccagctctcacacaatattggaacagcctcttaattggtcttcccccttccattcttgtcctattcatatcyactgattaaagtggacttcttaaaatataaatcagtcatgttaatctcctgcacaaaaatatttcaatggtttcataatttacttatgacaaattgtactgtccttaacatggcctctaataatctcaattatgtagctctttttaatttttccagtctaatcatgtgctcctttacttcttgcttaccaggatccagtcataactgacttcttttgagattttataatatttgtagtttttttctttacttctaagtttctgctcaggatgtttttaatcttcattcaagtttaaaattatttaacttttgtcagttagtttaaataaacctggctttctgaattgctctctgaatctcttaaatgaaatcaggacttcctgttgtagttttatagactttgttgccttttttcatataacttatcacagtttgcatttatttatgggtgtagttggtttagttattgtagctctttccccctaaacacaatttaatagctcacgtatcatatctgtttagcataacactacatccccagtgtctggcatgatgccttgcatctcattcattgggtctcaaatttagacttctttttatggttaaatgaacaagcaattataaaccaacctatagaatttatattccatgtaatttcatcctacttcttcagcaattctgtagtttttattttggctctgcatcctttcccatccctaggatttttttctgttggaaatcttacagtttggagtttatgacctttgagacccagtatacgtatattcttcagtatgtctttttttttttttttttttgagacggagtctcgctctgtcgcccaggctggagtgcagtggcgccatctcggctcactgcaagctccgcctcctgggttcacgccattctcctgcctcagcctcccgagtagctgggactacaggtgcccaccaccacgctctgttaatttttttgtatttttagtagagacggggtttcacygtgttagccaggatggtctcgatctcctgacctcgtgatccgcccgcctcggcctcccaaagtcctgggattacaggcatgagccaccgcgcccggcccagtatgtcttaatgtttattaacttctcttcaattattgaagtcatgaaatactgacttctaataattacttataaatctacacttaatgtgactcacagatgatgcgtccaacccaatagattgactcatctagatattgccgaatggcgtcttcaygagtaggttgatttctcgcctaattatagggattgtgctttagcccaggtacartggcccaaagagctttcttcaactcttccaacgtagttatttcctgctacaaactaagcaaagtggcacatccactgactagaagagaaagccagaattagactgcttgctaaaagccagcaaagtggatccctcctgacactcattttatgtgcctaaagaaagacttctgcaggggaacaggaaacttgtgaatgcaccgcagggaatctcagctgaatattgtcacattctttctacccatttatgaagaggcggggactataagaatgtgctgccatcattttcattaccttctgaggcatgagatatagctgtgcctctgtatttgaaattacacgtgaaacatttcttttttcataggcttgtgtatgccagttcagctagtaaaaagatttgactaagaaaaaattcctcacttgtaaccaacccttatttttactatttagctacatgtcatatcacgtgatgagggttagaactatgagaattatgagaaaccaatggcttacactagaagaaaggtgagaaagagaggatttattcaaagcattttggtattggaataaaccaaatccaacagccaaagtaaatttactttgagccactcagagrtaccattattttgtaaatatcacttgtcaaaatgcaaataggggtagatcaatccagagaagctgtccttgttataaaaagtgaagacctaagttgaccaggtcatgctaaatcaaagaaagttaagtggtgtttttgktagatattgataaataaaaatatacttggtggtcatgtgtaagtgttgttatggtaaattggttagctgacatcacaaggcatcccttgggaatgatgcttatttatatggagttagttttacttaaaaaattcacaaaatgtgtgaaataatgccacccattttcaactgtaaaagctttgtacctgaaagtgcacttctttttttttttttaatgcccattcagttgaagaaaatggatgtagtccctaggaaaactgaaacccagagtgacttctgttcttgtctcctttatgcactattttctctttctcaacctcagggcctccttctaattaattcttccactcaaccttttctttatgaacaaaaaggaaataagtgaattcattcaagaaatattcattgacctgagactatataccaagcactcttctaagcactgggaaaacagcagtgaacaaatgaacaaaaattcctgccctccatggggcttacatcgtggagtgtagcgcaggatggtgatgcagaatctaatatataggttggatgaaaatcaagggcaaacctagtacttttaggtgttttgtcctttttgtgaaattccatcagggctcaaaacaacttatatttcccctaattgtagtgtgtggagacaaatgttaaataatataaataaatgaagtatttgatgttaaaatgttatattcaaaacaaatgtaaaaaatgaatgaagggatggtctgtatgagtgtgcaattttaaattcaataaccaggtgagccttgatacatggttagcattcctgtacagatctaaggatggcagttcaccagtcattttaaatttgaatttctcataatgaactgggggatatttttcttcctttttttctttctttctttttttttttttttttttttttttttttttttgacacagggccttgctctgtcactgaggatggagtacagtggtgcaatcaaagcccactgcaacctctacctcctgggcccatgcaatcctcccacctcagcctcctgagtagctgggactacaggcacatgctaccatgcccagctaatttttgtatttttggtagagacagggtttctccatgttgcccaggctggtctagaactcctgagctcaagtgatccacccaccttggcctcccaaagtgctgggattacaggcttgagccaccgtgcccagctgggggattttaattaatttcagagcaggtaggcaggtggaaagatataattaagataattattacaattataacttattaattaacttgttgttggtaatttgtcagacaggcctcaggaatcatcctagttcatgaccatccaaggacaccaagggggtttgggaaatggccatgttaagaaagggagagagctcagggagcragttaagaagctatcacaacaatgcaagtgagagagaaaggaactcaatgaagatactgacatttcagaaatgtaagagtgatcaggtttctgggtttttttgtagtccttttgttgtatcttatttccctgaggataatgcccaagcctctttatttagtattgaaatcccttcaaaaacaacctattgctgtgtgctccaatcacctatatttacaaaaacaggtggtggaccaaatttgttccctgattagttatttgcttacccctgtctagtttatgtgggcytcctatccctaacacatagcctccatattaaagttgtctatttagtacaagaaacttctgggtttgcagccaacatgtcaccatttcaggtggtaaggtggaggaaaagaataaaaggttgaaagggcacttgccagcaactatttcctctaatagaacttttctatatgcttcaccaacatctacttacatctcattggccacttcttcatgtaagaaayctagggaatgcagtcatttaaacagatttattttcactatctttcttgttaccaagtaagcaaaagagaatggatactgggtgggcttggagcagtctgtgctacacctaccagattcagtcaccagtgtcactttctctatttgtcaaaaggggagactattagcacctacctcacagagttgctttctgaagattgaatgacctaatacagtcatgtgattaggagactgcctttcgtstaactgtaagctctcaataaagctgacacattgttggaatagcattattttcatctttttatgttttgatctttgctctagcttcattgcctagaaagctttctggcagacagcaaggctcaacaaatatttgaataaacaaataaaccgttgttattaccagttaagatttttgccttgttggcaattaaaaacttattctggctcacttaatccttgactttaaaaaaagttattggctgggcgcggtggctcacgcctgtaatcccagcactttgggaggccgaggcgggtggatcatgaggtcaggagatcgagaccatcctggctaacaaggtgaaaccccgtctctactaaaaatacaaaaaattagccgggcgcggtggcgggcgcctgtagtcccagctactcgggaggctgaggcaggagaatggcgtgaacccgggaagcggagcttgcagtgagccgagattgcgccactgcagtccgcagtccggcctgggcgacagagcgagactccgtctcaaaaaaaaaaaaaaaaaaaaaaaaaaaaaagttattaaaatttaattaacaaataataattgtatgtatttatagggtgcagtgtgatgtcttggtatatgtatacatttaatcctttttttttttttttaagacagaatcttgctctgttgcccaggctggagtacagcagcataatcacagctcactgcagcctcagcctcctgggctccagtgattctcccacctcagctcccccactattccccctgagtagctgagaccacagatgtgcaccactacatccaactaatgttttttttgtagagatggggtctcgttatgttgtccaggctggtctcaaacacctgggctcattccatcctcctgcctcagcctcccagtgtgctgggattataggcattagccacctgcctggccttaatcctttattaaaagaatatcacaagcttctggaagtgacaagatagctggagagtcaggtttagacaggaatgagtatccaattatttctgttatgatttaggtacagctgttttcaccytgtcattgaatcactccactcaacatttaaagccctgggagacagggtgtaatgtgccaatgtgacagaatcatctgtctccctttggttagaggaggacagaacacatcatttcacagtcccaccaaaactgcctgtaaccagagagagacagacagttaggatgaaattagtgtgaaagatgaaatcagcagaaggaaactgggtggaagatgtccacaattgtcattgcatattcccattctctttcacttgtgttgcttccccaaacccatggttgcccttgggagagaaaagagaaaagatatccagcagtttggtctctgtgagcacatcaatatcatcatttccccattgtatattaaactaccatattgtaaaacagagtacagggacgtgaccccacgagaccaaaaagaacagtttttaaagacaaggatgacaggatttgacagtgaggtcctggggttgatattggaagacagtaaagagatgttgaagaaaggcaaggcactaagaccaaatgagtcttgtctgtagaagtaaggtgactttaagtaatgacatcygtataaataaaccttgcaatgattacaattttacaaaaaaktaactcttactaaatacttcattttctgtraagaatacagtgccaatctggctgattattgagcaattgattatagtctctgataaaaatgttgaaaccagatggtttttcattttgtttgcctttacagatatagccagtgaatgtaggtccatgacaacctagagatttattttaaagcgtgattcacaatagaatcatctactgtcattacacaagtctttcagacatttggaattgctttaatttggccratcttttgaatttttttaaatcataaaactaaaacttaatctttatttgattgctagaacaaattatatgasttctccaaaattaattcatatgattggaaatatatatgctagtgctgatgaacattccaagcaattattggcagtctatactgtaaactagcaaatcatatgtatagggagctagagagcttattttagcctccttggataatttaggtctagattttatatgtaatgtttacatattaaaaaattggtacagactgataaaaatgataccactgtctactcgtggaatgtggagtttgtaaaactrgacataaaaatgtacatttatgaaaatgtgctttataagattcttctcacaatttgtactcttaatttatatgatttaaaaagtatttaacattcaacaccttgacatttttttcctttgtgcaatcatgttaatcttttgatcttgatctgttttttttttttgcagttctttaacacattattgaaattacaagcatccaaagcagtttcatgtggacagattgcatattttgaaagcctgaggtattttatcatgaaacatgccatgtggaatctttgaagcatagacctctgcgcaacacctgaataaagaatcttttacctggtatgtgacagagcttctcaccaccaccatgacaaaccaggaaaaatgggcccacctcagcccttcggaattttcccaacttcagawatatgctgagtgtaagtattcatattgatattatgagattatttgacatttgtgctagacaaagtatcatttatttataagaatggatcatagatcctgttcttcatggggatagatccagctctgccttttgtgtttacaagtcaggttgacttgagactacctttttgacacaagagaaaggaaaaggtaaattaaatcaagtattacatcttgaaggaaaggaactaaaatgttaggtgcacaattaggcttggaaaacactctagctgtaatagaaataaagcagaggatgagacagcctggcaaaatggagagtggtaatactgtaacagacagggagaaggrcaaacgggcgcagagagtgagaaggaaggaaaaagaggagaaaaaagcaatgctgtgcttgagacagtatggtctgactcatagatatcaagagggagggaaaagggagaggggtgtgtgtgtgtgtgtgtgtgtgtgtgtgtgtgtgtgtgtgtgtgttaaaagagagtaggaagcagggagtcatagatacattatggaattagaatcagaggttgtaaaagaaagaggtgtcaggacctcaagttaggaccgcacaactcttttagtgtgtgcattgatacaagtgataggctatgatcattcacttcactgtaagttttaaaaagaaaatattgtttctttgcatatgtagagtaagattttatttataagaaatttgtttttattctagattttcaggaatatgtctatttcataaagtgactttcaactataaatatgaacagcagttgggtcaggtgttgaagagagaaaaagaaacaactaattaatagcaggcaccaaaagacttggaaaatgatgagtacagaaaaagcaatatatagagaatgcaataagaatgataagaatggaaagaataacatggtgacagggagaataaaatgcaagaagtggaaaggagaaaaagaaccaaacagcacgtgatagtgaacgaggtaaaaattaaggcatctggtcaacttatgcagaaagatgttgtgggatataagagatgtgtatcaggaattagttggatgatattataaagtagaagcagagaaaagggttaaacacatatagggacttagaacatgaagatagatgtgatrgtaatagcgaatactatcactcacattaattatagagtacatattatgagccaggaacactaataaatgcttcatgtatattatctgaaaagaccagtttcaaaggtattctagaagcttcctagtctgtggattgaatgagggtatgagaatgctgctgggtatttgtaaggaagttccaaatctataatttcataggcattttaaaaaactaaaaaaagtctatgactattgactgagtcaataataataaaaatatgattacaaaatatatgatatttggaaattttgacataacttatggttctcacactcaaaactgtgtagagcctctgaatgtacaatatatgcatttatcatattacgaatatttacatttaggttttggaggtgtaggcagaaggattgcttgagcccagcagttcatgactagactgggcaaaacagtgagaccctgtctctatggaaaaaaaaaaaattagcccagcaggctggcatgcacatgtagtcccagctrcttggcaggctgaggtgagaggattgctggagcccrggaggctgaggctgcagtgagccattgtgccactgcactctaccatggctgacagccagaccctgtcaaaaaaaaaaaaaaaaaaagaagaagaagagtaaagaaaatttagttcagaatggcctacttcttctttatcacttgcagtcttatactcaatactttctaaattggttaaaaattgatttgcctatgatttcaaatttccatatgctctgctctttgctgctgtggtaatccaatcattaagtaaatatttctgagcatcttcttcagagtgagttttctgcttggtgctgcaggagatgcaaatatgaagagatatgtgtcctccattcaaggaatttatagtttaaagaaggctagaaactaatagataaataattctatgtctagccagaatattgtatgtgatacaagcagactttaaggttatatggggttttacaattccattggagataggaacggaaagggaagtcttcrtacaagagggaggatttgaaacaaatatttaaaaattaggtttaaggtaaatgacaaaggaaatgatatggataaaaaggaaaatttrgcataaatttgaggaagggaggtgaggcacatttagcccatcacaattgaagggagtgagtgaagtctgtaagaatgcaagcatatcaaaatatgccgtacttgagtcaaacaatgaagtcattgtacagttataagtggtagagtgacagaagcaatgttatgcttcgagaagtttactttgacgactgagaagatggtatatggtgatggaaagatgctagagactagagactagttagtagggtattggtgtagactgcataacgtagatcatgaaagacgactggaaaagtggggattcagattttataatattgaaattaacagaggatatcttggaaaataataaaatacaacaactgacagagagagagagagaggggaagagagagagtgatctgaaattttcctccagttttaaaagaagggattatggtgatatctgtcaagtaaagaaagcattgagtttggcttaggttatgttgaatttggcttgtttattaaaatatattttccagtgtttaagtacttataagaaaagttcctgtattatatgaaacattactataaaatatataaattattgctatgatagctaatgttttattcataattgctattgctcagatatagaaattccatttgaattgattagaagaaagacatttctactaaattcttcagtgtattataggctgctacttgtatttcattggctaatgaatatggaggtacatttaattatatcataagaatacacaaatcagtaataaatttgtgaaaattcctaaaacaagtggtaataaaaattatcataaatataaaatccataatatactgagacaaagatcaatggttgttcagtaaattggtagtatgaaatgtcacactgagtgtaagagcattattaaaatggattctatgagaagacaaattaacagattagctgtgacttttaaagaaatagtgccaattccatgattattacgctatttttaaataacaaagacaacatgaaaagtgstagatttcctgctccaaggactttcctgaataattaggaagcaaagaatatcatgattagaacctattcttgtgtaataaattgccagtgccaaaatataacaggaaacaaacatcatcctgaagattatagaagtcattcatttttcatgctgttcaatatgcatgatcagtttatcgggggctttaaagattagatttttcatgttgcaatgcagtattggtaagtgacattcctccatactctattagaaaaatgatacaatgcattcactttcttgagtttgatttgtatcttttaataagaatttctttatgtacattaaagaagtataaaaaatcaagttattgatttaaagttaaatttgcaacatgctaagattatatttggtatatatcaaataagtattttatttgctttcttggaataaggtggggctgtggaactattgggcaagatgagtgagctcatgggacaccaattccagcaaaaccaaatcattcaatgttggacctagagaataccataaagataattgtctcaagttatctgattttacatttcctccacaattgccagaatgcaccctgtaactatgattgttctcctaaatgctaggcttttcttaaaaataattaaggataagtagggtgatactggcacagtattcttggataggtatctagcataccagacagcttgtgtttaaatactgatcctaccatacttcagatatctgactttgggtaacttaatatatctgtgttttatatggaaaaaaatatgtccagtgctataagtattaagttgaatgaatcagtatatatgaagtatgaattagtatatatgaagtaatgagagccgtgcctggcaaattgctagtgatatgactgtttacaattattatcttactagagagggagtgtgttcttctggctgtttgaacatattgttgatgatcaagtagaaaagagccacagtttggagcatgaagagtcagtgtctgtttttcttccactagattagactcttctcacaaggtagaagcttctggtgtaattggcagcctccgctctgtgttgtccctacaaatgccgaaggcagctgatacggagcctgctgtgactgcctacagcatgctgtgaccgtgctccggtttagggtttcaggctgagtcactccatgggaagcatttcccttgatatgtgggagaggagtataattttcttcctcactcttgatataaagtcatccaaactgttgttataggatagaaagctctcactcctgccctttagagaattaagcttatcacattattggtctgtcggtgctttctgctgtggttccacgtcacagcaaagggttaagaaactcctgggcttttcatggataacaatattttctatgtgaaatctacgtgatatttccaaatgattcattatctgcccacgtattgtcacttagggttagctttttatttgctatatataatgtgtgttatatagcatgcaaattattttcgaaaaatactatgttattatggtgggaacctttccaaactttcataaatttcatacagtttatagcagctggcattgtgaggagttgcaaaattacagtgaatttgttcttttcaataaggacgaatgtgcataatgtttggacctggtgtgcagtttcttccattgcagtgaggcatgtggtgtgacttagtggaaagagctttggttttgcaggcaaatatttgacggtgtggaatcccagccctgttttctacttattagtggtatggccttcgtaatgtaacataaactacctgagcctcagctttctcacttgaaaaagtagaatcccacctcaaaatcttgttgtaggatttaatgagactataatcagcgtcatactaaataatggattttcagtgccttactgtaaatagtatacaagtgttaactcatttaatcctcgcagtaagcctcagagggagacaaattattgctgtttatggcagagtagctggaccagaactgtggcacaataagtgataacaaaggtcaaaacaggaataatttgtttatgtttttcatgaagattgatatgttaataaacaggttcttagtcatgtttccaaaataggaaaagctagaatccaggattcagataatacgatatctyggtcctgaaaggggagagagagagagacttgacctcctcacaggtgtgtagtcaatttatttttaggcaaatttagatcacacgctagccctcttgcccgtttgtcatgctgagattagcttttacttctgtcctgagccctgtgttagattggctctattttgggaagcccagccacttattgataattaccctctttgtatgagacagaaggataaatggcacagggccatttcgcagtgtctgagaacacataatttgatgtcagacaaaactgggtttgaaggctagtgctgtgatgtatacttcagtttcctcatggagttgccttgctgattaaatatggaaatgtatgtgaagtgcttggaatttaatatattactgttataattaggattgtgatagtggtggctgaggcagttgaatatgaaatgtggacttttaaaatatttaagccttttcagttaaaacacttatctgaaatgttttgacttaccagaaatgtcttgactttaccctgacacttggtctgaaacttgaatctgcaactgttttaggtagtgcatgtctctcatttctgactctttcttctgattcacactgattaactcagcagttcctggctctgacccagattatatttctagaatatatgttggcttcatatattcttttgcctcatctctggctctggttcctatttgttgtactgcttcagacacaatttcctgttggtggcttctctgtgtccatatgtcttaaatctttcaatacctaagttttgcaatagtaaaagaaaaaagtaactatgaacgtctaaactcccataattttcgtaccctaaagatgcaaaactttgggtaagctcttttcagacttgacctccccccaaaaaatccrtytgagtccaatttatggtcaagcaaacattgatactgaagtaatggcatctgtggaatrttggtcaaagtgagccaaatcatgccatgtctgaaaaatgtacgaagtcttagtgggctaacacaacagaagttcattttttgctcatattacatttccaatctgagtcagcaagtggtttcatctcacattgtctacagtgaagtcccagtcagatggagcagccatgagctttaaaaattggcagttgctgtgacagagagagaaagagagagagagagagcactcgtgactgtgtgctggctctgataccttctccctgcaagtgatacgctaatatttctttggcctaagcaattcacatgaccatatttaacttcaagggagtagcatttcttccatctgcccagtgccaggggagaactgagctatttggtgaaaactactaatttggccattatcacaggagtaaaatagaacctaccatttaccttgggacattagccaagtcatcacaatttctttatactttcatttcatcccctcagtttatactgaagataataatccctacctataaaatgatagctcttatttttgttagtaatattattataacaatttataacaaaaattatcactaaggcttatgtatcttaagttgatactttatccttaactcagtgatggtttacaggttgtgattcactagaattttccaagtttccttagttaccactttccacattattataggaagtgccacagtaaataataaatagagtacacaagctagaggaacttaactgtattcattattcagcagcctgttcggagagacagatccagtggcaaatgatgacaaagcaatgaaatgcattctctgaatgttacgtatgcaagattcttggagagattttaactctgcgcatatggatagaagttgagagtggaatggggttttaatttgaatagaaagtattgagtagaggtgggggaagaaaagaaactccaagcagttatcagagcatgtggagaagcaggaatgastgttacatatcagggaagaacttgatgtgtgtgttggtgtatagacatatttgtgtatgagcatgcatgtmatgcatgtgtgtacatgggcatgagtctaagcactgaaggtaaggctgaagaatttagcaatagtcacaaaaagtgggtctttagatgccattgataaaatattatccatcaacattgcctaacaatgaaatgaatacactcctgagaagaagtcaagcccctctcccctttccttgtggagatgttaaaatccaaatcctggagtctagcttttcctattcctgaaacatgattaagaacctatttattaacaaatcaatcttcataaaaacacaaacataaacataaaaacataaacataaatcttcataaagacataaacataaatcaatatcttcaatattaattttggaggtagtaaaatatctgaagatattgaagattttaattctggagatagcaaaattgtaagatttaaatttcagaaagaagtaaataaattgtatctttgatgaaaaggagactaaaaacctattaggagattattttactagggcagcctattgaatatgtggggttccatgaaggttaaggcattgttaacagagagataagcacatgttacagggagtatctagaggcagaatgaaccgaattcaatcaccaactgaatatggagactaaggaagaaggatggggcatttcagcttttagaagtaagtcagtgtggctcacccaatccaggaaaggaaaacaaaaagaaataatttagagggaaagtagagtggtttgattttggacatattgaaccttaagttcacaggttatcagattgagatataaattcgatacttggaaatacatatctggagctcaagaaagaaatcagagccagacatatagaatgggtgtgcctttgcattgtgagtagttatcaaatcatgggcatagatgagatgttttagtggaagcagattgagcaaggagagaaggatggagatgaaactctagaaagatttatttataagacagttggaagatgagatctccatgaaaacaactgagaaattgtaaccagaaagaaagaagagaataagtgattgaaagtattccacaatccaaagaagaaacatgttttcaaaaaatgagattgaacttgagataataaccaaaacgcatcccgagtctttatcatttagaatgccactggtgattttaatatggatttttttaaaaaacaataatagatgaaatggatggaaaacaggaaagacagagagaacacatgtaagctactctttatataatttcaccatgaaaacaaagtggaaggattataactaaagtaaacagtgtaaatagagggattttgttcttctgcataggagagaaagacatgttcacaggggacaagtggaagatttaaaacagaaaggaaataatttgtgacaaaagattgtgatcctaaggccaaatcttgatttttgtttttggttttattcagtttgcttgagtctatatcaattgtttatttccttaacttgttagttttggccgtcagcaacttatgtaaccttttctaaactttaattttctcaackgtgtaattaagaaaataaaaaagactatttcaaaggtcgttataagacccaaataaaataatgtgtggaaatgcattgtaaactgcaaaccaccatatgtaagttaattattgctttcgttgttattattaggatgtactgagttattgttctactatcttttctttttctatagttctatatcttggcttctccgagatatattctttattgaattttgcaatttgctttggtgagactatgtgagaaatgtccttctgcttatagtggtctgattttcttcttttacctcttggaacgtaaataagcgtagtttatcttcaaatccgttaggagcaatgattattttctgatactcaaaaaggcattttacaasaaagaccattgcccagactgtggaaggtctgaaatatttctgtaataactgtgtaataagatagcctgctgcagatcctcggatgctaggagaagacatgagactcctggctctgagacaaagaactgtattaattatgtcatagcaaacagcatgtacctcatgttttttttctgtccccctactttagttttattgggaaacatgaaaagggccaggtcacatctgcacaagcagagagttgtgtcaggaggaaatccccaaatttagggaatctgagtcttttataaagcacaacaaacacatcttctttttgctcaaaggagagttataatctctgtctcccaaggttgtccactacaaaaacatccttggaatgacagtctggaacataggctgtagatgcttctgcttgtgaaatgtacagaaacatgaaggaaacattgagaattatctttcaataaatattagcatatagtagccattagcatcattatcagtgtccagaaggtaatcaaaatacatatttccccatcaggttgccttttggtccatgtaaatatatcctcagatttgtgcacagaagtctccttgtcttggtctctcaccgtttatttttctccctttgccctatgactaggttctcagatacatcttatttgtgccctactttttcaaagtaggagatttactcacttttctatatttatccaggaagaatgaaggggaattcaygtaattgctgtgtttaatagaacctagccatgaaaaatagtcttaattcttccatttcattttaaaaaactaagtstcttaacacacagatattcacacacatacatgcacacatgcacacacatgtgcatgtgtgtgcacacagtttttcttacaaatattagttatcattaagttattttcagtactttattataaaatgaacatagaaaaataaataatttggggcaagaggtcaaatggccctaatctagctgcagtaacttcttttgtaaaatgccttgaaaactcttgcaagtgaatgaaactccagcatgccattgatatcccacatggtgtcatagtgtctttagagcaggctgtgttgctttttgagtgactgcagctgccaaatgatgaaaaacttctagaatatttttcaggttagtttcttactgaatcaaggcaatccattgtctcttgaaacataccccaaaactgaggtcagtggaaaatgaaagctttggggtaggatatcaggaaaggaataaaatgctagtaactacagctttgactttgaaaggagagttccccagatatttacaaagttctgctaaatatttctggtttacagcctcactatggatattagagaatagtcatggtattttttttgaaatttctgcctawtaaattatttctctagaaatgggctcttaaaagctctgccttggttagaaggaattcaaagaggaagtctgtaatgaacaaactcccacagcatccatggaacagagagaatagattctgattattcataggatatgatttggtatgactgctgtaaaactctcttactaatatcagattagctgtttctaatgggaaaaaaatcaacacatacaattttttttaaaaagtactggtcagatgcattttacataaaccttcctggagggcacattttactttccactctcctccccatactcatctttgcaggtgccagaattaaagataatggtccttaaacattttttatttctggggccagaaatactgcccagtgatctctagagccttctctcttcctaggtatcagatgatatccagtgccttctccctcccttggtttcaaagacatgaggcattgctctcagcatttctgggaagtatttccgaagtagcaataactgtagccacaagccacttatgaggcactactctgtgatacccctcaattaataatatgttttgtcttttccaaagctgctttctagtgaaggcatcttgaaggattttttcttctcctattggctgccataatcatagarttctgtgttaattttcctcttgttaccttatctacagtatgatcaaacaagcatggagttcagaatttaaaaataacaccattaacataaggattgcttcacgcaatccctcaargaatccatcttggagaaacagacattcctaaagtgytcactgataaaactccaggtgtcctagaattgcatattgctccactgttcctgagtctacatttcgcaaaacatgagagagcttttcctcctcccttctagtttccctgtcacagattctttcaagtgcttgggtatctaaaaccttccagtgtcaaagaagcttatactttgtgtgtgacttcttttcccgacagcctgtaggctgagatatctgaaaattttctcatggtactttctgacttttatctgattatacaagtaggcacaaaggcatttaaggggagcatgataagatgtcagacactttcttccataagtggtaatgaataatgggtcaataccaaaaagtagttagaatttgcagacagcactggtagcagaaggtggggygcctttttgaggagaatggcatgagcttgcccatgatgcacccctacccatgaaggtaaagattggaaattctcattccaaccatctaacacttccacccacctgtcagctttcaataagacacatcatctgagttgatttatgatctttgcctcgtgaaccatttctattttttttctaggttgttgataaacttctgacttacattcttgcttagcaacattagtctggttgcaagttctggctccacatgtgtcacttctctgatctcctctggcaacttcaggggctcttcagcacagtttgcccagatgcagataatgtcctacattcagactactgagtgttatgtcaataatcactgtgggaaaatgtggacgctgatgcccagaaatggactaaataataatggtgacttgagagtctttgtccagaatttgtcttcatctgttaatgcagaaactttagactgcttacacttttctcagagtattgcaagataggagctctagtagtatgttactgccagaacccaagcaaatccaataccatgacattttgtccaactctaggaagtaattccttagargtataatttactagtatgtactaaatactctctcagatagtactggtagcaggaggtggggtgtcgttttgaggggaattcatgagcttgcccatgttgttacgccccttcccgtgaaggtgaggattggaaattcttattccaactgtctaaggcatctaccaatatgtcagctttcaataagacacatcgtatgagttgatttatgatctttgcctcttcaactatttcattttttttcttggttgtcagtaacctctgacttcccatcttgcttctctttgaattaatggaaatcacagggatgctcagacatcttggagagatttatgttgtcgggcagagcttggcactaggctatatattactcccaccagctcttaactgagtctcaattggttccattttcctaagccttcctctctaatgtccttttaaaaaactttctagtatatcacaaaattgcatttattttatctgctcttgtctaggttgttaagaacttgcatatgtatcttggcattttctaaactactgaagatttactttataaactactgatcacacagacctcagcaaaacattggtgctgccaccttccccaagtttctccagattttcctccataagccaccttgaagctgacattccagcctcccacatttcacattcatttcggagttcatatttctgttgtctatctactgcttgttcaaattttctttccctataactttctcaatagcctgacaaatattttgagttttcagtgcctagtgacatgtagcagaagctatgctacttatgcatcattgtctacaacacaggatctgtgtggagattacccagatattatgtagaccaccaaactaaaccataccccccataagtctttcttctccataaggcgtctccacatttcaaaaataaacaatgcacaataaataagggataagttattctgtaacagtctccttgacccaatatttcctggaagaaatttctttgagggataaatctgataaacatacataatatgggttagttatgactttggagtagaaacagcattttcaaagagtagtttcttccatcaagtccactgctagaggttgagatttctccgtgtagttagtctgtctgtctgtctgtctgtgtctgtctctctctctctctctccctgtctttctgccccgcaaatgctctaggcctctctattattcagtttaaatgccacagaagaggcttctgaaactttcagtggmatacttggattcaggtgtgaccattccacaggtcaaaaattctgggtaatgccttatctagttgttctcatgctatttattagttcacacaatgttttaaaggtagtccctgtacagtccacattccacaaataatatgataatatgagaaggtaatcaaaaatacacctagaatacacaggatgggtgaaaacacttgtttattggttgggtggtctttcttctgtttcccttccttctttcttcttgtagaccattcttagtcttttgactccattctgcctgagtcccacaatgttaaaactggcaatgccattgttttagcatcacgtaccttcagggctagccattattcatggatgtacccctaagagcaaaagatggctcactaggctattttagagtattcacagtagtgcatttttaagacaaacagtgtttacatgctgatatttatcatcactcagagcatatcttagatggcaaatataatatctaacacttataaagagcttattattataggtcacattatgcctaaattttaactatgttaacacatttagtctccatagcaactctaccaagccagtacttattattattattgccatttttccgatgaggaaattaaagcccagagaagttcaataatttatttgcctaaggtcaaagggatcttaaactacagggtcatggttcaaatcagatggactgtttccagaatccatgctcttagtcactctgctatactggctcttgatatattatcttttaggtgatcattataataaaaacaaactacaaactagcaaaactgctttccaacaggaatgcaaatagaaagaaagaaaatgaatatagggaccaggaagccccattctgctttaagttcaaattattcatgaaaggtgaaaatgtttgatatgactaagacaaaatataaagtatggtaattcctggaatcaactggtccaagaaaggataattttgaaagtgtttcctttaagagaggtttaagatagttctgattgacggggaatatggactcattttgaaagcatcgagagtcccayggaataattagaagttataggcagaagcttccacgaagaaaaggatctatttctcccaggccgaatccatttccaggtgttagtaagaagaaggatgatgaggtcagccaagttgtttgagtaggcacttaaaggcttggctcactttcactgcaagtttaacactgctacttcgtgcaagccccagagcgatgtaggcaaaatcaaataggctgcctcaggcagcagcagtaaggagaaatgctgaagttataatcccataagtggtcaaagggaactttggagagttaatgcaattgacaaaaatgacaagaattagtcagaaagcccaagggacctccgtgtttgtgttccttcaatcctcctcctaatagtttatcatttgttgatataatacagaggtaagagctcacttgtagttttgttttgcatagagagttaattttaaggaagggaaaaattgcctggatcatttgcttaaattgtgaactttttctaacgtatttatggagagcttagttgatctaaaacaggggtcctcaatacccctgccactgacctgtactggtaccatggcctgttaggaaccaggctgcacagcaaaagctgagaggcaggtgagccagtgaaatttcctctgtatttacagccactcgccatcgcttgcattaccacctgagcctygcctcctgtcagagtagggtggtattagatgtcacgggagcacaaaccctattgtaaactgcacatgcaagggactaggttgtgtgctccttatgaaaatataatatccgatatctgtcactgtctcccatcatccccaatgggaccatccagttgcaggaaaacaagcgtagggctcccactgattctatattatggtgagttgtatagttatttcattacatattacaatgaaataataatagaataaagtgcacaataaacgtaatgcacttgaattattccgaaaccatttccccactccctggtccatggaaaaattatcttccatgacactggtccctggtgccaaaaagtctggggaccagtgatctagaagacagccctgctctgaagggcagctcctcaattcaagccaattgcatgccagacatttcacaccactcaggaacacatatagaacaacagtattgataaattaatgctctatatatctctgcttacctagtacatgtgatatatatatatatatatatatatatatatatatatatwymtacacatacatatatatatacacacatatatgagataaatatgtatatatggatttaggtacatattagtttgttagtttggcttcagtttatgtgtccagcaaatcagctatttttcttggtactggtcaatatgggatggattatattattacaataatcaaaaaaatctaaaattatgtaacattgtaatcaataaaaatagacctctaaatgacattttatacaacttcatatactatgatcttgaaagacaaagactagatcaatttaataatttttaaaagggtaaatgtacataaacaacacattttctaatttctcatgtaactcaccttggatcacagctcagaaaatatgttgtgacgtgctgtgacaaagcaaatctttaccaatatttctttaagtctaggctaatgaaaacatttttsaggatcttgattattytttcaactatattatataatgtagctttctgaatgctgattaggaataaaaataacttggtaatttcatttcacaaaatatctaaatttgatctatctcccactctctcttttgcttagtctgtcttctcacttatttctatttctctcctactttttctcccttacacgttctakgtccttacccaattctaaagccagacagaacaaaacaagtattctaaaaggcaaaaacaaaattattatatttttaacgtgaaaacktaatttatcaattactgtttagagagaaaaaaaatgaggagaacaaggttatgcagcgatatggtttgtctgtgtctccacccaaatctcatcttgaattgtagctgccgtagttaccatgtgtcctgggagggacctggtgtgaggtaattgaatcatggggrgtgggtctttcctgtgctctttcccatratagtgaataagtctcatgagatctgatggttttataaaggggagttcccctacacaagctcgcttgcctgctgccatgtaagacttgactttgaccctcattcaccttctgccatgattgtgaggcttccccagccatgtggaactatgagtcaattaaacctctttcttttataaatgatccagtctcaggtatgtttttattagcaccgtgagaacagatgaatacatagagctaaaagaaaagtcartggtgatacaggtcatgttaatatagattagtaggcaagggcaactgatgaaattacattttatttttaaaagctatatgaattccttttaggtaacctgcagtatatggagaagcagggaaaaatgtaatacctttagcctcactttcttctaagatgttttcaatcacagtttcattgctgtgttttttaattgctgttattttgtttggggtaacaaattctaaacattgtttttttctttttcccagtgtcaaaaataatgatgtctttagtgcagagatagattttaaaatctgacattttaaagcatggatagtcaactctttcaattagttctctcagttttcccaaacagttctctcagtagaaattagcaaaaaaaatctgaaattctctatgtcttagtgatttttaccttgaataatatgttacaataactgtgttttctctccaaaggctaayttctaacagagcaaaaacattctatgtttagttttaccacagagatcaaatttttaaattgagaaaatatttttaatctgctggttttagaaataaaaagtagtaattaagcagaaataggtcttaaaaatcaattaataattatatattgtagcttatctacatatttcaatactgtatccattaatttgcctaattgtataccctacctaatttattttatatagaaatctcactgtttctttacaaattttgaatagtttttttaacttaattttcttttaacatacaaagatatctgagactctttgtaattgtatgagatgagataattagacatatatgtaattcttaaatttttttwaaaagtactatttacaatagaataggtaaattgggttaaatgcttggtaaattcagctgaaaatggattgaattatccaattataattaagatattatgtagaaaaatatatttgaagacatctctgatttctgagatgaaagaacaaggtaagtagaaatagattgtcataatcagaagttcaagtctttaatttgcaattttgtgtttgttagaacaattgtggaagaaactaacwctttgatctgttatttcgtagttaatatttaaccttctatcaactcactagctctaaagttgattgatttcaaggatttcctctattctgtagacccacacctacaattcttattttctctatgattctatcaacctctaaatacactgtagaatagcctgtcatataacaacagcttgaccaaacatatctactccctgttctacttagctgtctggcttctgctcttaacaatctctaaaactattaaggctaaggttctaatggtcaatagttttaacttcattacctgagctcttcaaattatttgacttagtraccaatcatttctcccccaaatcctcaactgtctcgcttctagatccataatttcttctttcctaccctatatctgattatccttttcattctcctttttaaagtcttccttctaaacctgacctctaaatcttggctggttcctggattatgttcccttttaaaacttaactttcatttcctctgtgatcatctgttccaaagctttaaataycacatgtgtgacaatgacttccaaatgtatatttctaacccaaacctctcctctcaatttcaggtttgaataagcagctgtctaattgacatcttcaattggatggctcactggaattacacatttaacagttaaaaaatgcattatttaatccctttctgcccgattaaagtaaactgaaaattaaatacatctctgtctctcccttaggctattgcatttttaatttgtgctaccatcattccataactttgggggaaaataaagttatgactcaaccttaatgcatccaagatgacttgtcctcactctcaacataccaactaccagcaggtcaactatctaaaataatttcaccatttctcttaatttatgctgttcccactgtaagctcagtcaccagtctttcctgaactaccacaggatcctccttcttggtcttcttgcctcttctccatgtctctctccaacatgtcctccacacagagaggccaataaattccttgaaaaatataaatccaactatgtcattcccctgcctaaaatcttgatgtcctgatgtacataaagcactattcagaatccctatcatgtcctgtaagacgtatgtggatgttctctggcccacctttcaaacccatctgaaaaccactttcttttgccttctacgatcagccacactagtcttgtcgtattctgctccctttttctgaatatatttttatttttatttttcccaagcttccttttcacctttcagttttcggctgaaatgccagcccctctrtgagacctctcttggccacttgaagttcctcctctctgatattatctacatcaataccctgttcattttcttcaacacagttaatgtgattggatttgtgtatttcctatttaaattatttgtgttcatcatctttagtttctgaagatagtttacttattcacaaatatgtatccaatgtataaacatggcatttaatatataataggcactcaataagtatgggtcaaatgaatcaatgtcacctagggtaaatagaaaaaatagctatagtcttcatatatagaaagaaacttgttaggggataaaagatgcttcgatacaaaaataaactcttctaactttaagattttaccctttttagtcaaaggtatgttattgacttaaatgtgaatagacctttttttatctctaagtgattaagtgattatggggtaggagcatagacctttctggaatctggtgaaacatgttcctagagaggacagacaattcagtatatttactgtatatacctaagttgtttctaaaaagcctggtctaagataataactatgaaatttggcccaaaaagtcttctgtggacccaatgcagttctctgggtccagcttgatttaattaccgagccacattgtgctgcagaatttttcaaagttctgtctctgagaaaacacactatgttaattttgggttaacatagtcagagtttcttgccttaaacccaacagaatggacatgtcaaggaaggagcattatcctccatagcatttcatatataacacgcttacatgaaacattccccaactatccatccaatgacatttagagcatttgctgttttcttgtacttttcttgatttaatttgaaatagtttgaagtttgcaataagcctagctaatgtaaaactttaattatttggaaactataaatggtaaaacacaatttcctgattatatttgcagtttaaaatgatttgaaatgcccaacccaagaaaattgttgcatgcactgtaataagaggcactgcagaataccattgccaggggttgcataggattttagcatttggcacaccatactatagcgtttaaacaatacactatggcacaagcaatttggaaaataatgaaaaaacattactaaattccaagtttatttaacacgagattgcctagatattattataataataaaggagtagtattttctaaaaggtgtttttaaaaaacatgaatttaaatttggtttagagggtttttttattgatctaggatctatattatttatataaaaggtgaccaagtatggcttaaagccataaagcatcattagatgattgaatgttactaggtaattcctactacaatgagctagtctcatgccagtactaaaaaagagagataaaaaaattgtaatttctacctctcttttctttaccttctcttttattcaaaaatctctctccctaaaagaacccaaaacacaatatggattgtgtgtttgctggggcggagggtggctgttaaaaaacctctctgaatatttatacctattccaatcttggtctctggaattcattgcatttcttggctatgccatttatttgacccttctattagttttaatattttacctagtgtgtttacttcatatacttttttttgactcttaaagatatatggtatagatattaagaacatgggcttggaatttaactgcctagatttaaattttaactctacaaaccatacaactttgttcaagtttcttcatctctgtgtctcagatttttcattcgtaaaatgtgggtaattatagtaccatatgtgtgtcatagggatgtagtaytagcaattattattattattttatttttacattttttagactgtgtctcactctgtaacccatgctggagtgcagtggtgtgatctcagctcactgcaacctccgcctcccaggctcaagtaatccttccacctcagcctcccgaatagctgggaccacaggcataggccaccatgactggccaatgtttttttgtattttttgtaaagacggggtttccctttgttgcccaggctggtcttgaacttctgggctcaagcgttcacccgcctctgcctcccaaagtgctgggattacagtcgtgagccaccacacccagccagcaattattatcattactcactattgttatatacttggaaarttatttatttatccagaaagaacacatatatcttaaatgcagggaccctatgtcccaattatccagcagggttatacacactaggtactctgtatgtattagatgaatggaagagagtggaaaaaataaatagaatatgaaaagagaatgaatcattggcatctggaaaggacagggcgtagactaagagaaaaccagcaggaagtggaaggtggacacaggagttgtgtagaggagagagcaaatagcctaaagatttgatacgctcagttccataatcaataactaaatatttgctatcatattcattcttagattgcagagctatgcctatttgtgtagtagacacttaaatcagacttcaaacctcggtgcttccacataacaccatcctctctatcgttttttctctcctcctcaaatcctaccacccctaatatgtagaattttgagcatacagcagtccaaatatagattcagctacaattaacatattattgcctttatcctcattcccttctcctcactagaaaacttgcatttcacaactaaaagttgaatttagaatcctgactgataaactaatctgactggaggtgattgtattcttcagttctttttcttttccaaacagccattgcttcatttctgtttccattatgtcgtagctgttctatagttcctttcttcatgtcctctactcagagttttacccaatttttggatactgtggcaatagggcaggaagcagaagggaaagggtacctgcagaagtatagtgggctgtttctcctttccgctggggaacacagtgggccacacagcctggctatttatcactcaccctttatgtttgcaggctgccattcccatcagagcctgctggttcaagattctagaactgtgtgcattagaggaggcagagttaagtatctgaattaataaagaatagaaattcgacctcccttgacttagccattttatttatatttctggaaaatacctttaaactactttcaatggtcacttgtaggaggattattcaatggcccttgatgtttttgaaataaatgtatcttagttgttaaggggaccccttcagtgagcatatacaggtataaggctcttaagaattcacattataatcttctgggattttgttattatcatggtttcctagcaaaagtcataatttgtgtacccaagagaaaatctggagtttttcccagttggtatctgggttgctttctcttatattagcacctagtagagaaagtcagaattaggcttggcagatacatgaaacgcctactgatttttttttttgtcaccagaattgattcttgctgtcagcatcatgccataatttgtgtgcttctatatgcacatgtacatttgctttaatatgtttcaataggaagcatttaaaaatagacttcactttgygctatatcattattgtcaatatctgtggcagggatatggaaatagacactaagtagacaattggttttgacaatataatctaaacattgtgtcatttgtgcttattttagatgaaaacatgcatttccctggcaagaaggaaaaatgtatgttaattaaaagacctaactcttattcaaattctaaaaatgagtaaattactgtagaagcatatatatgaaatgcctcaataaagagaaaaatttttacaaccttacaaatcaaaacccaatgtttacttcatttttaaattactttgttaccattctgattgtttttatcgtcatcaataccttagaagcttttatgtttttatttctatttggttttgtttgattttttaaaaaatatcatagcatctggctagatttcatcttttttgtttgttgttttcaaactaaaaccaaattttgagcctagacacttgccaatcaattcttattctggtgtaactatacatgtattatgattgacaarttaaaactttacaacattcctcagacaatgggatgcactctcagtggaagaagtaactaaaatatctcaataacatctagtcagatatatgcatgtgttaggggcaaccataacgcaatattatcagaagtgaaagtcaagatccccgaggaagatgatcttctaatcaaaataacctggagatggacttcaggaaactattagcccttatataatatagtgtaaactatttcctgaaatctcaaaaactggaactggatctgagctttagaagggattagaaagtaggaaaataaaaagataaaatattaatgcatattatgaaaagaaacatcttacatacagaaaactgtgttaataatctgcaagtttttatattagtgtgtccaactagcagcagagaacacaaactcaccagcttatccctgaataacattacataaatatgttgggtacctggagaaagtcaatgttattttcagcatatgttggttcacaggtggttttatttttgctattacaaagtgttgacagaatgtagatatcatcctattggaataattaaattcatgcatatgtaaaaaatcatgttaaatcctttgctctcgtcatctcatttaatcgttacatcaaatgtacgagatagtattgtttttgctatttttttcaaccaagaaaattaagatttagagaggtggcacagttataacatgcagtcagaagtgtaaatctggtctgattccataatccgtgctctttattcacttgctattctgatgaggagccgcaaatccttttgcctaacaacaactagagactaaaagcaatgatcaaggattgtttcaataacttccaggattcaacatggagaagagttgagaaaaacaaacagcaaattggcagtctgggtggagaatgaaaaggaacatgaggtttatttcttttttattttctttttagactgagtttcactcttgtcacccaggctggagtgcagtggcatgatctctgctcactgcaacctctgcctcccaggttcaaagattcaagcgattctcctgtctcggcctccagagtagctgggactacaggaccatgccactatgtccagctaatttttgtatttttattagtagagacgggatttcaccatgttagccaggctggtctcgccctcctgacctcaagtgatctgcccgcctcgtcctcccaaagtgctgggattacagacgtgagccactgtgcccacctgagataatttttaatgaaagaataggactttgtggttactctctacagagataaaatatagcaatgcctagtattataacagcttgcagcgtgagccatttacatttaaaagctgcatattcttccttcagtttcacctgagcagttatattttatccatcccctggtacccaacagatctggtccagggaatgctttcccccagtgtgttcccagcaatgtgttcttatcacgattgtacacagtctgtgacctcctcatgacctctttttgtgctgctgttgaataaggaaataatcaaagggaggaagagggagttctgaacccgcttggtgggtggttctgtggtttgaagttctctatccccaacactaaacccaggggatggggtcaccaagagagccactcctagagatcaggatggctagaagagaacaaggcacataactctttgtcagatctctggttagacttaggtaatgtgccatagcacctatgtaagcaagagaaaaaaataatcatgtggaatgaatagctgcaaaaagagagggcagaaatggggcaacctgtatctcatcttttggcatggcaaggatgtgtgagttccccatrggttaaatggatttgccaaaagatatccagacttgagatattttgtgtgtgccataatcaacagggagacctgctgtaaggggacctgggagcaaggactctactaatttaggatgagcaagagaggatgagctggagacacattttccgtatcagggtctgtgaatgggatgcgctggatgcagactttacttacagaagagattgctgacatttgatacctgtcccacagtgaatagtgacagccatcactcacagttagataagcagccactataaagatggaaacaaggagacttcaataaacataaaaacaaagtggaacatgttttcttactttctatatcaatccatttcctgtttatacccctctgtattcattcacaattcgtaatatttcatgtgtaataatgtagaatgacaggaaaaggattaactattagaaaaaagaagaaatatggaggttagagaaactataaaatgctgtaattaaaatgccagaataaaagagcaaaaggaatagatcacaaatattaattagttatgtattagaataaaacttttctgagctgaagaagagcataaytctgttgatcaaaagggttaaatgaataaagttacctagagtatgttcataacattttagaatttgaaggataaagaaaacatttacaagcaccttaagcaagtaatctaaaggaggaatatttggtcagatttcataatttacctcttcagaaccaattttcagagaaaaataacgtttgtcagttgaatgttgagtgggaaatgagtccagaattcttagctcaatcacatttccattcataaatgaatgtaacagataccaatacccaaacatttatataagtctttcgatcttgaagattactcatttttaataaaaaattaatttaaaaaattcttattgtagagaatgttttcagccacaataacagaattcctgactcaaagtgactacaatacatatctctgtgttttttcatacagcaagaagggagaggtaatgtaggcttcaggcttgataaaaacagctcagtgttatcattttaaaaatcccatttttttccatcactttattttgctgttcttggtactggtttgacctcactctggtaataaagtggttgtratggtcgtagccaatgtccagagaaagaaaagagccaacttttcttgtggttatatcttaagagagaagacactttttctggaagctctctgaaggatatccttttatatcccattaaatagaattgggtcactcaccatgcctgaaccagtctctagttggcttggattacccatcttgggtggaataaatattgaggaatcaattgtaatgttcactatggtcttccaacaactagaaaataaactaaaatacagaattgagaaaacgtatggaatataagattaatagcaattactaaaattgaatataaatagaatgcattgtaaatatttgtttaaaatatggcgatagaatagaaattttcaaaattgttcatcaaaagcaaacacataatataaaaacacaagcaaataatttcatttcttagttttcagataacaccaatgaaaatgtgtaaataatataacaaatggatcataactactgaagttaatgaaggattttaaaaaatcactagagtaaaagattcaatgaaagaaaacattatatatcacaaaacatataaaacaaaacagcttaaaagcataaagcaagatgacaggagtaagttattacaataaatataaatatatgtaatttttctattaaatggcatacagtttaattttgagttaaaaataacatacagctatatacagtctacaagagacaaaggtaatacaaggtgaagcaaaaaggttagataagaaagaggagagaaatgttctctggggagaaaatatctggtggctgctaaagggctccacagccatcaattctggtggctctcaggcacactccgctagcctgaggttgtgctgcagattactttgtttccatgttatctctctcattggtactcatttatgtggttgcttgacattcccaagagcaatcctcataggtatactaaataggagagtagtttatttattgaagttgaagtaaaaattaaatgttgcattatttactactgcttatctatatatctcttcctttttttctaagacttgcaaataaaaatagcttaaagcaaggaacgccgagtgttagaaattcaggtggtgaaggtcctttgaatagttctggttattaataaaattactgaattcctctcacacatctttgaacattccaaatatggcattgaaaaagttagagaaaagtctactttttctcaggattttaagagctttgctctcctatttttagatcgtatttgttgcttcactgtttttatttgtttttccttggtttggatcatgtgttctcaaagtcatatttactagaggggaaggaatcacaatggaaagtgagttgtggattgggaataaaagggaattggagatagaggaagcacttaactgatgctgcaaaattgctaaggtgcagtttcatagggctaaatttaccctaatcaagcacacatggtattttagttgttgaaattgtattgctttaaaaatgagtttttaataccaagaatagttcacgtgtgggagctaagagaagaattaatagagtgaagagggttgaaagattgaagcctgggatatttgacaagataaattcygacagaaaatgtgacactgggataatttatctgggaccctgggagctgtagcttagaatattctagagacatttttaatttttggaattcagtatgctgatatttctacaggtgaagtggtttaatattaaagaagaatgactttagaaaatatggtggaatcagaactagaaaataaggggcagaaaaaatttaaatgtccacgtgagtgaatgtatctgttctattaggaagaaggactataaatactatcaagacacacacacacacacaaaatggctttattttatttcattctaaagtgaaagaaaacttcaataccattttaatgagacaaaagcatgaaaaataactgggccccaaactaaagacaggtaataaaagtgaaagcccatgactcaaacagatatttggaaattatgttcaaagcagcattattcataataactaaaagctccaaaagcaacccacgtgtccatagaagcatgatttgataaacaaaatgtagcttatacatgtaaagaaatattagccttaaaaaagaaggaaattttgacacatactacaacatgaatgaagcttgatgaccttatgctaagtgaaacaagccagttctcgaaaatacaaatgtatgattccacatacacgagatacctagagtcgtcaaattcgcagaaacacaggtagaatggtggttgctagggctgagaaggagtggaagagagggagttagtttgatgagtaaagaggtttcagttggggaaaataaaaaagttctaaagatacatagtgctgatggttagacaataatgtgaatatacttaatatcacataactgtacccttaaaaatggttgtgtgtgtgtgtatatatacatatatatatttatgttacatatatatatttacttacctcaaaataagggatagcccaatttttaaaactctagtgacaggataaatatgatcagctcagggaattctgacattagaatattgttttaattaattacataagtaatttgaattatcaccttcacctgaagttgatatgatatactcatttttccatttccatgattatgtatttggaataattacaaatcatatgaaaagaatttcacgttgaataacttgaataatttcacgtttgaataataagaatttcatgagaagcatgggttttcatctagaaaagccaatgtttaaaagcatgtaatctttcttattttgtaattctgagtaaataayttaaaactgagagcaacttcagtattattaaaacttcctgttactaggccaggtgtggtggagttctcctgtagtcccggctactcaggaaactgaagtgggaggatcacttgatcctggaagtttgaagctgcagtgagctataatcacaccactgcactccagcctaggtgacgtagcaagactacatctctaaaataaataaacagataattttttacarggattatgctcataaatattgagaaatctggcgtatttcagcgagatctattctgagcttccagaatgccactttttagttataccatcaaaatcaaagagcattttaataatcttcaagctcatggtgctctgcttggactgtttaaaacatctgaaactgtaacttcattgtctcaaatggtagccactagccacacatggctatagaggtgaaaggtggctactccaaattgaaatgtcccataaatataaaatgaacatcacatgtcaaagactttgtaagtaggccgggcgccgtgactcacacttgtaatcccascactttgggaggccaaggcaggcagatcacttgagtccaggagttcgaaatcagcctggccaacatggcgaaacagcatctctaccaaaaatacaaatggtagcctggcatggtggcgcatgcctgtagtcccagctacttgagaggctgggacacacgaatcgcttgagcctgggaaatggaggctgtagtgagccaagatcgtgccaagattgtgccactgcacttcagcaggctgcatgwcagtgtgagactctgtctcaagaaaaaaaaagaaaggcttagtaagaaaaatttattccttagtgttttaaaaatataaatgacattttgaactgttaatatatggggtatattgaataaaataaattattaaaattaatattatgtttttatgtttctgatatggctactacaaagctttaacttgacatttgcagaacacawttgtggcttgcattatatttaaatgtcagagagctatcccataatgttgtagtctaaacatggctgagaataacaatgagagtcaagtttaaaccaagatccaatcagtctgggtatagattaattgccatgagtgactaggtttcactagattggtagaaactagacaataggtcacttgtttccaaatcattgtagcatcttgagaatggcaccatgggtgcttgtgtcattgacctctgagcctagtctttaaggatcatatttcctagtttcaggccaattcccaaatataaaaagtaattcgtgtttgcaacgtgcacgaattctttcaagtctccaggaaaaacttagataaattaaaggactaaatgaagaatctgatttgaaggagttaatgcagaatccgaacatgtttaacagtgatttgcttgtgcatcagatttagtggaaaacagggaagtaaatgcaatcctgaaagtttcagattgaaaatcaacagaaatatatttttcttgtttgtgcaaacaccctgatattcctaaaaattgctaggggatgctgaataaaggacctattgctcacttttatacatgtagtttagagcaacaagactacaattttcttgaggtaacaactacattcaccatttttaatgttccccattccttgcacttttatggtctaagccactgctacaccattggcactgaattattatacacatttgattgagatgtttgtcaggcagagattcaagttaattatgccaaagatattaaaacttaagaaaaatactttggcaaaaaaaaaatattgtcccagtgttatgcgttctttactcataaaaacttagtaggggactccaaatttcttacatgtctcttggaaaagccctgcatttcttacatggatgctattaaaatatgacctccatgttcttggggatggtgacatctcctacataatctgtacactccttggtcctagcttcacttgaacttgaagtctttaacttcatgacttcctccctccttcatgtttcactcccatgtttcataaccttgaaaacatggcctctattcatatttgacctgaaatgctagagattgaggagcactaggactatagcaggagtccaagtgctaccaggtgagtagttaaaactatcgtaaattaaatcacagtctgtacatataaaatactattaagtgcctgatataaataatatagttagaattcttaaatttcgggatagaatttcttttgagatattctgatcacatgttgcttttttaaacttgttttataatgcagtagctgtaaagataatactaagagaaaactcaacctacattaaagttatcactttctcatgatttgtttctagagttctctttaacctctgttaaaaataaatgcttttatttctacaatatttgcaaaattcaagcagctccaagtataatggaggatggctgatgtggcaaggttattctggaattagtaggaatttagagctgtaccttagttgtcatctatttcattcctctattttcagttgaggaatagacctacttcttgagttacacaaggtcacacagctgattacagatctaagataaggacttggagtacctataccctagtgtgttcattccactgtttcatsaagagcctcttggcgtctgctggccaaatgacacctatgaattaaaagcaaacattctattctcatcagtttccacctgggttactgtaacagcctgtgttttaattctttttttgcartctcttctgctgcattcattttttacccaattattatttccatcaagtctttatcttgtgcaaaacttcttcactaaagacagattcaagttcagtgtccttattctatccttgaaactctttacagtgaaatctctctttttttctagttaatcttatcttattacatttcatttggactcttcgtagttatagtgaaggatgatgaacatttaggaagcattaatgtgtgatttttgaatagtttgggatattttctacaactacctcaaygtgcaagtttgtttacccttttcatatttctaagtatttattagttttgtataggattttctactgtaaaaacttatttgcttcataatgctattttctgtagagcaaatattgtcacctttgggattagtattttggggaacattcaggaaatgatcatctaatctatttgttcatataaacatcacttacaaaagacttgttagtctataataaaacaacaatttgcagtacttctgtctatctaaaagaggaacctctaaagagcattcttatgacaattgaagatattagaatatgggttggatattacattgtaaatggttgacaattattttagtcattataatgacatcttagctttgtaagagaacatctctattcctaggagttatgtattaaagaatttatgatgagacatcatgatatctattcctggctttaaaataacaccaaaatataaatgaccacaaatgaaatataaacaaatatgacaaaatattaaaattgttaaagctattttgaggacatgcttttcataatacacaattttttagaacaaaaacaaatttaaaaagccccaaaaggagatgctttaaagagcaataatactcaaaattattctaccataaaatgtctggttgatgacatcatcatcgaaagcaagagcttctgtggcagagaagagaggatgcatgttgagctatttccaggactatatgttcaaatctatctctttctacgtcgttttatatcacttgtgaaacacaacaatactgatcttatttaatcaatatgatttgacaccatagttaataactatttttctaatttgaattctaattcttcataatgatttcccatgggacagagtaggagaaaaaccatgtttattttctgccaacttaatatattgagctgagaattatacaaaaaattatctaatgataattttacttaataactacagtaatatatctatggaaatttgtgtatttattcattctttatttattaaaaatttaagttggtcattaggataagaactgtgcataaaacagataataagaaatcatctcagttctcaagaaacctaaaatatagtaggtgaaacagaggaaagaccagacaattatatgtgtgaggtagaactcctgcagttagagagaaacaaaactctaattgactactatagaaagagacacggagggaatttatagacttaactgaaaaataccagaactgttacagcttcaggcatagtttcatgccctcaggaatttgtcttcatctctcagctttttattttttttttctccaagaacttccttgtctctccttcygacaacaggattactccagcagtgatagatgaatacccaactagtttgcaaacttggcagaataggctatcatgtttttaatttttcagggaaagtcctgaaattggcatctcagcacacttgcttatccctacaacaaatgccctggctctaattttctgggcctaggttatatttatccctgttgccctgtaataaaggagacttctggagcaaaatgatctgagaatagcagcatcagggattcttaaaggaaatttatatgttatcaggaaaaggagggcagcttatgaataccaaataggcaaatataacagatattcattgtctagaaaaagaagatgtgactgttacraggtactacagaaaaatataaaagacacactatatatccataaaggaggtgccacatgagttaagaacatgagtacaatgccttattttaaatattttcacgttaaaatctaaaacaatrtcgatgctattcacatttttacaaaatagagaataattattaattgcccatttatgtttactattttctcaatttgaaattacatatttacatcactagcagtaaagagctaggtattaaatgttatgagcttaactaarttttaatttatacgtatacaagacccagattatttttaccaattttattgtagactctatagccatataatgtatatatagtacaatgtgaggtaataatcctaacaaatatatgaaagtattaattgaaaccattcaaatatcaattkgatgaagaatatattttgatctttataaacatcacaacatagcacttkgagtgaaagttaggtcttcatgaagactgcaaattaagctagagtcataacaagaatagaaactaagcttctctgcaaacctacgacgcggraagcaaagaattttatgccattttgtaatgtaaatttataaaaraaaagatctcaactactttctgagtaaaatatgaggaactgtaatcttaatatcctagaatatatataaatattmgtgaaattattacttgaaaatttttagaaaaagaatcaaagttagaataatctgaaaccatttgaactggtctaggatattttctaaaatattattataaatataaaatatattttaattaaaggaaatatactttagactcaaattctctaaatttttggtaaaattactctatatggaagttttggcttggaaaatttgagaaccagaaagaagcataagcataatttccttgggattcttgccaagatagaattgcaagttcatatcattttattataaacatttactatgttgataaactagatattttaaaaaggaaaaaaaattctctaaagattaagatagacttctccatggactaaaaattgggaggaataaaaagtaatatatgtagccaaatacgcacacatgttggactttgctttttgttcaaataaaagaggctgaagcttcagttgctttaaatccatggcaactgaaaaaaaccatgaaaagtgagacaccagaagcaggttcaaaggtcagatccaggtactatgatgaatttaaccagttaatgaaaagaactttaaaaatgaagtgcctgctgcttgggacagtatatacagagaaaaagaaagaagcagctagaatcttacactaatccactcacaggtttattcccactttcactattgaatggtgtcccctaaggcagcagcctgcaatgtgtagatggcatattgcacaattctcwgggctatcactcactttggagtccaatgaaatgggtccattggagttgtgtagtgatagcgctatgctgcactcctggaaatagcaattcactaacataaattttgttttttggcagttggatttaggattgaatggagacaactaaaaaatttctataaaggaagaagtgagaataatacaaggagaagaacatcttctactcaaaatgtgcctaaaacatcaaagcacaataactaataaaaccaattgaatgaaaatcagacaataaaaatcagctctaagaccagaattaataattatataatgactaaacattatgagaggtaggaaagaaaacatataaatagataacagcaataagaaataatgaattaaacagaaatgaaaaaaataacaggtgtacttgaaaagagacaaatctaagaaaatatagtcattgaggtgctgtaacctcattagatgggaaaaatgcctatattggaaacaatcaaagagattagtggattgaaagagagtagaggattattccccaaaagtagcatagaygaagttaaagtaacaaaggaacagttaacagataccaacaatagtttgaaaataggcaaaataagactgttaggagtgccaagtaaagagaatggaggttgagagttgatatttgaaagattatttccatgaattgtctagaattgaaagaggacacacattttctacctaaaactgaacacctagtgctgacctggaaagacagacatgcatggacaaatgatggatggatgaattaacagaaataggtcgaaataataatacatacgtacataggtatttatgtttgtggagaaatagataaaaatataagcatagaaaataaatacttagactatcatgctgaaactgcaaaatatataggataaggagaaaaatcttaaaaccgactagagaaaaaaaacatgttacctatgttttttaaagatagaagatatcccatgcaataagagacatcagaagasaatggaaaaataatccaaaattgtcaagcaaattaactgtaaaatagaattctataaattgataataaccagtccaggaatagagggaaataaagcatgcagtcacaaagttcagtacaaataggctctcaatgaaaaaaattactaaacacacacacacacacacacacacacacccaaaaagtgaagtcaatgtgaagaaataactcacaaatgaaatgagttattgagtggtataaataataataataagtaatttctttatgtttcaaaagaaagtactaaaattctggataatgattccacagaaactaagggagatgttcatttttgaataaagcatgctaagtatcttttagaacagtaataaagatattgagctacgttagacttcgttgaaaattatattgattatttgtattaagcatataagggtaagtaacttgaaaaatggtatacacagttttcaaagcccatagtaaatactaagaaaatacagaaagctttatctatcctcagaagccagagaggaaaatcaaatgarcgaggaaagatcttagtagaccaaaahgcatacacaacaggtggcagaaataaattacattaaaaagcaatcataataaattcaaacatacctaactcagcccgaaagggacagtgtctaacagtgttgaagaaacagaaagccatttgattctttaaaatcgaccaaaaatttacaaatgagaaacatacaattaaaaataaacaggtaaaagtaaaataatggtgagagatgtttagttacattgtaatcactttttacacttcttacatcttacacacaaacacactcacatagaattaactggtataataatattagtattagatgcaaggattaaaacataaaagcatcactaaggaaaaagagggttttatccttgtatctggagacccagaccaatgtaataatagatgaggaaaataaatcactttctctcttctcctttaattgtttgctcaagactggtgctgtgactcacacttataagctcaactgctccagaggatgaggcaggaggatcgcttgaggccaggagttcaagaccagcctagacaacataataagatcctgtctctaaaataagtaaatgagtaaatggaaaaaaaaaaaagtttgtgcaaatgacaccaaaaggcctacattgacatctctatttaaactgcaacctactcccagttcacctactccaaattttccttacgtgctttgtttattacagcactatcgttttctaatattttttaattatttttaattgtatgagtgagataagtttttgaaaacttttataaccatttatgtaaatattagaaaaataagcattctctatgtgaacatataaatatgcagtaaacgtataaaaaattagcaaggcgaagagacactttactttcaggaatgtagctattttcagggaaggtaagaggaatgtaggtgcagattttagtaaatctgtgatttttatgttgatttttataaatgaactgaagaaaatgaaacatttaacatttgttaaatctttgtggtaggttcacaactattcatggttttattctctaaacttttctgtatatttgaaatatttctaataggatgataatttcatctaccataatttggtaagacttcaattcagcattggtttataaattgaattatatcaagaatgttaacaaaatttttaaaatcttcagagacattgcagaaattaaaaataatacttgcaaaatcttcaaaaaatagtctgagagaagccagaaaacatactactgaccttattaagctgagtagcttttagtgggcctactaatttaaatgctataacactcactgttgcctactgtttgcagtggacatttccagaaaaatgattgcttttgtaaaattaataagaaaagaaaacatgagaaagccaaaagtgaattatagacataactactacttaaaaaatttgatatcagtattagtggtggcaataattggaatcattggaaattaaatcaagattagcaatgattaaaattatctttatagtttgtaataaaagttaaagtaagcccactcttaatttaaaaggactataaataagtgggacaattcccagacttggacagcaatcgtaatattacatattagtcagggacttctggaaaaactgagccagtagcatatatttgtgtgtttctctccaggaaaacaaaaccagaaacatatatacgtatgtgtgtgtatgtgtggggtatatgtgtgtgcgtgtgtgtgtgtgtgtgtgtgtrtatgtatatatgtgtgtatatgtgtgtatatatatatacacacacacatatgtatatatatacatgtatatatagatacacacatgcacatatacatatatcggggggagagagagaaactaatttattatgagcaataggctaataagattatggaggttgtaaagtccctcaatgtgccttctacaagctggcgatccaggaaagatggtggtgtaattaattcagatccagttcaaaatcctgagacggggggaactgatagtgtaactgttagtcccaggactagagaaaatgagagaagatgtcccagctcaatcaggcaggcagaaaaaaaagggacaaattcttccatcctacaccttttgttctrttaaagctctgagtagactggatgatgcccactcacattggggagggcaatctattttactaagttcaccaattcaaatgctagtctcatatggaaacatcttcacagacacactcagaaacsatgtttaatttgggaaccccatgcccagtcaaattgacacacaaagctaaccatcagatgtccactccttgtcagctgagcacccatgcacaccccttaaaccattcttaatctccaaacaaagacagtaacaagatcataattctgcctaacatgatgcaactatcctgcatacaactgaaaatgcgctggtcttttcccagaaaaggaagtaaagttcgtggagtgatgtctactcttctccttggtatcctgcaacttaagtcctatgatgtagaattaatacgtcttatgccacatgataagggaataaaaaagggaaggaatcaaatatatatatgcacatgcacatacacttattcataacaaagtaaggaggaaacacttatgaccattacagtccttttttccttgtttctatagctgatcacatggttttaggtggtgtttatagctaccttcttctgctactcatgctgtattctcttgctttcaacatgtacctcaactggtcatggctcttttcctggcggggtgactcacacctccattcctgaaggattggggccattactatttctgcctggttgggattgttgtagttttccattgacgggccatggtaatactaagccaacattgtaactcaattctttgcctgttgattcaaaggcatgaaaagtccaagtggcctggcagtcttaacttccagttcagtagaaacattgggtctcctgatagaagcatttctccctctagaaccaaacctctagacaagcatagcatatataaaaaggtgagtttactaagtattaacttatacaatcacarggtcccacaataggctgtctgcaagctgaggagcaaggacagccagcctgagtgccaaatctgaagaacttggagcctgatgtctgagggcagaaagcatccagcacgggagaaagatcaagtctgggaagctaggccagtctctccttttctgcctgctttatatttgctgacagctgattagattttacccaccagattaagggtggatccaccttccccagcacactgactcaaatgttaatttcttttgtcaacaccctcacagacacacccaggattaatactttgtacccttcaatccaatcaagttgacactcggtagtaaccatcacactggggcctagtagcaggaccatagctgtttttgaaaaggagactagaccgagcscggtggctcacgcctgtaattccagcacttcgggaggccgaggtgggcggatcatgaggtcaagagattgagaccatcctggctaaaatggtgaaaccccatctctactaaaaacacaaaaagttagccaggcgcggtggtgtacacctgtagtcccagctactcagaaggctgaggcaggagaatcacttgaacccaggaggcgtaggtcatagtaagccaagatggcgccactgcactctggcctgggcaacagagtgagactctgtcaaaaaaaaaaagaaaagaaaaggagaataattatmtgcaggcccttgcatcaaaatactaaaagtccacactgtgcttcaccaatagaattctaccaaaggctcctcacaccatcccaatctgctggttcatatggcccaattgtcatggcagctcacacagcagcctgtacttgctgcaaagccttctgttattctgggccccatttaaaactagcagcttttcaggtcattcattaaatgagctgaggtaacacatccaaatgaagactatgttccttctaaaatccaaataggcccgttagaggtaccgctttcttagttgtagggagagccaaatgcaacaactttttcttcaccttagaagggatatcttgaayttccccacaccactggagctctaaaaatcccattgagacagaatgatcttgaattttagtcagatttactttttaccctctgaaatacaagtgttttactaataaatctagagtagctgctaattcttgcctcctacatccagttagcatgatgtcatcaatgtaatggaatgctgtggtatcttctagaagggaaaggtgatcaagatccctgttaactaaattatgaggcagagtggggaatttatctatccctgaggtaggacagtgagaatgtatttctggcctagccagctaaatgcaaacagcttctggtgggctttatggacagggatggagaaaaaggcctttgtcagattaacagctctataccaggtaccaggagatgttttaatttgctcaagcattaaaaccacatctggtaccgatgtttcaattggagtaaccacctgattaagtttataataatgcactatcattctccaaagttcatctgtcttctgcatgagccagatacacraattgaatgaggatatggtgggaattgccacccttataccttgcaagttcttgatgatggcactaatttctgtaatccctcagggaygcagtattgcttttgatttactattttcctagatattgacggtagtattgtcttccacttggcctttgccacaatagtagccctcattccataggtcagggaataaatgtgggkagctrctgactatatctgttacaattaggcattctggaactggggaaataaccacaggatgggtgtggggacccactggacctgctgtgagatgaacctgagctaaaattccactgagaaccataagtcctgttataactggtgggccaaagtgatgttttgggtgtcctgggattagtgtcaatttagagtcagtgtccagcagtccccaaaagtctgattattttcttttccccagtgtactgtagggaccaagggaaaactcccmctttgctctctaatgattcactgaaaaatcaactgaaaaaagtcagcttaacaggatggaaagtatacaaatttatcaacatgtaaaggaggtttacaaaatataagaactcaaaaggccaggtggtggacacttttatactcatcttgtggttacagcaataatgtggagcttgaagcatggcaacacaggttatacgggcaaaatagcttatgggagagggagaagatgcctgactaacaaaggtagtcttattgatagcgataggaaacagacaaattcctaggcagacagggacaggtccctggtaaaaacccagtcttcaagccaaggacagtttaaatcctgaaaacacaactgacagttccggatagagtccaagaccrgagtgagaacttccatccccatcgtacccactctctcttgattgctcccttctgaattatggcttttaactaatcgaatgatgctctttccaagacyacccatggaccaatcagcacacattcccccattctaagcccatttaactgtggactcggcctcacagacagcaacctgatttcgggtcccctctccctgctgagagctttctttctgctgctcaataaaattccactctgccttattcactctccggtgtccatgtaccttattccacttggtcatgggacaagaacccagaacttgccaagctgcgggcagtgggagtaaaakagctgtaaccctccytcctgctctgtgaaaaacaggagaaggagccactgagcaccactccctcccactcaccaaacaatgggagagaagaaggaaagccactggatgctactcccttcctctcactgaactacaggatagaacaagctccaacattatkatgtagatgaaacctcacagatggcagccctcaggaaaaaaaaaaaataaatagatggtaaatattcctttcagaattttaaaggtttcagactctaagttataactttctgagatccagacaaggagagcctctgaaaaagcctgattttatccatgcagatttggatatatatttcgtggaaatatattccacgaaagacagcttttcagttatycttatatttgtagcccttctggataagcatcttgaaatatgtcaaagaagtatatttgtgagtgaattattttggtttccttgagtataattatcctgataaaatgccataggtcctttgggaaaaggctagaagaaatattaacattataatattttggaagtgcattggggtccttcctcaagaggacctggactacctttcattcaaggagttctaggtttgtaaactggctcaaatatgggaaatgattgaggggccatgactcaggtgagacttttgttcacttgacctagaactttgctgcttgcacaagaagacttcaaaaagatcatgaaaaacatgaaagtaaaaagtaaaaaktaaaaacattgactttatttttcaacataaactccaccagtcaagttgcacttgtaagcaatgataccaaccatttagtccatccttaaaagactgagggttttcagaatttagccatgtcagtatagtctctttgcattattaattaaagaaaagtgagtaattttgcctttaaagatttttttaaggtttggaaacaaaaagatgtcaaaggagccaaatcaagactataaggtggatgattaatgatttcctatcaaaattcttgcaaaattgcctttatttaataagaggaatgaccaggaacattgtcatggtggagaaggactctctggttaagcttttctgggagattttttgcaaaagctttggctaactttctcaaaaatttctcataataagcaaatactttttttttttttttactttctagaaagtttacaagtaaaatatcttcagcattccaaagactgttacaatgatctttgcttttgagcagttcacttttgctttgactggaccacttccacctcttggtattcattgctttgatyatgcttttgtcttcagaattgtrcgggtaaagccatgtttcatctctgattacaatttttcaaagagatgctttagtatctctatcccacttgtttaaaatttccattgaaagctttggtctggtctgcagctgatctgggcacaacagttttggcaccaatcaagtggaaagtgtgttcaactttaattttttaggcagaattgtgtaagctgaaacaattgaggtgtctrtggtgttggctactgtctttgctgttaattattgatcttcttcaagtagagaatgcaaaagataaatttttccatcaaaaattgatgtgtatggtcctctactgtgggccttgttgtcaaaattgtcttgctccttcttaaagcaagttatctgtttgtaaactgctgttttattctgggaattgcacccatcaactttttgtaaagcatcagtgatttcaccattcttccacccaagctttaccataaatttggagtttgttcttacttccattttagcagaattaattttgagagcaaaattaattcctattagagataagggttattttcaaactgatgtcttatcctccttagtgcctcaaattagatcctgttaagacatgtcataacrttagtacaagtttattttggtgcaaacatttttgaaattcatgcatagtttttcataatatgcttttaaataaacttttaaaagaccccttgtacagattaagtaacaatttgacagattttctatttcacgtctagaaatgccataatcagtaagcctagtccataggtccataggtcaacatatcagactcttctgattgctgctttaactctactgtccattacagtagccaggtaaccagctctaccttgtatgtggtgactgagtggcccctcccactccaggatccaattactccaattgcctttaggcttctcaatgcagtgactacagttcccactctgaggtctggcctacagacagtgatcacagagatctttaaggaygacagggctccactgacaaatttattattcacagtattggtgaaaggtatgccttctggactctcccactatgggtaagtaggccttaaatgacaaatctaccctaacattacaatatatccctaagcctttgtatttcttctacattgcmataaggcatgccaagtattttcaactttctcatgccggactaccttttggtccatatctcagcagttaaccaaccaacctgttagaatcaaactccacaagctgcaacatttaatgcagaacytttgcttaatgagtccatgccaaattcagcctgatccaacattaagttccttccaccattatcccacatccttagttatcaatttcgtacatgttctccagatttctgtctgtataaattaaaaactcaagtagtttgtttgagtttaacatacctcctcatgggtcacacattgtacctcacctttaggagactgatgagacttgagtctaattataggtctagaagcaaagagtcggttctgcagagaatcagcattgtcttgtatggcatctgccttgggggaggtcattacagtttccttaggcaatgtaaggccaatcttttataactatagwggcagagatgccagtaccactatgggtgggaatactgctgtcactgtgggtagaggaggccaattctgctggaggttggggagatctcttttactggtaatgaagactcatcagaacttagaggctcaatgtccacagcttcatcaggatctatcccacgtgttccctttccaacttagaggatcccattctttttcaattaaatgccttcattttaactgtagacctcctgccagaccgaaagctcaacttgctttgtaattcagccagttgcaagataatgctctgctttggatttttgacaatttcagtcctgcagctctaggagataaggctatacttcagggcatacatggaagctcctaagtcatttatgcagcacttgagctgggaattcaaatccttagcttatgtttttcttttaccacttgatcagcaacatcaggaacaaccaaccagtgtcattttattagttagttttctgaaaatcttcaaaagtattttatacagaggtatctagctctttacttcttgtaagtagttgattaggagtatccwatgcagatattttctatatctcyataaaaattttaggccctagtctatcagtgctccctttactcctgagaatagagttattagtgtcttgaaatattatcaaatacagaatcaattctagaaactccagaaccaattttgaaaacttatctttaaaattacgttcctctagaaccactcttggttccaaaatctgtgttagtgagggttcttcagagaaacagaacagatttattgtgaagaatgatttacaagattgtagaggctgagaagtctcacaatgtgctttctgcaagctgttgacccaggaaagctgatggagtaattcagtccaagtctgaatgtctaagaactagtggagtagttggtgaattcctatctgagggctggagaaaataagatgagctcagtcaggcaggcaggaagcaaaaagaagcaarttctttcttcctgtaccttctgtcttactcaggccctcagtggattgggtaatgctcacttacagtggggtggcaatctactttattgagtccacagatttagatgctaatctcataccaaaactcccccacagagacacccaaaaataacgcttaatctgggtattccatggccagccaagttgacatacaaaaccaaccatcacagatgtaataggataatttctcatagagatagttaatttcatcacaatttttctgtcagcttatgcatatactcttcataaacacagagaggtttatgtacatccttctcctcctggcaagcattattgattatcatcataaaaactgttgagtattaattacagaaaatatttgagtgatactttaaaaagtatgtagtcatccctgatttctaacagctgaagatcctgaggctcaggagcctaggcatagaatacaaagcagacagaaggcaaagcatcttcaatcctttcaggaaatagaaaggagcaatatggcatttagagtgtcctaactgagatgcgtaggggaaaagacaggaatgttttcttggggtagctgtggtaggaatgcatgacccaatcaggcaggattggcgggggagcaattcaaccattgtcttttctgaatctaaacaattttacatgacatttctatcttacagaatgcatttctartagtcttctatgagaataatgtcagtatttttcttaagtgtcattataatatttatgtagaattgttattaaacccattaagcattctaagaagtctgtggctcctgtgtttaccttctttcctctaaaatgtgtattacatacgcatatgtttggtaggggcagtctttttgcaaaaatctcatttggtgattttgcctcagacgactttttttgtctgtgtatatcttcacatacctgtgtttttcttctctatttaactcaaatattagtctttctgccaaaagagcatttttatagagttaatctgtatgttcattaattgacgaattcaatgaattaaaagtagcagtaatttcctatagaatttccttttatgggactagtattatgagatacatttcttcaagtggattgaaatggaagtatttgaatagaaaaaatgtcaggggataataatcatactgtagatatggtgtcttttcctaaaagattatgcaaaaagatgaagtgtaactatattaagcaagcaaaacatattttaacttacgtttgcaaaataatcttcaaactttgctcaacagatatttttttgtttggtttagtgttcctcttttcacttgattctctgccagcttatttttactgtaggtatgaagatatttcagggaaccagggttgtcatttacagaaagattagaaaaaaaagattcattttgcccaaagcagatgagtaccttttcttacttctgcctatcactgtccacctacttgagttgagacttgcctagtcccaggccttccctgagtggcttccaagagatattatctattccctttctacttctattacctgaatttatgaataaaggataagagtgctggtgataataaaggctattttaaaacacgaataaagcacttaatatataccaaataccttacattcattattatatttaactttcattacattcttttgaattcaatagcataattactgcaaataatacagctgaagctcacagagatgctgagtaacctgtagatgtcatgtagctagaaaacacaaaaggtagattttgaattaagcaaactaaattgataatttaatatcttccaaaaaagaaatccctaggcacacatggtttcactgaggaattttatcaaaaatttacagaagaattaataccaattctacacagtctctaccaattaatagaagggaagggaatactcagcaattcatattataaagcttgtattaccctgataccagaaccaaagagtaaaaatatggaaaaccacagaccagcatccctcatgaacacaatgaaaaaatgaagaccaaaaaaaggaaagatggatgactttcaaaaggattttgaaagatgtaataaaatccctagtgtagaattcaggaatacataaaatgatacgtcatgtccaattatggtttagtgcagggatatgaggttagttcaatattagaaaatcaatcagtgtgatctttcatattaatgggatgaaaataaaaatttcataattatrttaacaagtacagaaaatgtatctgacaaaatccaacacccatttgtaaaataacaagaaacaaaacttctctgataaaacagaaaaagaagggaatttcctcaacttgacaaagagcatctatacaatacccacagcttaacatctacataatggtaaaagaaggcttttctscaaacattgggaagaagagaaagatgtccattatccctttttyaattcaacatagtgcttgaatttctagccagtgcaataagacaagtaaagaaaataaaaaaattatatcagaaataaagaaataaaactaccactgtttacagatgacatgattattttgaaaayctccagcaatctccaaaaacagcttcttagaattactgagtttagaaagtttgcaggatagaagataaacatcccaaagccaattgtatttctatatattgacaatgaaattcaaaatacaatatcatttacaactccccaaaatacttagatgtaagtctaacaaaatatgtacaagacttgtgtggtgaaaactaaaaaattctgccaggcacagtgactcacgcctgtaatcccaacatttaaggcggcagaggtaggaggatcgctttagcataggagttcaagaccagcttgggcaacatagtgagaccccgttctttacaaaaagaaaaaaatttttaaaaatctgatgaaggaaatataataaaatctaaataaattgatcaatatacaattcatggttgggagtctaaacatagcaaagatggcagttctccctaaaataatataaagattttaatgtaactgtaatcaaaatgccaggaattttttttggcagatatagacaagtttatttaaagcgtatgctaaaaaggcaaaagaactagaatggccaaaattatttagaaaaataagaataaagtgggaggaatttgtctacccaattttaagaccttactatatacaagctacattaatgaagcctgtgatatttgcaggattaaagcatagatcaacaatgacagagagaaccctaaaataaacccataaaaatatgcctaaataatttctgacaaaaggacaagagctcaatattagaaagatgcccttttaaacaaatgtgcttgagtaattgaacatccattaaataaataaaccagccaacaacaacaaaaaaaatgagcctaaattgtgcacctcagaaaaattaaacaaaatggatgtggtcttatatttaaaacataaaactgaacagtttttgggtgaaaaaaatgtaacataaaagaaaatctttgggaactaacgctaggcaaacatttcttagacttgatattgaaagtgcaatccataaaaggaaaaataaattggacttcatcaaaataaaaaactcgtggtcttctatagattctgttaagagaaatgaagaaaaaggtagacagtgggagaacatacttggaaaacacatataaatcacaggactagcatgtaaaatatataatgaactcgcaaaattcgaagtaaaaacaaaacaaacaatctaattagaaaatgagccaaaggcatgaacagatattgtcctgaagagaatattcagatggtaaataagcacatggaaagctattaaacatcattacccattagggaaatgcaatcaaaaccaaaaagagatatcattattcagctattagaatagctaaacaaaaattggtaacgacatcaactactggaaagggtgtggagacactgtatcagtcatcctctgctggtgggaattcaaaatggttttycagcactctggaaaacattttggccatttcttaaaaaactaaacatggcactactatataactcagcaaatgcattcctaggcaaatgcactctgggaggaatgaaaatatgttcatataaaagcctgtatgagaccataactctgcaaaatttttttttaaattagccagatgtggtaacatgcacctgtaagtcccagctactgggraggctgaggtaggagcatcacttgagccaggaggtcaaggcttcagtgagcgaagattgtgtcttttttaatgagacaggatgagactgtctcataaaaagagaaaaaggcctatacacaaatctttaaaagcacttcattcataatagcccaaaactgaaaacaacccagatagtcttcaactggtgaatgcttaaggacactgtggtagccctataccacagaatagtattcagtgataaaaaatggatggatcaataataaatgcaacaacatggatgcacatagcatttttgaaaagacacaattatagaaatgaagaacagatgaatgtttgccagaggttgaggaggaagtgagagacagagggaattgtgtatgattactaaagggcagcatgaaggacctttgtggtgacagtgttggtctgtttattgatcatatcaatgtcaatattctgcttgtaatattgtactgtaattttgcaagacattaccatttagagaaaatgaggaaaggacacacgagatctctatgccttatatctacaagtgaatctgcagttatctcaaatttcaacatttaattaaaaaaaaaattcctccagtggtaagctgcagcttttttgtgcttaaggttgggtctggagtactgaatttttctgtgtttctgctccactgttttccttcggcacgcctggagtgcctgtgacacagagggggctttatctgtgctgcctcccacctttggggagaagactgctattgtattttcctgggcatacggtttttttaaaagcaggttttattatttaggcatcacaaggccaacagattaggaactgactgccattgggaaggtagtttgttgcactcacgaatcccgagagaaaggaacccactgtaccatgggacaggcagtacacagggaagcattaggggagaccaggaggagagagggtgagaagaaaaggtgggcaagaaacttgattgtgttttccaggggaagtaagaggctcatcaggcttgggatgggctagtttaaataatttctgcaggttctgagtgatatgggctacccatagttgtctgttacctggccctgaggtgattagggtaagtggatagtggcacagagtatgaaagctcagttaaaaaaggtgttggagtgtagactggattcattggtttgtgtttgataggaatgctcacagacaactattttgctgtccctaggaattagctaacctgagaggaatacttcctccagcattagcaagaccccaagatgtcaaagcatgaaaacacagaaaataaaaggcatagttaatagacaaggctttggtggattttgaggtggtggtggaagctttcagatcttctgctgcatcctcaggcttagaaagattctgtacacctgagcttcagggatggggctctttctgtgttcctgatccttctccagacgcaaacagatctgttttgtatcagggcaatgccatgggcattagagctatttgtgcccatccttcaatagcaagaaggttttgtctgggataaaggtaccagaggataccctttcccaacagccaccttgctgtggcttgttactcaatgggatgctgcaaggggcccgggccttgtctttactctcctgtcataacctcagtcttagccaggcccttggccaggccctatgtgcctctgcctcaaaggcagtcaaatgctgacctgtaatggtggtggatcttgggtgagagggagtttcctcctctttgctagcagcagaaaactgctttgtttcattgcaggatgcaggcaggagaggttttcctgtcccttctccagcaacagacagctttgctctgtgtgaagaatctatgcaaaatttgtatttgattcccagcaaaagccaatcactgggggtatgctcacgtcacctggaggagggaggcctctcaatcacttgcctgcccacattatttcttgtcagcaccttcagagaggggtggagaagagctggtgactcttagttctccagactaaactgttaccccgaccacacttcacctttaagaattttaaaaatgtatctgttgttttctttttatgcatctctacgtctatcaccctttcttcttggcctctgtcagtggtgaaacaatgcatgtgtccttcaaggatcttgtcactctctggaattaatttcaccatattgctttgaagtctcagctaacttatggaattaacataaaagatacatagtgttttagattaaaaggctttttattctgtttgataggggtgacattctcttgcagatttctgtgtaataagtaggactctgaacttagctttatttctaaataattgcattgcttgtgaaatgctaattaatttttaataaattgctaatatataaaaaattaaaatggtacatcttctgcccccacactccgctataaaattgtgtcctactgttgttgcttaagctggtcctgagttcttggcccgtatctgggaagaatgaggtgtgcagataactggagggtgagtaaggtgaagaggtgctctattgagtgacagtacagytctcaggacacccaaacggggtagctcctatctactggcaggttgtcccaaaatctgctcaactctcagctaagaagagacttacagtggatagctcctctccacagtcagatcatcctgatatttgcagctctcagtggagaggagatccacagtgggtagttcttctccacaggcagtcaccccgtcatctgcctgagtctgactgagtctcgggtttttagctgttcatgcaaaggggcacctgcgggcctatgccgagccatcctcagtggccccttggcttccctgccgtgctcattggcacccaaaatctggagggggctgaggtgacagggggctgatgtgtcagtgtcaccccaagtgcatgcacatctggccaggttgtgacacaggctcagccacaactttgctcggaaatcacagtgggtgccaggagcraggagaagccaggcagtgagagcaggtacttctgagcacagtgtccgcagctgtgcctgggagtgcagggctcctggcccaccaactcttaaggggacaggccttccgcctgttcctggttccccccggctccagggaatacacagccctggccatgcctccccactgcagccagctcttttgcagcagccactccagatgggccacagctgccatcaattttacaggagttgatcagtctgttttgggaagtaattgacatggtctttaggtattttcagtttaaatatggaggaatggcaaaaatgttccaaagacattacaacctgattggtaaaatataaacacacacacaaacatgcacacattcaaccgattataaccagttaggattagttagaaattagttatttgtagatatccaagttcgtaggaaactagccactacatactagaatataatatcttaaggctgtgtgcgtgtgtgtgtgtgtgtgtgtgtgtacatgttcctggaaatttttctaatctttgattcctatgaagtttgtgacacaggaaatctctgtacaattgcttgcaaatgtcatgaagacgaaaaaaaggaaagatggatgactttcaaaaaggattttctgccaaggaatataaaaactattttgtaaataattctttaagcttatggaataaaaacttgaaagatgactttctttatccgtagatcttacagctcttgcaaaaaaaaaaaaagaaaaacttcttcctttaatgtctgaaaattgtactttctaatagtattcagataaatttgatgtagtctatattgtggagtgtaaaataaatggttaatttcacgtggtgtttcagaaataatggctctcatggcttttgaatgtacaatggctgtgtatttcaaggttatgtttcaatatttaattttctattttagaatttcagcttggcagagcaggcttacagttctctgtgacatgcttttccagttatgtgctttctcccacatgtttttgatgcaggtggtcttgaatttttaattcggttctaaggaatcctctgtctctttcagttctgcagacaaaagtacagcagtgaatggatataatttaatttaatttaatttagtcatgacgtttgaggtttatgccatgtgtgcacaaaattatatacatatacatgtatatacatacatgtatacatatgattttgatgaactaatctataagtgaatagatattaagagccaaagtaaatcaaatgacaaggcaagaagattagaaaatgacactgaagctattttaatgagctagtgagtttgcctgccgttttctatactttttacaaaatacttataataagatacttgaaaagaattttaaaatgcctatttgttatttataaacctttaaagtgccatattttatataacattactttttctttatattttttccgagactttgaaagtcatgtgataaaataagtgtaaaatgtcaaggggaaatgaaaaatacagataaaattgttcatgatatttagttgactctttattgccctttctttatagaaagcacgttgtgacctccatctcacagttgacagagataatggacaagttactgtgatacatacataaccttagtttataatagctgtgctatcataaaagaatgagagaccagtagtgtggcagactagacatattgaaaagtatttcagcaacaaatacacatagaatatattgtwgggatcacaagaagtataaaaaattcccaaaggccaaaaaaacattaaaaaaaaaaacagcagttgacacaggaggtaaaataatgaagccaggttgccctggggcaaacaaaattaaacagatcttaggtgcataagtaattgtaataatttctaacaatgactaaaaaatagataacaaaaatcctaatcaaaaatagcatataaactgggtgcggcagctcacacctgtaatctcagcactttgggaggctgaggtgggcagattgcttgaggccaggaggtcgagactaatctggccaacataacaaacaaaaccacatctctactaaaaatatagaattaactgggcatggtggtgtgcacctatacccagctactggggaggctgaggtgggagaatcgcttgaacctgggaaactgggaggcagaggctgcattgagccaagatcgaaccactgccttccagcctgggctacagagtgagactccagctcaaaaaaaaaaaaaaaaaagcatataatttggacggatggtgaacatggtcaaaaaggtgtttatattgttctgatatgattaaaactagactttaataacataagaatgtatgttgttctctctagtataaccaaagaaaagcttagacgatagaacacacagagcagtaaagtaaaagaacaaaaaagagcttcagctgaaaaggatacatcagtagattgtagtaaaaaaaaaggcaatatatatcataatctaattatatttacttcaagaatgcaagaatcacaatttacattaaaagattcatgtttaaaaaattaaaagcattcagtaaaactcaacattatatttatgattcaaaattcaatattgaatatttatgattcttgtaattctttgtaaaccaggaaaacaagaaaatttcctcaaatcaattttaagtatttaacagaaatttaacaagggatcatttttgtgcttattcttttatgtgtgtgaaatactctataataaaagtaattacttactatgaaaaagatcccatctctttcattctctactttagaagccatcaggaaagcattgaatctatcaaggcctgttctctcatctgaaaataaattgcactaaacatccttggtatttactttttccctttctttataaatgtacagtctgtggagaaaggtaattgccaaatttaatgatgacaaaaggaaggccaaaatatttgcacttgtcaatgtcaataataattcttgtattggagttttataatgagcagaatttattgagatagaaatgaccatacataaccactccattaattgcctaatgtcaaacagcaaaatcaggcagcgaaagcaggatgaaatggcttcaataagtgagaggaaattcaggtataagggcaagttgcagtgggaaggcaaattaactttattccacattcatacttgcaagtgtttcaaaaccttcaaaaatctttgaaatatcttgtgatcagtaattcaggagtacatatttcttcctctttcatttatgcggtgtgacaagtgaatccgagttttgaaattcttgcttaatgtattctctttggtataagaatgagccatattttgaataaccatatcctgtagatgtgcctaaaattcacgtaatttgatcaggttgacaatcagctcttttattcattatttcaagtaatatttaatcttgttactatatgtttattacttaccagggatggtgaaaaggattgaaatgatcgagccttcaaaaaacttatggaagacttagataatagccaaatggaaagttaagaaaggcaaagttcataaactcttacagagaatagtataaaataatatgttcacatagccagatatgtgagccagacaggctcacatctgtaatcccagtgacttgggaggctgaggctgggggatttcttgagcccagaatttcgaggcagaagggagctatgatcatcactgcactccagcctgggccacagaacaagaccgcatctgtcttaaaaatatatatatatatataatcatgtgagcaaactgaggtacaatcacactagcctccttactcttccactttgcctttacactaacctcgaatagactttcccatcttctatggggctttctcatctagatctttgctgaattgtcacttcttcagaaggacattctccaacccycctgtttaattcactctctccttcatcacctgtaattctctattacaattttatcattattggtgtaatatttgtcttctttttcctctgatcccttcgccatgaatttttccaagaagttaatatttcttttggtttcttatgcttttattccacatgcctagagcaaaggacagagtaggcactgaataaatattcttgaaaaaaataaaattatcacaaatgagatatacccagttagagggtgaaagttttttttccaaggttgaagaaacaaaatattaaagtctaagtatagtgcaatcatagtattcattacttaactcattcatttaaaaattcaggccgggggcacagtggctcacacctgtaatcccagcactttgagaggctgaggagagcagatcacttgaggccaggagttcaagaccagcctggacaacaaggcaaaacccattctgtactgaaaatacaaaaarttgcctgagtttggtggcacaggcctatagtcccagttagtcaggagactgaggcatgagaattgcttgagcctgagagggagaggttgcagtgagccgagatctcaccactgcacttcagcctgggagagacaacaagattctgtctcaaatgaaataaaataattccatcaattattttttttaaaaaaatgctttctacttttggccagatattgtgctaaatactagggattaaagatggcaaaactctgtgtcttcctggaaggaaggaaagaagaaaaagaaggatggagagaggaaagaaaataccattttctgatttagctggttatggccttacacaaaaactgcattattcaaaaggattgtaaggatataaacttgtgaaatatattatcttagggtacagtaatgaggataagcccagagttatatgttataatacaaatattacatataagaatggtgcgtaaaaataactacatagttttcaagtagaatagtttgtttgaataaagacagacaagctcaaatttcctgattaagaacaagtctctgagtaatttctattacaactgcaaagtaaatgtgacttaattgacagcccagagcaaagaaaggaaaaccaaggaaaaattgtgattaagagaaaatgaatatagaaaccactggcttgagacagaatattagcaggtgaggagagctgtggggaggcaaccagaatagttagtagaagagataatggtgagtgagttgcagcagtttcttctcttctaatatactcaaagatgttggatgtgtagtatttgcattcagctggtgtaaagaatactaatttctaattgaaaatcaaagtgtacttatggaggacccagaatgtgaatactgaattgaaagataagcagaataaagcaaatcccatgtaggagtgaaatacacaaaagcactttataccagtatattgccctccacccttgttatttttgaaggctgtgagttagtcggccccttgctcaaccacacatcttaagggaaacgttaccttttgatagaaccaggcttttatggttaaatagacttacaaaactgtgaaagaaatcaaccataggtacttattgccatcaagttggaatgtttaatcaagaatcacaagatatttgaagaaaatgaacagccaggaagagaaacatcaaaataagaagtgacacaaatgaatctgaacaaacacatgacaacaaggaaaagaaaccattgggaagcagaatgcatttctatgtattattgttagagctacatcataaaaaaaggcaagtaagtgtatgctgaggtgggaacaaagaatagcaagccttctcagaaactacgttatgatgccagcataaagaatgttaaaaaggcaacttatatgggtgaataagatcttaattatctaaatataaaaccctggatctattttgcacatagagcagaatatgagaagtatggaagktctagtgttcatatagtaagcacctcagtaagaataaagaaaggcacataagcagtgtgaaaaaaaaatctgtggaacatcatgctcaaaatgctatgcaaactaaaatacagcatgggttgagctactgattgaatataagaataagaaaatggaatttacctgatgcttggaacattctccaagtggcatagaattaacctagcatcacaactgctctctcaggggccagccacactatttggttaagaaataaataacactattatatgcctattgttgtaaatggtgctaagtggttttgaaactgtagaataaaaaagtaggcaaaatacggaaatgtgttttttagggtgggcgaagatgctaaagcacagagaccaaaaattcctagatttaaagaacaaagacatttatatccttcctgcacaaaagagtcagctggagaattttccagatctgtgggtggctctccatcacagggtcatttatagactcatgttactttcatcatgtgctttaggctgggtctaggtcccgctcatttcccagctggcaaaagcagggcagagaaagcatgcagaaggcacatcactgtttaagtgtcccaacatagaatcagcatagatcacttccatactttccatgccccatttctacatcttaactggccatgcacccagcaacaaaattaaatatagaagaagaggaatctccatggaggaatacaaatgtaaaaataaaggtatagttaagaaaaggtggaaaaagagtggtgagagaaagaaaaagctaggtcaaaccattttttgcagagttggtagagaacagacaatagatactctggagttgaagaattaacaaataaagttcttagtaaaatatttacagttataaagtgccaatcagaagactaaaaccagaaatataaccagtaaaattttgaatctctctgtgtatgttggatgtatatttctcaccttttatagcaggaaataaatagatattgtgacaagaaacagatggttaaacaaaacagaagtggataaaatattcagttctggaatttgtgggagcctttactttttattttataccttttgttattttttaatattttgattattttgcttaaactagctgaatcttaattgatggttataatcatattcttttttttctgttgcccaggctagaatacagtagcatgatcttgcctcactgcagcctcaaactcctgggctcaagccatcctcagcctcaacctcctgcgtagttgggactataggcatgtgccaccagacccagctaatttttgtatttttttatagagaccrggtttcaccatgtttcccagactggtcttgaactcctcggctcaagcaatttgccagccttggcctcccaaagttctgggattacaggcatgaaccccacccctctccacctgcttttacaattaaaaatagaataatgttaaaacagggcaactatgtgtcttaaataaagatgacaaacttttcrtattttatttatttatttttgagatggagtctcactctgtctcccaggctggagagcagtggcacgatcttggctcactgcaacctctccctcccatgttcaagcaattctcctgactcaacctcctgagtagcttggactacaggcatgtgccaccacgcctagctaatttgtgtagttttagtagaggtggggtttcaccatgttggccaggttgatctcgaactcctgacctcaggctttctgcccacctcagcctcccaaaatgctgggattacaggtgtgagccactgtgcctggcacataatttattttgattaatttaagcaattggcataaaaataaaaagaaatattttctctttctactatgtaacttatacttaaaagtcacaaaaatgtgctaaaagctacatttaaaatgcttggttatctataagggtcaaggttacaagtcaactccctcttcacctctcccttctaactgaataaaaccaatcgtttcttagtttaggtatgtttttctgttagtaaactttgcatgagacctcaattaactagtttacctttaccttctagtttctctttaccttctaaaaaatcaagcaactggaagaatgattccatctgccaagrgctacagagtaattaatactggaaaatcaattatcattttatttgtacaatcctatgaaatgaaatctgattaataagcagcctagcatgctcatttaaaaatakattgtaatgtggagcgtgtagcacataaaaatgactgttttgcaagttagttyatgcactaggttctatgaaaaaaaaacaagaaaacaggtcgtgggtattagcttaatggagactgcaatatagcatacagggaatgttttaraactggaaaagccttgagattgctcaatctgtcatctttatttacagataaaataacaataagttccaaggaatgtatttgccccacttgcacaggtcttttaactctgaatcctgttctctttctgcttcaaagcaattttcttcgtcagtcttttatctttaagaacagggtgttcagtaatcactctactacaatgcaagtaagtcagaaaatttactaatactgatgtctctttaattaattcacggtgatatgaaatctgaattaatgtgacatttttactgaagcatgtgattattgtagctagatttaaatagatctgcttcacattagaattatttccagattctatacacaasagccaacacttccctctaatacactgctatgacaaattaaattagttcaaacttgctcaagggcaaattaagcaggatattaaaaaagaaaaaaaacaccttaaattctgtgagcccgttgacccgttcacactacctttaggaatttatggtaaggttcagatgaaatatgttctaaatgtgtatgtattagtccattgtcacactactaataaagacatacctgagactgtgtaatttataaaggaaagagatttaatggactcacagttcagcctggctagggaaccctcaggaaacttacaatcatggcagaaggagaagcaaacatgcccttcttcacatggcagcagtaaggagaagtgcagagcaaagaggaagaaaagccccttattaaaccatcagatcttttgagaactcactatcatgagaacagcatggaggtacctgccaccatgattcagttacctcccaccaggtccctcccatgacatgtggggattatggaaactacaattcaagatgagatttgggtggtgacatrgccaaaccatgtcattctgcccccagctctcccaaatctcatatcctcacatttcaaaacacaaccatgccttcccaacagtcccccaaagtcttaactcattccagcattaactcaaaagtccaagtccaaagtctcatctgagacaaggcaagtcccttttgcttatgagcctataaaatcaaaagcaactgagtcacttcctagatacaacgggggtacaggcattgggtaaaaacacrtcttccaaatagaagaaattggccaaaacaaaggagctacagggcccgtgcaagtttgtatccaatagggcagtcattaaacctcaaaattcaaaaatgatctcctttgactccatgtctcacatccaggtcatactgatgcaagaggtggactcacagagccttgggaatctccacccctgtagcttgcagaatacagcttccctcctggctgatttcatagctagcattgagtgtctgtggcttttccaggcacatgatgcaagctgttgatggacctaccattctggggtctggaggatggtggcacacttctcgcagctccactaggttgtgccacagtagggactctgtgctgtataagggctctaaccccacttttcccttctccactgccctagcagaggttctccatgagggctctggctctgcagcagacttctgcctggacatccaggcatttccatacattctctgaaattcaggcagaggtttccaaatctcaattcttgacttctgtgtacccacaggaccaacaccacatggaagctrmcaaggcttcrggcttgcaccctctgaagccaaggcccgagtcataccttggccccttttagccatagctggagcagctggaatgcaaggccccaagtccctaggctgcacacagcaggtgggccctgggcccagtccaggaaaccattttttcctccaaggcctcctggcctgtgatggtagggcctgctgtgaaggtctgtgacataccctggagtcattttccccattgtcttggtgattaacattcagctccttgttacttatacaaatttctgctgctggcttgtatttctccccaaaaaatggatttttatttttttatcgcatcatcaggctgcaaatttttcaaactttcattctctgcttcctcttgaatgttttgctgcttagaaattttttccatcagatacattaaatcatttctctcaagttcaaatttccacaggtatctacagcaggggcaaaatgctgccagtctctttggctagcaagagtaatctttgctccagttcccaacagttcctcatctccgtctgagaccacctcagcttggacttcattgtccatatcactattagcaatttggtcaaagccattccacaagtctctggaaagttccaaactttctcacattcttctgacttctctgagccctccaaattcttccagcctcttcctgttacccagttccaaagtcacttccacattttcggatatctttacagcagcaccccactcctcccatgaccaatttactgttttagtccattctcacactactaatagaaacatacctgaaaatgggcaaattataaaggaaagaggtttaactgactcaaaattcagcagggctggggaggcctcaggaaacttacaatcatggcagaaaaagaatcaaacacatccttcttcacatggtggcagcaagaaatgcagaacgaaattgggaagaagctccttataaaaccaccaggtctcatgagaactcacccactatcacaaaaacagcatggaagtaaccatctcgatgattcaattatctcccactaggtcgctcccacaacakgtggagattatgggaattattaggttggtgcaaaagtaattgcagttttggccttcactttcaatggcaaaaaccgcaattacttttgcaccaacctaatataattcaagatgagatttcggtggggacacagccaaaccatatcaacgtatgtatatcacatttattttactgttaacatgaatacaaatttaacagttatttaaatgctcaaaataagaggctgcttgaaaaatgaaattgtggtacagctataaaagaattaccattcaagcaatactgttgatagtatgaatatatatatattaacatgaaaataaatttaaatatattaaattaaaaagtagcttcaaaatgccatgtaatccctaattccattttcgtaattttggatcccaattttctaaatatgtatttatgctcacgaattcaaaatattctagaaggatatcactgcagtgataatagtagtcatttccaggtagaaaaatcatggaaggttatatattcttatatttaagtgcttttagtttttatgaaatgggcatttttaattacacaatcataaaaaatgcaatgatcttgcctgtaaacataaaagccacttcagcttaatagcaaagaaacacatgccacttaatatgatgtcaatctggacaatacagccaaggcatgcaaagaaatctgtgatggaaagaagatttaagacagggaggaaagaaattagagaattctaaaacaataacacattgttttttaaaaatctcaaaaattgagataaatttgctgccaatttcacttaattcaccatctgtctttattaacttggatttcctgagaaaatcgaataatttggagaagactgttgcatatgactatatatattcwaaggttgagaaaagaataattgatattcaattatgatccaagttttaaataacattttcaaagcaccagtggtttaagtcatcaatgagataccctcattcatagcaacattcaagtaaaatcatcagtatgctatagcaaagtaatagtgataataatatgtgaataagaggagacctaagatttttgacattttccatttcatacagcctctatttggcttttccgtaacttcagatttcaagtggaacaaatatccaatcaagttagaatcttctttatacttctgtagtgcttggacaatgtgccttaggcaaagttcttgcaaggtaacaatcaaagtttatgtaatttcttgaaatattctttatttagatagcttttctccaaatcgactgtaactttggaggagatactttccaagtgttttctcaggctcttcccattagagaaacaacaatgcctaagacatttctctatggcttgaaaatcttttctgcccagtcattcagacagatttttaacttgtccttgcactcctcccaagcctatgagtgagaataaataacactaatggagtgtcagggcaaaaacaaacaaacaatcaaacaaaaaccaaggcagctggctgtcacaaattctagtaatttaagtccatttgcaaaagccacamcctcaggaaaatgagcttattgtgtaggagcctttttccccctttgccgagagactacaaaacacttaaaaggcaatgtgggttcatggaaatgtaactgtttagcactaacaacacaggatgtaatgtaaaagaatttcccacaaaatgtaggccaagtatatatatatatttatttatgacccatctacatgtcctggtgatctcagcttttgcccacagcaaaagccatcccattcttctttctggaactttttctaaggtagagggttttgatcatgtgtttttgtgcccctcattgttgattatattactatatatgtgaagatagaaccccttatttagagcagctaacaaaggggactacactgttccagtttagttggactgtcccatctgcttggttaacttacaatgctattttttgcttttctcactcttgtggtctcttcattaccttctctgtcattcttcatttactttaaattcactgactctgtaccttttagttctacataataagtgtaatgcatatatccttcattatctgaatcgaacacattattgtaaacatgttaaacattgatttttttaatagtaggggcctgtatgctgttatttttagtagggaaaataagaatgcattctcaacctatgaaaacacccaaccaaattttcccaagtaataataaatactgaaacatgtatataaaactcaacaaagactttttcgtaatataaagcactaaagtatcaattatttaatcatttaacacctaattatttagcactttatgtgcttattagtacatatccattctatatacaatgatgctgtcttgtaaagtattagatacaaattacatttttcttctaagcagaagcttgaagaataaataatatgttaaaaacacaaggaatagaattaactcttaacaaagcaacataggagacaaggcatgttttgtttcttttgaagattaaagcattgaagataacccaattgaggtacagcggtgaaaagagaaagctggaagatgtagtcagtgctgctgcttgctgaaggggaaggatgagcaggagggaactggtgaggggtgagaaaggcagaaagtaaatgcctgaggtctggctatgtccaagtacaagaaaacaatggatgatttcctcctggtggttttgactctggaaatggatggctgtccatcctcaactatcagctgatgccatagacagcaacaatgggaggattaaaattcacattggatatctctttccattcactttcttggtgtcagtgtaacagatgataggaagagtgtgtgatgcattcatgtcataatcatatccaatagctacattattttatctatgtgatctaaactttaaagattttcatcaaatatgcatgctttctcttctaattcataagaattaagtttagtaattcttttctgtaagtgtatttcataaaaattcttcaacatttttactatccaatgtggtaagacagtcctccacaccagattaacatatctgttttgtgtagttctcttcaaaaaaattttggaagtttagcgacaaactgtagaaccagttcttttttcatactttatttattgttaggcatgagattcttttcatagcccagttgaccaatttgagtacctacttgctgtcaatgaaaagagtcaaactctgtaaaatgttttaagagatttattctaagctaaatatgaatgaccatggcccttgacacagccctcaggaggttctgagaacatatgcctaaggtggttggggtacagcttggttttatatatttttagggaggcatgagacatcaatcaaatacatttaagaaatacattggtttggttcagaaaggcgggacagctcaaagccgggggcttctaggctctaggtaaatttaaacattttctggttgacaattggttgagtttatctggagacctgggatcaatggaaaggagtgttcaggttaagataaagaattgtggagatcaagtattactgtgcagagaaatctctcagatatcagacttcagggagacagcaggttgtaaaatgtttcttatcagacctaaaagggtgcctggcgcttagttgattatctcctggatctggaaagaaaggaaggaaaacaaagggggaaggggattctctattgaatgtggatttttcccaaaagagactttgcagggcawtttcaaggtatggcagggaaatatattttggggaaaatatattttgattttttccctagttatgccagaatcagactggaaagtaagtcacaatatacagggttaaataaaacccatctgatgatgagaatttatgatttgtaaggcccaattccctagaccccatagaaaagaatttgggcaagaaaaaaaatcagagctttgtcctcattgctatcaagaccatttaattaatcyttcatcaaagcaaagtcatctatataagcaccccctttagatactacatcaccarcattgggtaatattgttcccagactaaagtgagggtcaggctgcttattcttgccgcccaataacgagatrcagacaaactgggaaagaagagagtttatttctgttaccgggtacagggagaatgctgggaaaatatcaccagaccaactgaaaattacagtttcccagagcttgtataccttcttagctatatgtctacatgtaagtttgtatttacctaaagacatatgtgattaacctctaatctataactaaggtctgagagtcctgaagaccttcctctggagcctcagtaaatttactttaaccagatgggtccaggtgccaggggtggctacccttattttgctcatgctaaatcaaagagatttggggagttcatttagaccccaataaaacttgttagtggaggtgtgaggagttccttcagatacccccaataaaacttatttaattctaaacatatcctgtgaagaattccttcattatcttcttacgcttcaaggcccaggaatggtctaggcaaaactcttggtgggcttttgttacattccaccctttgtataagagcactggctctatccgcttttaatatttaaattaacaactcagtcagtgctaaaacagttgtcatggaggcctgtctgttcagctgttagtgaaaactggcctgccacaatatgccttcaaggttgccaatacctcttggctctaatcataacagtggtgctaggaggcataaagatctcttggatattgtctcacaatcaccaatcctagaatgatgtcctgggatgttctagaattccctagagatatcaaaggaactatatttgcaaaattttccttcttcaatttttcttggaattttgatgaatggttacagaaaacttctctcatgagctttgactatctattcttcatttaggcatgacactttagatttgctacagttctgacatggaggcatgctctccctggactgctcccaggcaatgaccaaatgcagttgtgatggtgaatccaggacatttctttataacagagaatcccaacaatggatgatgttgctggagaactccttcctggcctagtggagacattctcagagctataccacagtatgaagccttgcaacccgattcttgaccttcttgtcccctctcgctgctgttagaccagtgtcatagtctgaaggcgctccttgcctactcctgctcctctttatccttcacaggtgttcctaccagcttcttgcaacttaaggcttctcagaggccctaaatgaacataccacataacaattttacaaaattccattaggattttagggctatgcatcagagaaggtttgtttgaacatcacctttaaagttttgcctactgagttcaattagtttccactttaaaatagatatgtccaaatcctaagccctggatactgttaaggtggctttatatttgggaaaagtaatgtaaattattttgtaattacatttgatgtgatttgtaagtataatcaaattaaatatatcacgatgagattatcctggatttctgataggctctaagcctaatgtgaaagacagaaagggagaagatcatgtgacgacagggcagagattggagggatgagtttgcaagccaaaggttgccagggatttccagcagccaccagaaactagaggagaggtgtgaaactaattcctatgagagccttcagaaaaaaacaaccctgctgacaccttgatttcagacctctggcctccagaattatgaaaaagtaaatttctgcagttttaaatcaccaggtttgtggtaactttttatagcagccctaggaaacaaataaatagtgttcgctttcctttggcagattttatgtttgatgttcttggcagttttttttttcattactaaataaatttatgagatggtgcttgttaaaaaaaaatcccaatatcaacatgactgagaatgttctttgtaatataagcacatcggtcaaaggaattctacaattcactttgaagactgctttagccttacacattgcaactgctcttctttgattttcagatagtgcaatgttgcatggactataaatctctaaaaccatatcaaactggctttgtaactaaactcctttacaaaatctttctttctttctttctttctttctttctttctttctttctttctttctttctctctctytttctctttctttcctttcttcctttctttctttctttcctttctctttccttcccttccctccctccctctttctttctttctttctctctctctctttctttctttctttctttctttctttctttctttctttctttctttctyatctttaaaaatgtttacacagtgtaggggtagctttgtttttaccagatgaatgtctgaaatacggctaagatacatcataaatcatctcgtttaaaataccctacacatttagctagtatttgaacaggtattttttaatttgatagcaaattatgacaaagtttgttataacaaatgttccaatgtaagaacatagattgtgaaaggtgccattttgtacaaatcaagattatagatttcccttctaaatactatttcacagggattttcagaactaagaaacaatatgcatacttgcagtgttttgattccagtcagttctcctcccctaaattttttaaaaaatgtaaagattgattgtcacattgtaggcaatgttcacagcttaatacagtcaacataaacttttagagagcttgatcaaatgattatttttagagtaataactgtaattctgaagatattcctgaattataacaccagtgcaaatatcactggaggtactgataccattggggaatttgatgtgctagaaaattatctctttctgaattgggaagggaatgtttaggagatgtggggctgcaagttctagtaagtatgtggagatatgcactatcatagaatcagagaatgctgtacctggaagagtccttaagtattgtttctttgaagtattagaaagagaaaatgaaggtctactttgtgagaagaatatcctatagatcatctaagagccaagatctggaagcaaattcttcaactacatttaattatgtgtccagttagttatagcctccttctcacattaaagcttcatgcctccggacataccataaagatgagtggatgcataaagtcacaaggtaaatatgacacattcctgagttttgttctcaatgtaagatttgggaacaatattttggagttttatgttctttaaaatatgtatgtgagcaaataatattccttaaaatgtatatgctcacaggataaatagactttggtttctccacattgcctaatattgtgtttgttggtaagtgtacagagagctgaatctttttatgttcagaaactaattgtcaactttaatgattttgtattgtcttaaaacaggatgttattagtgttgtgactagagaatacagaattgttgccagaatgtttggtttgccagtaagtgttttgcaacccacataagaacttaaaaaaaataaaatgaagttgtcatcttctgaactagcgtgggtttaaatatttttaatgtacacattcaaaaatgtaactcatacttgcatttccttaaacattttgatttacacacataaaatgtctgcatttaattctattgcccacaaaagtgaattttacaacacaaaaaaatatacaatttctattttacatataactttaagacatcttatattgtattcaagttgttggttaaagagaggaagttaaaagcatctagtgaaaatgtaaaagaaaattaagaaaattgtgaataatctgaaattaaggttatagaaaaatgaaatccccggagcttagcttaagcctgatggcacagatgatgatgataagggctcactgtcaatgaatatatactatgcaccagctactaatcccagcctaaggacaaagaaaacattattattatatccacttaccaatagtaatgatgtcatgacaaatagtgaatggtaattaagcagcacttgtcaatctgccttcctacttaggtaaactgtccatgcctccactctaagccagaccttctgctatgaagaagattgcattctctcttacccactaaaggacaacattctagtgggtgtttaaaaattttttttttaattttttatttttttckctctcgactgaataatttctattagaatgctgttttttttctcttttttwaaaaaaatttatcttgccttcacttcttgcagtccagctactgcccaaattctttccttctatggcaaaaaawtgtttttgaatgagttgcctatatttgctgcctcccattcctctcatcatattttctcttaaactcactctgggtttattttttttttcccagctactgaattgaaacagcccttgaaagggacacaaatgatttmcttctggctaaacttaaaagtcttgctaaatctgctcctcatttaacttgatattacatgacactttgcttttgggatacattatttttcctggtattcttgctatttcactaggcattcattcttagtttcctagcagattgcatctcttttcctggtacttgaactgcagagtgaactgagactcaaaactcagtccttgctatcttatctatctacaatcactatacatgtgatgtcatccagttaaatactgtttatatagaaattatactcaaatttcgttcttcagcccaggcttctctattgggttccacactcataaataattgctttcctaatggctacacttggatatctaatatatttatgaaatataaaatgcctaaaactaaaattgaagactcctcattccaaacatgcttcatctgcagtgttcctcattttacttattggcaagtttatccctccaattgctcaaatctacaactctgggactcttgacacattactgtcacaacccatatccaatcaataaggaaattcttttggctctactttcaaaataattcatctttcctactccaccactaacacctccatgccatcacatctctatactgcattgatataagattgtcttaataatgtattatgtttgtaatctatcttcttgcactagaatacaaactataggattaggcatattttctgttttgttcaatgatatattccaatagttggaacagtacttgttctaaactcaataggtggcttgagaatatttgaaagaatgattaagaagtcatagctgcaggctttttatttccgttctttatctccagatttgtctttaaagacctatttattgtttctaaagtacaaataatcacatatagattgattcattaattattgcttatcagagctgaatgttagcattctttcccaactccacattaatgatgtcatgtgggaggcttgaaattgtcatggtggaaatatttacaagacagcaattggcaaacactacagtaggcacccttcacatcccaaagagttgttaaacatttaccagcacactattggtccacaccagtcaattctgtccctaatagtatctcttaattagcaattatgttttcaatagaagtttttagttatagtatagatgagtggctcgaaggcaagtatactctttttcttaatgtattttctacacaataaaatacgtataaaggtggaaattatttcataggttcctagtgtctggatagggttgctggctaaattagcagatatttgtctatcaaaacaaatgactcttacaaatattttgtgcaaggcattggattagattcatacatcaaaacattagatgtagatagatgaaggagtaaaaattaccagcaaatacaagaaaagagttaataaaaactgatgtttaagaggattaacaacgataataaatatgaaaaggagaaaggaaattttcttcatgttctcaaatctgtagtcattttggaattaactagtttttatttttgctaagtagaaatacttattgctatatgtgtaacaggttgctcaaagatattatgcccattatctttttaagctaacgatgatcccaaatgcttagcaggaacaagtagagagtgacttgcactcagagcagcttaaaggattttcccagaatcctgtggtgagcctggagcaaagacctgaatagagggtttggtttttgtacagcttttcccactgtagcagtatcattagaatattatttttaggattttaaaaaatccaagtgtatagatttcaaatagcatataaactgctacaatatggctgttattatttttaacaatagttccatatttctttttcaatctctttgtacttttatgaaaattctcacacaagtagataaaaacttctgtttcttattgactagttctctaaatctcttattctatagtcctgtaggtatttattttctgctgctggctctaagtagaacttcttttatatcatctggggaatttcatttaatgacaatattattttctggatctctctgctggattccaaaatgctatttttgctattgtgacctaaggtgagagtaaataaatctttaaataaaatgttctcatgaggttttttttttcttccctaaaagaagttccccgtgtagcaatcagacaaaatatatattcatacataggaaaatttagcaggataaaaattgctgattaactctcactttctttatgcatgtatttaaggatcagagcagtgattaattccatctcagctgcatataagactcaactgagagccttttttaaaggtcctcatgactagccagtcatggagatgtaggctaattaaatctgcctcactgtgttttgagtgcaaacatcagtgtatattaaaagatccccggatgatcctgatatggatccaggtttgagtattactgggttaaatgaagataaagcactatttcactacttttaagtactatgtagctaagggaaactttatgaaatgtaacattggactgaatgctactatgttgtctgcacaacaattaatacaatttaactatacaattatacaattaaattatataaattaattataactttaacattgacataattgataaagatttttctaatttaaatacttagcattaatgcgtctgcacattaatgctagctaagtatttaaattagaaaaatcttctctttaaacagttgaagttgcagagccctctctactacagggttaatatagttcctgaaaaaatgcttttttgctgagcacaggaaaagtcttctataccacgaatatcttttgtgataagaggaaaaagctatgtggggaggcttagattttaaaggaaacttttgaaagcactgaattgagagacccgaaagatgacttttccatggtcccattgagcctctctcactttgtaaaaactatcatattagcctggaaaaccaatatctctactgaacgtgggaaacatggcactattttggttaaaaacaaaaacaccagataatgaacttacagtcagtccactaaaaacacattatttacaaaaatgacaaatgcattttgtaagttgggtcttagctttaacagtagaatatatgatagtcttctcacagcagctatgactactatttaggtggcaaaattattggccttgatctttaaaatatatttactgtataggagtttgaatcactactgtacattcttttggctgtgtgattttagctgttgtaataatgaggttcctaagccaaattataaacttgtatttgttctttttccaaagtgacgagaatgggtttgggtcatatacaatagcttgaatcattatgtgaaactttttagctgtgtgatcctaagtaggtaataatttccttaactttgatttcttcatgtgttaagtggagtgaatatttgttaacattattgtgaattttaaatgagataatagaacactttgcaaactctaaaatgctcatgcattcaagctataattaatagtgttactagtgcccaatgcacaaatgagatgtagattctgagagagttattatggggtgtcccatggaggatgagttacaacctactgtgtttgaggaggtcctgagagattttgtggataagttgacagataaaccatgccatacattatgttgaacttcactcaacattggcgggattcctgaggaaaaaaaaatcatcagcaaaagaagagctctaaaatcatgggatgatgggatgccttcasaattggatgaatggatattgaatagtaaatatggaagatacagaaaataactgttggaagatagatttggatcatattttgacacacctatggtgccaagaggaggagtttgtgcttcaatccaaaagcaacaggaaacagttgaagggtgatgatttgtttaaagtcacatttaggatgaaataaaggaacaaggatttattgggcaccagacactttgctagacacagtattgccagatccctatcattattctaattttaaatattagaaaactgaaccatagagaggttaaaaatatgcccagggacattcagccaagcattctggagccaagattcaaatctaaatctagctggctttaaatctctccrttacttcatggggcctttgagattaatctgacaagtatgtgttgagttttttggaataaagagacaaagaggcaggaaaatcacaaaggagactcactcaagatgtaacagatgcctaaagagatgtgagaggaactaagtgtttcatttttcatgtagtactttttatgatctatttgcattttctaaacgttaccaaatgctattagtcatttatttattttcaattcagactaatgtaaagggtctttaatttttcttgaaaatcgttaaaaattctgaacattttaaaagtaaataaaaatttaacgttgatccctaaaatgtagttcatttaactctcatggcattgtttattacatgactcagccgaaatgagaagattgacagggtgtgtgcattttggggggcccctggaattactcaagtaccagagcaggtgatagaaaggtaaagtataggagaaagtcaactcatctccccataaacattttctttgttctttcccagctcattccaagaatgtttgcttaataaaacacctcccgctttcatgctcagtaccattttcagctctaagttgattctgacagtgatgaaaaagacagcccattgtctcagctgtagttattggtatagtattaaattacttgctgggaaaatggatatgttagtcaaagggcagtaatttgtattcactgttgttttccaagtatcctgccctgccagtcaagccaagcataggaacctctgaaattagccccatgtttcagaatttccccaagtcatacccctcctttgctttccaggagacccaatcttttgtgctgcgcatctgtccagctcccttatcccaagaactaaacctgctgttttcaacctggctgctcagcactgggctgcctagcacttcactggccaatcttccaggttctttctcccattacagacatgtatttactaaactgatctccaagctcacagctgcctgcctggctggctgcttgcctggatttctcagcattgctcagcctagtatctgtcactgtgctctttcccgaagctctattattagctgaattatgactgaggccacgtcttactatctgttcatccaggtataacttcctctgtttattttgtcctagaaggcaggtcaggcctagttatagatcctttcccctctccactgccccagtgtagttttggacagaatgtaactcagagttggcacaataaaaaagataggaatgtttatggtgataggccataggaagaaatttggacaagcagttaacttacaaataagataaatgtgtgttccccccaaaagaaggtaaaacatagcagtaggattttcacaacctagtgcaatttgggtgtccaagaagacatgtagataattcatgtaaaaacaatgctgttgaaaggttatggatatcctgaactctctggtgttccatgcgcaaatccttatctttagaagattgaccggtcaaatcagggcctcagccttagagaaactgggcccaagaaatgttattgagacaggaatacaaaaacaagataatgctccagtttccaaactagattgtaaagtggagatcaggtcatagttaaacttcaaatattaagatattagaactggaacttgagaattggagaggcagtgagttgaattgatagtgattcatctgaatatcaactagagcactttaaattgtctcagaccaagtcattgttgagccctagttcatggaaagggcagtcatatatctagaggtttttggctgttaatttagctcatgatttctctactaagaatattcagtataaactatgaccagtacactaataaaatattgtaggaataattttatgagctttccccttctctgagtcatttataaataattactgaatatgttttttactctcatagaaacctgaaacgaaaaggccatctaagcagtgtctctaaagttgtggggcaggcctatgtgggagaaaccaaaattgttttctccgccttccattttatcattggcctaagatatggttaaaataaacatagtctctcgagatatgatattccagaatgtatgcatctgtgtatgtgtgtgtctctgtgggtctgcacagtatgggttgcatctacgattatggataaaaagaagtaaaagcagttctgctaacttagaatagtgccttattacccacaaagaagaatttgagaataaggggtcagcttcatgtctctttttgatatgcagtttggtctctctctgcagtgtaagtgtctaacaaagtacatatagaagcaattattgtaattttttgccatttaggaatagctctgattaatttaatctcaatatttattgcaatgctattgtttcaactttgtgatgaagttgaaagttgtgctaaaatgaaaacacacattttctgcccgagaacaacctccaatctagcaagggacatgacataaaaaattaactctgatcacaatatggaaaatgccagcaaattatacaccaaaaaggaaatacataggaagctgtataggcatcaagcaaatgtgcgtacacacacaccccccagaggatgtccacaacaraaagacaaaccgtccaattaaaaaayggtcaaagaacttgaatagasattttgccaaagaatatacaaacgaccaataggcatataaaaagatgctcagcattattagtcattagcgaatgactaatcagatgtgagtcgaatcatttcacatccactaggatggctgtaacaaaaaaagggttagaaaataacaagtkttggcaaggatatagagagactggaatccttacaccttactggtgggagtgtaaaatggtgtagctgttgtgaaaatcaatttggcagttcctcaaaacactaaacatagagttactgtatgatctggcaattttactatcaggtatatagccaagagaattgaattatatgtttatacaaaaacgtgtacacttgaatgttcatagcagaattcctaacagccaaaacctggaaacaagttgaatgtacatcagctgataaatagatttattaaatggagtatattcattataatggaatattattcagctataaaaaggagtgaagtactgatacatgttataacatggaaaaaccttgaaaacactaagctaagtgaaagaagccagacacaaaggaaacatattatatgattcaatttacatgaaatatccagaataggcaaatccatagacacagaaaataggctaatgatagccagaggttagaggggagaaaatacagggagtgactgtttaatgggcataaggtttctttacagggtgatgaaaatgttatgggattaatcagaggtaatgattgcacaacatcatgaatatgctaaaaattactgaattgtacactttgaaattgttaatgtcaattttatgtgacacgaattttatctcacttaaaagtactgtttcacaggctgagcacggtggctcatgcctgtaatcccagttctttgggtggctaaggtgagtggatcacctgaggtcaggggttcgacaccagcctggccaacgtggtgaaaccctgtctctactaaaattataaaaattagccaggcatggtggtaagcccctgtaatcccagctacttgggaggctgaggcaggagaaccggttgaacccaggagatggaggttgcagtgagccaagactgtgccattgcactccagcctgggtaacaagagcgaaactctatctatctatgtatctatctatctatctatctatctatctatctatctatctatctatctattgtttcacacacatacacaaacccacagaatttacaatataaagaaaggaaatggtacattccaagtaaaagtacaattcacaaaatataggcattatatattcaatgggcatctatgagagagttttctagcaggatgtttcaaaagctaatttgtgaattagttttctggaactgggaaatattttgtggtagtccaagtatcactgactcttagggaaggtcaacaagaattatattcaattggtagccaataattttccatgctctgttccataaaagaaaactgggaaatccatgtatttcctacattttaattttgaggttttttcattattattcaaacttgattaaatatttagatgacttacccatatttgttagctattatttccttctaacttaaaaatgcgttgtaattctgagatttctaaatcaaaaattatatttcaataagtataatgagcatattttagtagactgaatgtatatatctatatcatattaatgtatttaactttaattgtaatactgataattcttttatgacattattttattaacttaaaatttcttgtcaccaactaataagatgaaaggtttaaaaataatagtacttttgaagaaaataatttataattcttttggtaatatgtctaagctttgtttcttcattgaatagggtaagctttaatttatacataacaaaactaaaatgttattcgtaatgcatatatagggtaaaatatgtgacacaactaaattaaagcttacttactaaaactttaattactaaagtaggctttagtttagttgtgttatgtatacagagaaaattctccttaaaaatatctacagatactaaaatctatagcgtccctctaaatggattcaccattgaggcttagctacccatatttttcttatccagctgtattgtttttatttaatgcagtgatctttttgctcctttgcaatttcttttccaattaaatagcctttcaaaaatggcaagagatattttatgtgttggtttttaaatttagtttctgctgatgcttatttacattttaagtggtctctgtttctggactgggctacacaaccacagtatgtgcatataaacaatttttgtgttttctgttttttatagattctacaaagaaattaaaggatgttcttgaagaattccatggtaatggtgtgcttgcaaagtataatcctgaaggggtaaaacttctttttctttatatcagtttcgtatatatgcttggaagagggtatttcttaataaacaattcttggaaaaatgtatgtgtgtgtgtgtgtatgtatatgtacacatatacattatatatgtatgatacagatgtatgtatatgtgtatgtgtgtgtatatatatatatatgcacaccataaaccatttaccatgtatcataacataaacaaaatgaagttcataatgcagtgctattctagaagatatattaaatgttgtacatttttcgttcaaataactcttctatattgtatgcttgaaagaatatgaatcatttaagtgtagcgttggttcttttcctagaagtcaggaaacagcattggataaaatagagaaggagtatgcttggctctcagtctatgacccacgaatttcaatccaaaatggatattggtgtaggggtagggagttacccctttcaggcaattatttccttgaccaaagaaggattttgtgttgcttatacctggtccgtcaccttaaggaaccaacttgtacaaaaagggaggaatttttttaatcttctattttaccttttaccagtaagcttaagatttctttaagattttcttatgaaaactttgcatgtcttgtcaattgcttttgaataccatgctggaatgaatgccttttccttcctaattgcttgttaaataacctatttaatattagttgagagatgttacattttaaatgttcgatcatcattactgttagttcatttgcagcttcagaaggcaacatttacgttgcttcatacttctctttgcaaaagacccttttgtcaggatgtattaactagatagatttgtttgctgactaaaatgtgacttattttttgctattattgttttttttttgtatgtttgcaagagcacacttcttagttatctttcaatattgtacttccctgggatttctagaacttaattttagttatcataaccctcaagatattcaaattgttttgaaatttcctatcagtatttctcgtagttagctatttttcatgtcatattttcttattctctctacattctggtacattactgtaacttttaaaactctttagcctggaatttattttcttcttaaaaaataaaattaatatttggtgcctataaatgatggagaaaataaaggctatttaaagccgttccctttttctgtattagaaaaaaaatagatgtttgacctacatttcccttgtatttttctagatgccatagaggaggaggaaaaaaaaattagcagctaaacttacaaaactgagaatctcaaagcctaagaaagcagggtgggaaacgtaaagatgaattatagcactgaattgctataagacacaaaaattgtcattaatatttatattcacaacaatatttgaaaacttacatgcttatctaatctatatacagagataaaacctgtttttctccataatgatagctgctggctacaaactcagttaagtgatcttgtttgcaaagcagcctttttgcttcaattattttttatttataggactctcaagacttagtcttactgtaattatatatttcatgagaattatcagtcaccatatgctgcattttttgaggtagttattagatcattattagacacacatatcacccttttcaacaatgtaatacatttcataaatgtacagatmtattgttgaaacatgttattaaaataacgaacagttgaaaaacaaaaagttagatctcattacaacccaagaacaattctaaattaagagcaaaaccactctctgatcttagttaattttcataaaatttttccttcggaagaaaattttaaggcttatataaccatttaaaaaactagtatgtatcttctaaaagccaattgaaaataattaagaatatctaatgatgagaaataaatctttatgcccttaaagttctcttcaatacatgacctcatccaatttataaaaaattactcttacaatatggcagaattcctaatgtcaattcacatgtgaagttatcactctscattggctggtcaagttgaccccaaagttgtttgcactgatgactagttaatgatgctgaattatacaagaaaaaatggacaattgagtaatgcaacctgaatttggaatgaataattaattcatcgttttytaaaaggaacatagcttgtatcatttacataaaatgtatttgcaaaaattaaattgcttatcctcctacaacataaagctgtttaaatcgtagatgtactattttgcttataattcacttgaattactgaagttttaaagtgctggggataaaaatttaacccaaaaagatatgacctgttgaagtctattttaatagagaaaaaatattaagtataatatgtgaatgaatcatttacttttaattcccatcttttaaagatcatttgataatcattccttgaagaaatgaataagagaaatctaaacaatagccttaaagattctgtaggaataaaaaccattcaaaggtcttgagattcccaaattaataaaattacaaagtttttaaataaagaaactattttaagaaaagtgaaatgatttgtccaagattcaccagctagcttgtgacagtaaccacaacaaaaacctaattgactagaatcccagtttaaggctaatgccctgtgctcttcacttcattgaccaagccataggggagaggaacatcctcttagataggaaggagaaaggttaggggaaggcatgggaagacattgcttttgtagtgagtgtggcacttcccagtacacatacatattaatgactcatgcctgacaaggggagagagtcttattagcctccacctactcttgtgtaaataatataatgttaagaacgttattacagctagtttgtagcagagatccagtttcagtgaggttattctcagtaaaacatagtcaggccatgtaaatagtctcctgagagcagtagaatttggtagtatgaggggaaaccagtttagcattccacacattttttttttcttttgatcttggacttcaagttcaattccaaattgttccactcacagctgagatatggraagaaagtggcagatgtrtayagaaatatattttaatctttaagagtatggagagatgctaggygtgacgctaatagaaggatatcttaggaatgggaaatacatattcaaaatctaatatacctttatatagatggttatatttctsttaatcctctaaaatattttaatcacactgtatgtgttacatattatatttatctaatgtcagaacagtttgcttattatatacaaagattgatctagtcattgattctgaaattttagtgtacctcagaatcaaccggggggcttgtyaaaacatggattgctgcctgcctccccccgaccccacgcagttttagattcagtgtttctgaggtgggggtcaagaatttgcatttctatcagttttctaacttatgctgatgccactgtttsggaaccaccttttgaggcctatggatctagggtgtgttttaaaatcaacctgtaaacttgaacttttagctaaataatcagagatatgagataatgagtataaagtatcttacattaacacatgtattctttctttccttgcatgcacagaaacaagacattcttaaccaagtaagacattttcttttctattaaagtctgtcttttctttctttattctgatatgatctatgaatttctcatccrtatcactgaactatacttctgtaccaatatgatttctatagtatacaaggttgcctataatactcataggttataactragctggatgtgacaaaatttttaatccrtcaaaggatttcgtgccttaataggagcyggtaccttaatagacaaaaagggtctcaagtgtggccttcagttttgtagactctggaatttatttttctaatttcatgaagatatataaggctgtgctattatattttatttagtaaaagtcttaatttattaatttaccatgggaaattttaaaattgcatttaaaatgcaatgataaggctttgttttgttttgttttgtttygttttgtctacagtgctgtgatagaatmtgtgggggaaacataagcaaagagttgttgattttgccctcctgggaagattattcaatctgttgcttcaaccactctccctgaaaatctgttttgtaaattaagttttagaacagtagttcagttgggtgcacagaattacaacacattttcaggtgctctaaatggacatttttaatcacactagagtagctatatcaattgtcttcgccactgtagaaatatttcttgctaaaatgtatgagttrtctaaaaccgtaatattgtctcctttgggcaatcttggatatgtactagcttcttcttattcttaaattgtttgatgcttttaatgacaacagccactgtaatttcatgtccaacacgtaaagtacaattataacatcagaatgatactggtggacttagatacagatcctacatcttacaatattctataaagagrcattggtaacatggcaactcattgactgtggcgagatttactagcctccatttcagagcatggccttttcctgatttcatctctgacttttctggaaacttgtttccccaaatatggactaaataggctttatgacacttaagaggcaatcccttggagtaaatgatttgttttcatttactctaatgtagtcattcaagaatgtctacattttcaggactcggctattaaatgacttttgttgagcacccaacaaacacacctttctccacaacctacatccttactagaggctgtctgaaaattcatgtcaaaataagctctagctttttggagagtcagcagagtgagtttcttccttccttttccttgcccagtctttgtttcatgtgcagtggcttagtaggcaagcaattgcagttacagaatagaaagaattgacaaaactgagggtrttcaaggggagaagaatgacagcctgcacatattactgctctatgtgtgctctttgtctatcagtgttctctgagtgtaggatttcctccgtayatgtttcctgtcagtagatgttccttggcctgaggctgagttacgctttcataactccacaggggcttgctttattttcgcacttygtactctgtattgtagtttctyttaatgtgtataccctttgcattcagacaatatgcttttacccttaataaggaacctggggattcaaaacctaccttttgtagtgctgctgcctaaagtaatattttaaatgtctttaacaaggataatgacactgatataattattaacaatgatataaaaacctttttactgtmatctataattatccttctagaaccaaattcaaccctttccattatggaaagsataaggaaagtataacagagaaaatatggtctgaggagtctgactgaaccgaattcatcttaacggatcttggacaagttttctatctttagtttgttcacttataaaaggaagagagcatcagccttattggactgttaaaagggttaggttctaaaatgtatgtataataaatagctctgtgtcttgcacataamaggtgttcsactaatgtttagagacagtggctgtggtcatactttaatgaccaatgtgatttcatagaaaagttctagagaacatgccaaagatgaaagtgagaatattggagatataccaccaacaaattctrtttcctttattttctcaggacctcattttctcattttaaattgaggaactataactctgatgtcttctgcattcaaaartaatttccttccaccatgtggtaggagtggggaacatgacgtgtaatttgcttcccctcccaaacctggccacaatcctgagtgctgtyctgatagcagagctattgtctgttgtattgcttcacttcctacaactgcatggtgctagcacagttagttagcaaggaacagaaatagtatgttaaccagtatttctgcttctcttcactattaccatcaatatagtttcagtgatgttcctcttcttatcaaatctacctacaattataaaatacaattataccaattgtgatcaattgctttctttacaaacaagttttgaaatcaagcataaatacatttgggaaataaataaacaagtaactctccttagtttaatgataaattccaactttgaaaagtggtatttaaattcacactgtagaatgtttgttctttcatttctttaataacatttattaaacaattgatatagaagttaaaaactaatgctggggtttttaggtgatctttttgtacttttccaagtataagttaaaaccaacattactctgtcacatctaarttttatttttagggtttatctgttgtttttacttgtgctttttcatcattagaaatggcttttttggccaggtatggtggctcacacctgtaatcccagcactttgggaggccaacgtgggccagtcatttgggggtcaggagtttgaaaccagcctgccagcctggccaacatggtaaaatactgactccactaaaaatacaaaaattagctgggtgagggagtgagcgcctgtagtctcagatacttgggaggctgaggcaggagaatcacttgaacccaggaggtggaggttgcagtgaaccgagatcgcgccattgcactccagcctgggcaacaacagagtgagactctgtctcagaaaaaaaaaaaaaaaaaaaaaaagaaatagaaatagctttttcaagggaaagaacactgcagggtactaaaggaatataaatctagacattttggtaaaaaggcttagaatgtctacgaattttaagttttataggtgaaagaaattataaatcatatttttaggtgaacaagttaaattctctatttagaaaaatacctccagtagcaatgtggggcatggacttgggtagaagagaagactagatatgagttatggaagcagtccaatcaagtaagaacactagatgacaatgggcatcagaatggagatggaggcgggcagatttgaacacatttcaggtatacgacccaaagtaataggttgtactttgaacatcgaaggttacaaaaacagttacagtcaacacaacrttttcaagagtgggaaactgaataatcgtaccattacttttaattgttataccttatttgtgtatatcttttttttctcaaayggcagaccaatttgacacagcagcaaatgcatctaatactgataaaccagtgggaaattaccttataccatgtgttaatattgcaaaatctgtttagaaaaktatgctttaactataacataatgtgcattgaagctagaaatatttatgtcttcagtgtcaattagaagcttgtggtgttgggcaatttaaggaacttttctgagccttagtttctttgtccataggttttgtgatgactaaatgatagmacacatataacatatttagtgcagttcctaaaacatagtaacatttggatastgttacataatgaggacctgtaaggtaaaagactgtgtcatacacttagtgatgcaaagtcgtgttggatcatatagcccttcaggaaagagaagttttgcatggaatctgtctgctcatatgtgcattataaaaaccccctgtggagattttctttaaaagtgaacatacaagtaaggaataattaaaaactgatcttattaattgaaattatatatacwaaggtttccaagacatttttattgggttttatttttcaaggagaaaatgttagaggatttatgtgtgtgtttcagtaacactcactcctgtcctagtgacaacaccaaaaaatgtttggtgtgacaagacagtgtcacaccagattaaaatagatttcagctgaagaataaaacagtwagctatagatccttgattaaaagacatactgaaatcmtagtaaaaatattctgcttaaactttttcgaatccattatttgctttttgtaattagtagaatgtagtagcattatctttcggccatttcctattttttactaaaataatatmtttctaattgtctttctactgagtcttcataattctrgtcttaggtaaaggtagagttaatggagtatgtgactctgaagtgctaaaatagttttcatttgccaaaactaatttaaaaattaaaattcaaggttttcacactttgtactctttctcttcaaaggaactatctatatgacagctttaggggactatcaaggaactctctgaaatttgaaataatgaatagtcaattgcagtgcaagataagcataagmaatgcaatatttaaaatataaatttttctaagtgaattttaacataaaaaattgtattttgaaatctcagtaagatagccatgctgcatatttaatcaatatacttttgctcagtgaccttcatatcaatttttgagtttgatataattagttaatgatataaattagaatgcgaaatagaaatggaactgtaaaaaaaactctgattaatttaaattattatctagttaatttcatcagagttctttgcccagtaagcgcatagtattttacacatataggtactcagtcaacattggttgatagataaagtgatttctttgtggtttcaaacagttgctttatctataatagttgaatgattcatttttgtgttttaggrgtcacttattaattagtggtgagctagttagaaaaacataaaaactgaygataggctatcttttgtctgatacaaataagtgttataatggtcacatggttctgttaaaatatgagtcagatcatggaatttcctactaaaaactcactccacattaaagctataactctcttttgatgatctaatatcctgtatgctctgcccagtccacacatygccacagcttgagtctttgaccttgtattctactactctggtcctccctcactcctgctscartttcctgctcctcctcactggctccagtggaaatttctctagcacaggggcatcmttatacctcagggccattgtactagctgtcttctctgcctgaaatgtgctttctccaaatatgtgcaaatatgtgcctcatcacctttaaatctttactcaaagaatagcttctcatttcctgataattggatttaaaaaactgcaagcacattcccccaagaaatctttttcttctttattttttttctatagcayttaataccattagacattgtagattgagcacattaatgttgttcttattcctttcattagaagataagctccctcatggaaggaattttgtgtgttctagtaacatctttacccaaacacctagaacagagcctggtgcagagtgggtgctcaaagaacactttctgaatatgagaaaatctacaacccaaaactaccaaaagaaattaaggatagagtgatgacatttattttcattcactttgaatctgcatggatgaatactagtgtcttctctttagtattaacagggatttaaaaacaaaggatccagatggtcagaaataataatgaaaggcatatagaaatgtgccttgaatctgtgccaatttggcagcgacatctgagcagctccctcagtcagtcttctttacaaattctctgttatctccctaaatagtctgtggctgttccttaaggaaaaaaatgaraaagcagtttttaaaattttgaacatttgtgtgtgtgtgtgtgtgtgtgtgygygcgcgtggatgtgtttgagcccacagcaattcaatttttgaatagtcattcagttaagtctgacccaatttktatcattaatggcttcattgatatgcatataaatgatctcattctatttaaaggtcacagtcttcaaaaagcaattctaatgctgttacatgacagcaatagaaactctgatgcctaaatttggaaattttcttgtaagtcatgmtctaaggaaaatgyacagatgaagatatcatccatttatcagaaatgtctaataatgtggacaacatagaattttaggagatatttgaaaagattttactaacaagagaagaaaagggacgggttaaccaggaaacacattgaagaaacatttctcaatgaattgaaaactctgagttagaaaattaaaaaaaaaaactattagccaggcatggtggcacaatmctgtggtcccagatactggggaggatgaggtggaaggattgcttgagtctgggagattgaggctgcagtgagctatrattgggccacagtactccaatctgagcaacagagagagaccttctcttaggaaaaaaaaaaaaaaaaaaagaggtttgtgttttcccacattgcaagccctatctaatgccagaaaatgtgagataaattaattttgctccaaagaacacagtgaagaagtttgagaaasaagcttacattgtcagtaacacttcagcaataaataatgtgatgtcatcytgtagaaataatttaagaattgaggaaatttttactccattcttatatctgtaataggcttttatttttcaaaggaagattttttttttagaattattgccttataaaagttgttatttgtctctgttatctgacacagaaatgttatagcaaagtrtttgagacacacaaaacctgaagtttttattcagaaagatgcaatgaattttacagttttctgtaccaataaaaaggcaaattggctgggcatggtggctcacacctgtaatcccagtattttgggaggccgaggcagatggatcacctgaggttaggagttcatgaccagcctggcccacatggtgaaaccctgtctctactaaaaatacaaaaattagctgggcgtggttgtgagcacctatgatcccaactattcrggaggctgaggcagtagaattgcttgaacccaggaggcggaagttgcagtgagccaagatcacgccattgcactccagcatggggtggggaagagcaagactttgtctcaaaaaaataaaaaaaggmaaattaaagtaacttaaaratgtatctaagctgaggacagttcttcctttaacctaatccttttatttattttatatattatgtgcccaagtgtatgctaagtgctttacatcaatttttatcatattgggacaactctgaatgattgattccttttttttgtatatggagtctcactctgacacccaggctagagtgcagtggtgtgatctcagctcactgcaacctctgcctccaaggttcaagtgattctcctgtctcaaccacccaagtagctgtgacaataggcacatgccaccatgctaatttttttatttttagtagagacggggttttgccacattggccaggctggtcttgaactcctgacctcaggtgatctgcctgcctcagcctcccaaagtgccaggcatgagctagcatgcccagcctgaatgaatgatttcatataccactttatatagagggaattaaggcttagagctgtcagaaaataaaacagtattttgcttgctgagccagagagaactatactttagaaatttcagaaagttttcctgcatgctgaaaaaagaagagtcaagaagaaatgtgttgcttattaggagaaatgccagtgatgcaggaatttttgctccttagttcagmtaaatccaggttcttgtctcatgaccaggaaaaattaagcatgcggacacattgaaggctgaggagggcagaatttattaagtgaaaggaaagtgctcagaaaagagaggggtcctgcacacaggttttcacctcacaaattgaataccaggccaccacacatgagctgaagaggtcaggctcctcccctgcataaagcacaaatttttggtggctctgccyaatcattccagtgcacatgtgggcccttagtctgagccactacacattgatttatttccctactgagcatgtgttaagggacagaatttttctctgtgaccatgcttaggcaagcccccctgtgctcaataacctgagtgggtcagaggttctctgtggaccctcctttatctgcctaggcatttgcctcctacttctattattcttccctctaaagtggtacacaagaggtactgcagttagaatagggacgaagactgatcttaactgcttcctgctcttagggggcactgttttggaaatatggcagtcataactctctcgaaagcctatttaagggtctctgttaaaaggggccattgtttgagaytctggttgcatgatcgcttggagtttgatggcctgaaggtgagaagagacaaacggagttattagaagacatatattaaaaccaaacaaagagggatgggtaagggcagctgaaaaatcccaaggctgtcagcatgcccagataactggtggctataattatgcctgctaagattggttgcatggggcttggctttggtttgctcctttggtcttattttcccagaggaacctctgggttatgggcaccctatttactcctatcagatgtcaggattwgcaggataactgctcagaattaaaatattgatccagattattacattacccatgccttttgtttcttctgagttgtagccagaaattgctggttggttcacaggaataagagggttaatgtaaaatgtaggcaaaaaaaaattcaaaacaactaatgagactagaayttaatgacaaatgtgtggtaagttttgaaacataatttttatctccccagtcctcatttttgttaaaaacaattcatgataggactgagttgtttgcaaaatagacttcagtcttatacttggcctgacagtttgcataaagtgcagcaagaataattattcttacatacacttttaaaattgcttttgatggaattctgttccataaggaatctcagataggactttggaaagcccagcccagccatgggttagcaccctcaaatacctatgaattgggtgaattcctctcttcttgaggttcctagaatatagagttcctgggcccattagaaagtgacattctttactcattacagattaggaaccctgtatgaggactgtgtagacaaggtatgaggccagttttcccaaggggcttttattgactctgcaactcaagcttgattccttaaaaggaagcacacctctccagtcaaagccttggtaaaacaaccaatctctccaactgtgtactgttgccagagaaaatgaattcctattgcactgatgcaaataaccatattgccataagttaagaatactcacagatagtttccaaattctagaagaaccaggcaaagagaaagaagtatgctccaaattttgttcacatgagtatagcttactcaattattaaagactgtaaatagctcaaaataaaagttttcttgactctgaataacaaaacaaggaccagcaatgtttcaagcaaaaggttttaaaaaaagattacttcagtttyctattagttcagtccattcagttaactcatgctctgcttgatattcgtgaatgtttcagctctttcatgagtcctgtacgttttccctttagtscartgttasagtctccaaagttatcagaaacttgtattggagaacacccatcaaacttttatagctgattattaaccatcttttgaaggggatcaaaagaagacaattgtttatgaataacaaaatgaccagggtagttayagtcagaaatgtgattgacaaaatgtggttatctctgtggcttacaataacttaatataacaaccttaattgtgattgatagcatacactcaaacattagaattttagaaatcccataaaattctggaacatatgttagcattattcactaaaatataacctgaagaaaattaaacatcattttggagatcccatgtacctaaccatgttaaattattctgtttacctctcttcttctagatgctctagggaccctctgtagcatccaaaagctaggggtcaggaaagacaaccttgaagctgaaatttgatttggggaagcctgttaaatgttagaggtttaaaacacttgataatttgaaatacaatcccagttggttattttgttaaaatgatgactcaaaaattttaaaatagggaaaacctttactcatcaagaggaaggacttagctttccaaacagtttgtctcctgtcttctctttcttttccttggcagtctatttacaaggcacatgaaaatctttcattattcattaatattacatagaaatcttcaacaagggagagagagagccaaattttacccttacattagtttactattaatcccaattttctaatgaaaccttatagacaattctatccaatctaagccagttggaccatgaggtaagattcttaaaaaccttttataaccctttacacattttgctaaagaacagattagtaccttaagaaaaccttgttgtgcttttatttcattgctcagtttacagaaaaaaacatataatatcctttgagtttagtcaatgttcatacacaggatttcttttgcaatattaaatttagaaaccttccacaactatttaaacctttagcttgaccttatctaatttaaaacaatcctttaaccctaggcaaaaagttacttggatttccatgccttcttacaatcttttcctgaaaacacattttactsttcttacacaccttgcatgtcaatctattttcagtggtggtctcaattacatgttataatggtaactcttagcaattttaaactttaatgtaaaatctgataagttgttttaattatgtactaggcaccaataaagtttgattccttctagcctgttcaagggcttggttaattcagtatgtcctcaggccttaccaagttgtaaagcaggcaagttgaacagttctctaaggccaaagaagcagtttacaaccttaaaacatttagcgaacctagtatctgacttccataatgtagaccacctatttaaattttaatgacatttgaattttaccaataatctttaagactttttatttctcaaagattaaagctacatgaactaaaagttactacagcttgtattttccttgaaaaaatattcgatctaatgcttatttttctttaggccaattaattagagtgcttttatataaaaatcacatatataactacatagacagacagaagaagatccagtagttgtaagatttttcatttgccaatctcctaattggataattggcctgagggtggagcccttcaagaaacagaggtaacagtacctaataagcagatacaggtggaagacaaaaacagattttgaaagggatctatctgcctctaattactggggttccatgaggaaaacagaggtttctccaaaaatggaatacattatatcttttccatttttcccaagtagtctctgttcatcagaaattatcttagggtctctcatgagttcattaagagtggcaagataaaatggaggaagacaattcagttgactggggaaaaaacctttctcagaaaaacaagatccatgaagaaaaaaacataaaggtcttttaaatatacctatagcttggatatccacttttaattaacttgagcgttctttaagaaaatccttttaaatccctagctacccaactttagccatgccagatgactcatatttctggcttttgaactttaccaacagtaaccttacaggtgaaaccaacaagccccaaaaagttatgatttaactgcgagtatacaaggtattttcaaaggggtggtaagcagtttttacaaaaactagaacctctaagtgtagctcagagaaaggaagattcacaaaagaaagctagaagctgttcatggagcaggagagaatcagcaaatggtagaagtcacacaggtatttgccagaaactactcattccctaagccaggattgatcccaggctgccaccgtaaaatagcggagacaaaaacaacatactaggcagtttgccaggctgacttgaatagtgggctatggggtcctaggtccttatcccatcctaaggtactcctctttctgacagaaccatatagaaagacatgcagagcacaacagattggctacagcttgagaccaacctcataaatactttttgattaatcaaaactttacggagaatatatccctaccattccttttactggtttgcacagggagagggaggccaaaagtctgactgttaaaaaatattttatctctttgccagcatgtcagccttctgggttcccctcccctgagctcaattctaagccaaccagtttaagggttgagaaataaacttttcacagtttgaaggatgcatccgagaggagtgtcctgtagtatggagacacgattaaccatctgtgaagagaggaccaagggggacaaagaaggcatttttttcaaaggagccccccagctcagaatgcatctgtaaggtgcacagactgaagacgaatggctactcatctagaaagaggagcaaggcatccctggttcctttctcttcctatcgaatgcccagggtacatgagagagagaaggaaaaagcttcctctttccttcttttatccttatatccctgaggcctggtgaccacaacagggtgccacccatgggtgtcaatgcagctttcactcatgttaacagttgggcctagggggtgggattatccgcacttccccgtgcactcactgcctttccccctgctataagtagcctttgagttccctacacctaatttatgccatggatactagtatgacctctatccatgatatgggaggcttggcttaatcagcaggaattagtcatgctcatctgtggtgtttgccttttaacttccattgttgtctgcctctggatccctaagatccagttttctttcctagggcttcaacccaaagcttggaattgagtttgggacaaaagaattgcctccttgtcataagccaaatgctaaggtgaagctctaaaattgggtcctctcaaacaagggagagaaaagggtgtcctgtgaattggagtcctggcctaataaaacacttttcaagaaaaatcctctggcattgagaagccccctgtactcacagggctgtgttactaggttggtgcaaaatcaactgtggtccctgccaatctaggtaatagcaaaaactgtaactaccttcacaccaatccatcaactcctgaccttgtggagaaaaaaaaaaaaaaggcttaagcgtagggcagggaaatgccwggggaagaaacctcttgttcttatgcaaacagagagaaacttaattgttgtcccactgagctggactccttggccaagggaggggaagactgtatggatgcatggcggggaacgctggccagctgtctgcacggggcctctagcccccaagattgccctggggcctgggcagcagctgcggctcagtcccgccctgcatggctgttggatgccgaaagtacatacagcagacacgcagacacacggccatgtgccccagcacggcgggaacgtgggggagggcagggagccaccacttccgcatctatcctatgtggcagcagttggggttggggtggaacactcctgatattgtaaaagaaaagataggtgccattacagtcctgggaaaaaaaagaagaaaaatgccatagcaaagactgggttggactgaggccgacattcccaaacccaagagtgacgcaaggggtgcagtttcctctgccttcagaaaaagtctgaggactggaaggcccagaaacgaaagtgaaagagattcttgggttcgcattttactcrctcttcctcatatccccatataggccatcaaatgatgcaggaatttttgcttcttaattcagctaaatctgggtgcttgtctcatgatcaggaaaaattaaacatgcggacacattgaagggtaaagagggtggaatttattaagagaaaggaaagctctcaacaaagagagggtcctgcattcgggtttccacctcacaaattgaataccaggccaccacacatgagctgaagaggccaagattctcccctgcatagagcatgaatttctggtagctccaccccatttttccagtgcacatgtgagcccttagtctgagccaccccacactgatttatttcccttactgagcatgtgttatgggacagaatttttcaccatgggcgtgtttagacaggcctcctgtgcacagtgacctgggcaggttggaggttctccggggaccttcccttacctgcctagacatttgtctgtgtcctgcctctatcgttagatattaaagttcatttttccttttggttggttatttttctggctttcatcgttaaattacaggcagcgattttaatgagcatcgacatgggttctgaaaggctctgtaaagagcatacacttgggacttggcatatttttccttcaaaagagcagataaattctttgccccttatcagttaggtggtgagtggaagtattagaatttgaaacacaattgctttattctgaactctttgtttttgtttgttttgtttgtttgttatgttaccaagttaaagtcttggcttgaaagagctgttttaaggtataattatggtccaaaagcagatccagagaaaaactttcaccaatttctagtcctttactacttctggaagttcacattttattaccagcttttaaagcagcaacaaggacaacaatgaaccatgcatggtttgttaaatgcatatgaaaacatgtgaagtaatgtggctttgaggcttcttcttcaaatattgtttcaaattatgaatttttaaaatggatattctttacacaaaaatttatttaattacatacaatgtttactatgtgccagatgtcattcagatgctttaaaaatagtaaataatatgttcctcctaacaaatcaagaagtaggtgctattattctaattttatagatgaagaaattgaggcacagagagcttaaattgtccacagtgacacagcttgtgttggattcaagagttgatccaggtagtctgacttcaaagaccatgcyccttatcatctgttatgttgctaaacaaaatactgattatggaagacctaggaacagaaggaagygctaccataagtaactttgcttctaaccacaatgcttgtgamtattttcatcccacagacttcctgcaactttgcaataaaatcaactcctggttcctcatgggccttcatacatgttgaagattagctatcaattttggtcactcacccaaatgaatgtggaatacttctctttaataggtcatctctaaggagctctcttagtaagagtaggtgttccttttcaaggaaactatttggatcccatgtctgactgttggcctaatcgccatgtttttaagtgttggctgaattcattgtagcaaattgcttttttggaagtacttctcctacctgaggctattcttcacattttttatattactcagagtttttagttatatagttcactctactactagaattgacaatattctttttttttttttttttgagacggagtctcactctatcgccaggccagagtgtagtggcacaatctcagctgactgcaacctccacctcccgggctagaattgacaatattctatggtggtggtagtaatttatgaaatatagaagaaaatgaagtctttttactgccagcaaaataaatatctgaagtgtccttgtgagaatcaataagcaaagtgaaactaaataaaaaagttagattaaggtataggcagaatcttgggactattgataaataaagtgtttggttttattgcctgagattctattaggtaaaaagcaaacatcgtatgtaaacttaattggcacatgatcaaatctataaaaatttactatgtctaatgatattcctgaatgtcacatttaatattaggtttgtcccaaataatacaataataaattcggtcaatctccatgtctttcccccagtattattacataggaaaaacaaactttctattccaaagttaattttattcttacctgccagcaatgtgaacaaaactaagagcatcagccagccaaatttcctcttgcatctcagcacattaaactgggtaaaaaaaaaaaaaaaaaaaaaaaaaaaattggccttcaagggctacctataaagcccatcccttgcactctcttgatctggacatatgtggctttattccagcctcttctctgtaggtcttctagtcctttcaaatgccctactggatagaacccaagaccactccactggccttctcctccatgtggtctacatctgtttcccagaaaatactcatgcaccattgttcctgcagtccaaaacgaggagttttggccaacttaaaatagtaccattttcttgcctttgtccccaaagcacccatgtgcttgtcctcaatttcctaggcagagtcaaatcctggtgcactgccttcatctgcaaggagaaaccaagctcttcactatggctcctgtgaaacgctctcattaagcttgaggttggaagttgtcttccatcaccatttccgctaatgggcatggagaaccttaacaccaccacaattctctccaaataaatggctaatcatttatatagttctgcaatgagtatcagagagtaagatcttaaaatatgtttctttggaaagtctgcatatgaagttttaggtttatcaatagagcttggcatttagttgaaacattaaggttaacctctttttacattgtcaaaagcgataatcaccattagtgacaagcaaaaaatatggaaaattcctttctctctgagtgcctgctgtgtttatatgactctgtattggcttgttcacagtgatcgcctgatttaatcactgcaacaactatgtggggtgggattattattcccagtttagagaggagcaaactaagtttcaaacaggtacatttttcaaggcattacagatactgtggaaatagaaatatctaactagaaacttcttcctcttcctgctatgccatcacaggtaagacaamcatatcccattgccagtgttagcccaggacggcccaccctatttctcaaataggcactttccatttgttaaacttggatataaaaatggtttgaggtcatttctacttctaatgattttgaacacagcacagaattttaacatttggttggatcttaaaatacatgtttacatttttttttgcagacaatagattttgaaggtttcaaactattcatgaagacattcctggaagccgagcttcctgatgatttcactgcacaccttttcatgtcatttagcaacaagtttcctcattctagtccaatggtaaaaagtaagcctgctctcctatcaggcggtaagtttacttactttaaacatttatatagtacaaatttcaaaggctaaataaatatctagttatcataaaagatgaatgatgatttgcataaaaattgttttgttacagggtttagacttttacaataagattgtgtgactcatttaaaatgtttccagtaaaattatagctaattasagaaaatataatttatccttatctatcacttgctttagaattctatgtataggtaataatttgaagacatatttccatcaaatttggaaaactgctcttgttaaataactagatacgtatagattgctgagtatttgaaaatgtggtcacaaagcaactatatctaaaaaggtataatatttaatatctattttgctaattgccaatatactttcacatgtttagatttgtaagctcagaacagagatttgatttttcttttagatactgtaaatttgtgtcaccgtagagatggtgattctctcattatgggtagctttttagagatgcatacttacattaatacctgttgtatcaatctccctccagtcaagaaaacagagatttcactgtattacccaatgtaaaacagtgtaattggttaagctgtttcaaaggattgaaaaagcaaaaagagamgacaggtgatgtagatagactcaaggaaacatgtgctgcccttagatggcagtaatcaccacctagaagccctgaggaaaggattccttggagctaggatgaaattctgaggtgaggggttgcctagcaaacctagcccttggacttttgtggaagtgatacttcctggctgcctctggtaactggggaattcaagactagtctatagcccaggaactcagacctctgaggagggtgcatcaccgtggcctgtcccagattgcttagcagggagctcattgtgcttttgttggtgtggacatgagctagagactagagcctacactgctttagagtctgcaggtagagacaacatgctaccgccaccgggctgaaacgctgcagagattcaacaggagcagcaggttctcttgctgggtccagccccttctcccgcgactccccaccccaccgccccaacccctgtgccttctcgtctctctctagcgccctctatggatagaacaggaatccactggcaatgaagaaatgtctkcagcagtgtttctcactctttgatcacaggactctgtgaactcttaaaaattgaagacctgaaggaacttatgtttatgtggatgatatctattgatatttgccatattaaagatgggacattccaaaaataacaagaatcaaaccactacctgttaacaaaaaataacccattattatgaaaaataactattttcaaaaacaaacaaaaaatagtaagaagggtagcattgttttgcataattgcaaatctctttaatgcctggcttcatggaagacagctgggtaaattayatctggtgctatgtttctgttactggatcatatgtcatatagcctcttgaaaacttcactgtacattcaaaagagaataagagtaagaaaagcaaataatatcttaataccgttatgaaaattattttgaccttaaaaatctcctgcaaggagctcagggatcccaggagagccacaagtctagcgagtcccagctctagtatcacaaagtagaatatagaattgttggtatagaggctggacacggtggatcatgcctgtaatcccagcactttcggaggctgaggtggacagatcacaaggtcaggagtttgagaccagcctggccaacatggtgaaaccccgtctctactaaaaatacaaaaaaaaaattagccgggcatggtggcaggcgcctgtaatcccagctacttgggaggctgaaacaggagaatcacttgaacccaggaagcagaggttgcagtaagccgagatcgcatcactgcactccaggctggcaacagagcgagactccatttcacacaccacacacacacacacacacacacacacgtgttggtatagagataagttcaataatggacattctgataaataaaaatgcaagaacatgtaattaagaaatagatggttgagccataaatgaaacttagacaatatgatgaagagtccataatattaagccttatgttgtactgcttcccttcctttcttccttccttctttccttcctttcttccttccctccttccttccttccctccttccctccctctctcccttctttctttcttcctttctttctttctttctttctttcttctttatttctttcttctttatttctttctctttctctctttcattctttcgttcttttgttctttctttctttctgacacagggtctcaggcttgagtgcagtggcatgatcttggctcactgcaacctctgccttctggattcaagagatcctcctgccccaacctcccaagtagttgggaactacaggagcatgccaaaatgcccagccaatttttgtatttttagtagagatagggttttaccatgttgaccaggctggtctcgaatgcctggcctcaagcaatctgcccgcctcagcctcccgaagtgctgagattacaggcatgagccatggcgtctggccttcccatctattaatgatgtaacttatttttcataaagtaatcacatgttgatagaagcttttttaaagcaagtgtacatattccacatgatagccctttaagatgtatggtgactaatatgtttatcatcatttttctcttcttagaaaatatttttagattcttaaataattctctttcaatcatgaattgagaggcctcaccgcacttgctgtttttctcggaatgagtttcagtggatctattcttaatgtgtagtattacagtttaatagtgttttgggttggacattttaaaatgattctagaaattaaaacttccttgttctctgctgcatgctataaatgtatcacacacataccttaaattgaattaaataagaaagttgtcctgtatttaattctataagatacaatattgtccttgagttttgagaaagaagagaaaatatttctggataatgttgtctgtctaaataactgtatcacatatggaagaaagagaacaattctgataatttaggtgattttgtaagaaattcaaacctaaaacttccttttcttctaatagcctatattatctactgaatagaagatgccagatttattaggggtaaaaatcaaatcaggtttcaaaatggaaaaaaaaaggaaaaacagattgtacttgaatttgggaaaattacgcattctacacagactacatgaaaggaatatgggctatgtagtcctcatgcagcaatgattaattaaactctgattccttttcaaagcttggcctccacattttacaactaagtacatagtgtcttgtccaggactatatctaaccctatttttttttcagacccacctttgatagttatttttttttttcctgaggaagaaggaacaatagacaacaataaaattttcaaggctgaagtagccttgactcagaaactgacaaaagaaatgcctttccattcatagaatcttgctttgcaataatctgttatctaatgtataacgaggtgtttttgtggctgaaaaataacagacttttgaacagagaggggctacaatctggtttggtttatgctgttatagttcaccatatttcattaccacagttccagcaggaatagagtaggtagtcttttactctatatagcaactaaaaaataagggcttctcaagaaaaaacaaaactgaaaaggaaaaaaaaattatgctcactactgaatgataatcaattacaggatacatagtaaaagcaaaacatttagtttttatagaataaaaatttaaaaataattataaataggcataaaggttgaatgtatttatacatatgcatatgtatagctgggttttgtttgactgtaatatgtaatgatccatttggcatttcatgaagaagwtgacttatttttgtaatataatttgttgtaatataagtgcctcttatcacctatttaaaaatgatgtcactactactgtttccrtatttgacttttgatttttgaagatatcgctaatgcattatctctccagctttttcataccacttctgtgtcattgcaaatgtcaggtctctaatctctcgtctctgccagttcaatgaccaatttctgatattgcttccatccttggggcccaccatttgttaatttccttctttatacacttttaaaatcagttggaatctttctttttctacaacatggttgcagaaagatggttgaggctcacaacctcaaccgtcaatcaaaattgtcatctcccatatcagtccctacaacttgaacactcaacataacctaagagaaatttaataaatatgcagatatctgtcactataaattcctactacccgatgtttatatgaccttaacacttcttcagtttttttaaaacaatgtaaaaattatttattattggcactgtatcctagatcaattatgttgattttttaaactttttaaagtttatctaaatgtcttctcatttcaacacatgactttttttgcatcatataacaaattggcactgtcagacataacgtacctcaattactccccacacaacctacacagctcacaaataatatttacttactgtattttagatggaacactttgtctggatgtccaaatctttcaaacagttagataccaaactaactgtgtttgaaagttcattaattagattctgcacaaacctgctactattcctaccttctattttggtgaatagcatccaagaatctatccacttcccagtcctaaaatactggaatcctcccaccttccactgcgtcacttcccatatttagttaatcacaaaatactctctagtactcattgtaactgcttcttcccaaacgttctgccagtgtcatagtttaattcatcataaactatcaattagcaggctctcagagcaggccctgacttcccatctccaaaacgttctttcaaacagaagcctgattatattactcctgggtttctaaatttcaggccttcactgtcaactgtcagagcattttttaattaaacttatttttcaagcaaacttaaatcctcaatatgtaaagctagctaaagcagagttgctttagtgaagggcatgggtgctggagatacatgagtacatggagttgcagtcatccccaccttttgagacattcattcccacctgaagttacctttatgagactccaggatccagagtcacagtgaagaaggtgataaaatcagagttccatggccatgaagcaccatgtcacgtaggctatagcatctgcctacagccctattcgctccatctccctgccctatgcaccccatatccaactatttgctgtgacttaaacctgcttttctcactcaggactgagttttcttacataatgtttctttgcccttatcgcatgaaaacccaatgcttccttaaagcctcagctaaagtgtcagtcttaattaaatagcacgcggtgtgttccatactaggaattcaatgattaataagatggcacacctggagtgtgcaactgggaagaaaccctggcactctggtacttttacaagacaccatttgtcccttgtagcatccctgtcccttctccatcgccacccatgccaactccaaccatttagtattcattaactgaattaactgccttcagagaaattacctttctttacatataagatagcaatcaacagcaattattagtaactgttagtttctttaataatatagtaattaaaataggacgtaatatagtatattaactcatttaaacactcatactgtttgtttctgttggactacacaatgtccaaaatgttgcatctgtaatagaaaatgtctggtacttgttgcaggtcagcgtaacartttttgttgttgtttcttcctaattgttttataagaaagaaagagaagattttcctagccccctttaaataataataggcactcaattgataggtgtgccatttagtaatttattttattcattcattaattcatgcatcctatctatttatttaaactcattatatgctagaacttccacaggaaagctgaggatcctttaaagtcaagcaaaaagatgaacaattatgtgttcagttatattataataaaataaatattgtaaaccacttttgaactgactatgtggagaaaagagtgaggtgcctacaggagcccaaataaaactagaggaaaagaggaggtgaaccgttgcaggagtcatccagtgtaaattggagttatccaggtaaagttggagaggggagtaagtaagggtgggaaaggatgtgaaaggagttccaaggagagaaatcaacatacacatttctattcaaaaattttttaatgtcccatcaaagggcaatgtatgaactgtaagacattcagtattcatagattcaaaattcatcacttataaattgatatttacttttcaagttgttagggatacatcagtgagcaaaatgatggctcgtgcctgtgatcccagcactttgggaggccaaggtgggcgaatcacgaggtcaggagatcgagaccatcctggctaacacggtgaaacctggtctctactaaaaaatacaaaaaattagccgggcgtggtggcaggcgcctgtagtcccagctactcgggaggctgaggcaggagaatggcgtgaacccaggaggcggagcttgcagtgagccgagatggcgccactgcactccagcctgggcaacagagtgagactccatcaaaaaaaaaaaaaaaaaaagaaagaaaatgaaacccgtttccattctagtggggagaggcagacatacagaaaagtaaatacgtgtaccatatcagatggtagtaagtagtattggcaaaaatgtatacaaaaagaggctggagccttggcacagtggttcatgcttgtaatcctagcactttgggaggctgaggtggggggatcacaaggtcaggagtttgagaccagcctggccaacatagtgaaacccgtctttactaaaaatacaaaaatcagctgggcgtggtggtgcacacctgtaatcctagttactcgggaggctgaggcaggagaattgcttgagcctgggaggcagagttgcagtgagctgagatggcgccactgcactccagcctgcrcgacagagcgagactccatctcagagaaaaaaaaaaaaaaggaggctggraagtgcagcttgaggctgaagatgactgggaatgtgggatcctcatgattcacttaaactaagataggagttcaaaaaggtcatttctgttcatcccagagcagatgatgctcatgaccttgtaagtatcgggcatggcctggagtggaatgaggaaagagggcctggcaaggtcaaagccccaaggaccttaggagactggaggaagatagacttgttaggagcactgagaggtctggatctggcctggactccagttgtgcttctgcagaagaggcgagagaggtagccaaggccaggtggggaagagttttgcctgtcatgctaagttgtgaattttatccagaagaaatyggaaagccattatgagattttaagccagaaaataattacactgctagtgaggtggcagctatcatgaaggagaatgaggctgacggtataaaagggtccagaagatatttcagattgagagtagtaacagctatctctgaaaaaaattagatgccttatcattggtccccaactctcccattgcttgtttgatgaggcaatggttaatttgcactgtgatgctacacatatcaataagctataatatcaataggaggattatgtcattttatgttttctgtgcatttgagtcacgccccaagtacttattttagatagaaaaggaaaatgtctgtcaggaagttaatcaattaagaacagaaaattgtacaatgagaatgagatacttgaaccttgggagaaatgttctttcaccaaatagacttactgaatgttcttgctgaaaggtatacttcattaattgtgctgagaagatatttctcttattaggactgtcttgaggatattaaatatatatgtgtgtatgtgtattttttattactgtgctgtaccttaacaggtcttttataactgatcagttatttcagtttccacaatgcaaacaaggaaagtcagggtccccaaaacacaaactgaacagactacatagcttgtgtgactatgagataggggaattcctgacacatagtagatatttaaaatatattggtgtatttcttaatgtcgatatacttattactgttgaggtaataaacttactgacacagaaatgctccaggaatacagatgaaataaattctgtctactggccaattcatatttatttatatcaacctttacatttgatgtacctctgtagtattgaattcatacttctaattattgtcattagaagtaatgatccacagattattttacttcaaaaaatattttatcctgccaacctcttccttgcaataattttgtggtcctgtttttaacataattactgccagtaagggatgatttctcttcaagtctctcctttaatcattaaatggtttttaatatgttagacttgaataatcaggtttcttttttcttccatctgaatattccaagtaaaatttggtcctcaaattttccacctttactttattattagatttattcacccaacacacaggagtttctgtattttcattttcatcttaatggttgcatactaaataatagtgttgtcttaacatttttgtactttcatgttcaaaaatatttatttacagtttgtaatattctagcaaaaggaaataagagatttaataccctgcagaggcccaaatccatcataacattatttcactcataaaaacacctagtcatagctagaaaatatgcaatggtgttggacacttgctttgatcccctggaatgaaagctctgtggaaatgggattttcctgctttgttccatgctttatcctcagtacctggggtctggttttacatgactaatcttaagggtcctgaatatttattgtgtttatgattataaagggctagttgtatatctatcaaaaacacagatgagcaataagaaaaatcatacrtaaagatttggcaaatatatgtgcatgtttacacatgcaagcacacatataaatacatgttcacaaacatattatgatggatggcccaagacatgggccaaatggaagatgaaaatttagagttcttagctctggctatggtttctaattttstttcaaatgtttatgatttaatcaatgtatccacccttaagagtcttgaaaaccagactcttaaaacaaaggtcttttattgagaggcagaagacagtttcctctgatttatttttctctgtccagcctcacagaatcatgcttagagtataaaactccgattctggccgggcacggtggctcacgtctgtaatcccagcactttgggaggccatggatcacctgaggtcaggagttagaaaccagcctggccaacataaaaaaaccccgtctctactaaaaatacaaaaattagctgggtgtggtggcaggtgcctataatcccagctacctgggaggctgaggcaggagaatcgcttgaacctgggaggcagaggttgccrtgagcccagattgcgccactgcactccagtctgggcgacagagtgagactccatctcaaaaataaataaataaataaataaaaataaataaataataaaactccaattcagactgcattttgagtcgtacctgtgcaacttgttctcacctctgttttcttagatgtaaaatggggataatatgtgtatgtattttattaactattgtgagactgaagaaaaacaggatacatgtacttcatttgaaatagtattgtgtacattataaatgcttaataaatgccagtcattaccattattcattaaataaattatgtttcaatgttttggtgtgcatacatagcataaagttcaatttcaacatattggttgcgcgtggttgctcacccctgtaatcccagcactttgggaggcygaggtacagagatsacttgaggtcgggagtttgagaccagcctggccaacatggtgaaactccgtctctaccaaaaaatacaaaaattagctggatgtggtggctgacacctgtaattccagcttcttggaggctgaggtgggagaatctcttgaaccctggaggtggaggttgtagtgaacatgccactgcactccagcctgggcatcagagagtgagaccctatctcaaaaaaaaaaaaatcaacatatcctttttgttttaaagatattatrcattctgaacaatatctgtacagtgaaatttaaggagattattggaatttcttttcatgtgataaatacagaaaatttggcatcatgggctcttttaatatgtggtggtttaattatttttgtcccatacttatatatattcaaattacygagaataatttaaataactttcaattatccatctgcatacagtatagagcctgcacaacctgatatggtagccactagctatccactgctatttaaatttaaattcattaataattttggtcaaatagacataggtagttaattttattgtattgaagagtgcagaaagtttttttgttttttgttttctgttttttgttttcaagagacagaatcttgctctgtttgttgcccagactgcagtggtgtgatcatagcttactgtaactttgaattgctgggctcaagtgatcctcttgctcagccccctaggtagctgggactacaaatgcatgccaccccaaatgggtaattaaaaatttttttttatagagatgaagtttccctattttgcccaggttgggctcaaactcctggactcaaatgatctttttgccttggcctcccaaaacactaggattacaggtgtgaaccactgaactcagccttcagaaaattttattggataacactggtgtagacagatctcatttttactgcttttaaaaagmgtccaaagtttggaatgagatgatttgtcttcacctttttgctccgttgactgactggtatatgwtcacgaacagtttacttactgactttccactttctcatctttaaaacagaattgtagggtcaaataagaccactgtacaaaagtattgtttgcacacaaccagagctgttattaatgttgttccttcacagaggttactctgctcttaaaacgttatccccaaagacctatactttaagtccttctccctgtaattgcttgtttggggtttttgccaatgtccaaacagatgaaaaccagagtatgttctcagagaggtttgtctgatcccagtttcatatcagggactgtatctcacagtctgtcttctctttataaggaatcaccatctctattacatttcttattcactgaaaatgccatctacctaattttgctgccggtttgggtaaacataaagaatgaaagataattataatatactacaacaagcatagttgaaagattaagtgtaaaaatcatgaaatatatgacaatactaatatcaactatttttattctgattatctatgctactcattatgaccaatagtatggatgttggaaatataattatactatgtgataaataaatctgatacgtttctgtaaattgaaccaatattttaaaagaaaaagctaaattgccagtgttgtattgccttataaatttagaaatgtgatccatgttattgtttttgactatttcattaagaaatagagaaaatgtcactgtttacattatatgaaatgcaagtgtttgamaatgaaacaaactggaccagaggcactaatttaacagctacccaaaacttatctgctaataattgaacctgaagctggaattaaaattatctattaaatacaacttttgaggttattgtttcaagaaatgaagtgtctagattggagtataatgaaaatcatgtgcttagaaatgtgataatcrtaggcaacattcgatatgactaatgctaactactttttataactaaagctttgaagaaaagaatgtgtatgtgtgtatgtatgtatgtgtatatataatgaacttattttaacagaaataaatgctaagtacaagataattattcctaaaagactaatacgctctaattacaatgcttacttttcactttattttgtactattgtagtatatacatacacatatatatgtgtgtgtatgtgtatatacacacacacacacatatatatacacacacacacatttgcttcacttttgtgatgaaatatttaaagtagtatagcctagggcaagtagaagaatctgcagattatactactttaagtgtcaattgcaatatttactctgaagcaatatttagctctgatcacttgaggccaaaaaacaaacaaacccttttgttttgcccagctttatgtttcattttagttgtaaagagagaatttcactgatgactgggtgtgtaaaattggcctttgttaattaaaaatagaattttgagcttcctcaccagaggctattgctgctagaaaggatctcacttactatttcatgttatcattttaccatctcagctgtagtcaagaagtcaggcttgcaactttttggttgccgtacatgttgtctcctaagcttctgaataaccattagattagtgcaaacttcttaaaaggaaaaaggacttttttcagggtagtgaactgcaatcgaggaagataagtagtgagcttcagccagatttagggaaagggcaaaagaaaaaaaaatgaataaataaataaataaataaataaagggtagagtagggtgtaaaaataactcctgtggagatagattgaggaccagggtctgctttcagaaaactaaatgaaaatataatataaagaaacatttaaaaaaagtgggctgatcttggggaggtggtaggagcaggaataaatctgtgagtttttttatttttatttatttatttatttatttttgagacagtttcactctgccgcccaggctggagtgcagtggcatgatcttggctcactgcaacctccacctcctgggttcmagcgattctcctgcctcaacctcccaagtatctgggactacaagcatgtaccaccgcgcccagctaatttttgtatttttagtagagacgaggtttcaccatgttggccaggatgttctcgatctcttcaccttgtgatcctcccacctcggcttcccaaagtgctgggattgcaggcatgagttccggtgcctggccaagcttttttattaattaaacacctcaaaatttaatcaagttgatgaatgcataaactgtagtacatccagacaatgcaatgttattcagtgataaaaagaaatgagctatcaggccataagaagacatggaggaaatgtaaatgcatattaataacagaaaaaagccagtctaaatagccagtctgtatgatttcagctctatgacactatgggaaaggcaaaatccgggagaaaatgaaaggttcagagattgttgggagggcagagataaatraacagagtagaaatattttagggcagtgaaacttctctgaaagacactataatggtagacacttcattatacacctgtccaaactcatagaatatacaacaaaaagagaaccctaatgtatattatagagattggatagtaatgaggtgtcaatgtagtttaaccagttgtaactaacgtactactttggtggagaatgttggtagtggggaggaatatgcatgtgtagtgggtaataactttataaacagaagtagaattaatgtgaaacacagagagatatttgaagtaagcaagacttgagtgaagaaaatgaaggaaagatataaagcagtgttcaatctctgtacagtctcaattttgttgtgagcctcaaactttttaaaaaagaatagttttaaagaattaagtcctgttctacaattttctttttatcaagtaataataataaaaggtctttgacattttatcttcttcttcagtgcactctataaatcattccaaaaatrtatmttttacctctcaaatttggctgctattggacttaaggaagagttgattagttcttcaatgtatagattgaatatatgcccatatttcttttatataagctttaagctatttaaatgtaaaactgtgacacaattaaatatgtgatacagctttaatattcagttaataatatttcatggaaataaatacatgatacagctttaaatattcatttaaccgtattccatgtgataaatacatgatacagctttaagtgttcagttaacaatatttcatgaaaagaaaatggaaaatattactcatttttccaaacaaaaataattttagtacagtagcatattccttcaaaaacgtgatgctaaatacaaattatatgtgtacattcatactcgatttatacattacatacagaaaagacaaaattatgtgatccttacattctcaattgtttgtgttcagtatggtgaaagctgataattaaacaccatctaccttagttgtataagtacaaatggtcatgccatgttctaaataagtgaagatctataatatatttggctttctttcaaataaatgtcagagcatattcttttctttcttttttgttttgttctgaatttttctataaaggagttaaatcaagctgattaaatcatttcagtaccacagggggaaacattggaaaagaggattagctcatcagcaggatgagttaggtcatagcttatccgaccataattcaagtgctgtgttctccaagtctgaaagttatggtcatgtcaagggtcagcgccaaaatgttttttatcataagttggaactgcttattcctgcagctggctaagctttagttggctagtttcaattattccggtctttttttttttttttttaaagctcaggattgtcttcaattccctgccttctttggttcataaataactattagtttgtattagacatacactgatacttctattaaaaaggaaattccgtttacaatatatgtctctgttgataactttataaacagaagtagaattaatgtaaaacataaagccacatttgaaataaataagacttcattttaaaaagaaaggggccgggcatggtggctcacgcctgtaatcccagcactttgggaggccgacgtggatggatcatgaggtcaggaattcgagaccagcctgaccaacatggtgaaacaccatctctactaaacatacacacacacacacacacacacacacacacacacacacacacacaaatcagccgggcgtggtgtcccgcaccagtaatcccagctactcaggaggctgaggcaggagaatcacttgaacccaggaggcagaggttgcagtgagccaagatcgcaccattgcactccagcccctgggttacagagcgagactccatctcaaaaaaataaaaaaaattaaaaataaaaaaggatggaaagacccaaagccgtgttttttcagactgtgatttttgatccattggtggctagtaaactcaatttagatggtgtttgagaaaaattttcagaataggatagaatatgagtaggttaatatagaaaagaaaatatttgggcaattatgaatcccactaatgtgtgtgtgcgtgtgtgtgcgtgcgtgcgtgtgtgtgtgctgtgttaagatgtaaattatttttcttacacttttatgattggccttgaacaaaaatagtttgtaagctaccactgtagaaacaggaagatggatttgtcttgctggttatgaaactctgggaagttaaaatctgtaagacggtccctaatctgtaaagtggggaaaatgcactctacctcacagcgttcacgtaagaataatgtgagataatatgtgttaaagctactaccatgatttcagccacatattaggcactcagtaaatagttccctttattagtgacaacatcaccaatgataaaactaacttgggacatatcacaacacattgaattatatgcctgggaatcttgagatggcttgacgaggtgataggtattcatggaaagttacaaattgaaaaactaaagtagagtgagacatacgcagtcaggtagatctgtgctaagaacagggttctagaactgtgtttggttcaaattattccttacagtagctcctggttgattaggaatctagtagccactcaacccattagttatttctcccaaatacctctaaaaatgtcatatatccctcaagggataattgcggtttatcttcagtgggtaagacagaactaacaagttactgtgaacatatttcggttagattatcaccagacaggtaataagcaacctatatccttgtgatagaacagacacagataatgggtttcagaaataaagtcagaaccatttaaaaaccaaaccactcatatgtttttacctctctaatatccatcatgtttatccagagttttgcttatgttctctttattcttactcctgggcaagtcccttgatggtaaaaaaggatgtcttcttcatggtattggcaaatatttgaaacaaatayatgactttatgaatggatgattacttattatgaatagagaaattatattgtgaaagactgacatttttttctttagtattttgtgaaaaagtccattttaaatatcttcccaaatgatttatagctgtcactacctaaagcacagaaaagtggaatagggaagtgggtcttcaagcattcaaatgtgtaccaactcacctagggtaatattattctgacccaaataccatccgtggctgatagggcagtgccatgtctgtggatcccaaagaactctccttcatctacaacagtcgtaggctatgtctagctgctgtaccgatcttacagagaatttggttattctatgcctaaaaaatataaatttctatgtagcctgtgtgttctctattttcttaatttgttttctgtttgagatcactgtaaataattaacaaaatataaagacaattttttttccaggtctgagaatgaataaaggtgccatcacccctccccgractacttctcctgcaaatacgtgttccccagaagtaatccatctgaaggacattgtctgttacctgtctctgcttgaaagaggaagacctgaggataagcttgagtgtatgtgtttcttcattttgtttacttatcgtgattgggggcaggagaaaggactggatattgattaacttaaaattgcattagtatagttgtataatttttgttgaataaagtgatcctgcttaatagtaaaaatttcctcctgctgaggatcagacaaaagatattaagatctrttaatttcaggttcttatttatcaagttccatttactactgattatttcctatgtttgtcatatgactttaaaaagctgttcctcagttctctggagytaacaagatgctattagaaaatagcctttgtgttgttttcataaagcatgtatttctagtgtgtgaagaaaccttcccattagtgagtaagaaaattgcctgtaaatatgcaacctgcaccttttccccagtggaaatctcccttgcaatcttcagcactaacactcttgttggcagagacacattattcctcaaatgctaaacctgaaagtgtcatttatagtatttgattctggatattataaatcattaaacaatagctttgtttcttaaatttaggacatggcggatagagaatttctattcagttgaaagtaaataattactgtctttaataaaacatagtgactgagctctctctggtggctaactatactcattgcaatataagaaaatatttttcaagcatttactctaaacctgatcatttgatcatctattctatctctgaggttctttctaaatatagtcctggcagcttactcaataacctgataaatttgattatataagatatggtaaatttaatgaaaaatgcttgctactagaatgatagtgaagataacaaatctaaactttaacacttctgaagcaaatgtaaataatcatgacgtctcagaattattattggggggcatttttagttaaatttagtagtaactttttgataatatttcttcttcccataaaggatttactgtaatgtgattatttaagagtcacacatgcttaggttatgaataaaccatatgaatatcatctttaaatatatatttattattcataaatgttcaatatttgcatttcaagatttattttgtattcctaagaacttacagaaatctgtctcattccaaagtaaatattaatgttcagtgaatttctattgaagtgacagccagagagaaagtttgctcaggtgttatcaggagcacatttgggatgattataaacatataaagacaaacattttttccacatctgaaaatgaataaaggccccatccatcctccccaagatggtatttagtcttgctgtttaactatttctaggtcagctggatgtatattgctttttaggtggaattcctaagaagaatgcttttgagttttccatgtgcatccttgaacccacatagattttgtctacagttgcagatagaatgttgactcaccacactattcaaaaagacatgatgaatctcatccactgacctgccatttacttttctttagtgttctyaacccccttctctctgtttttttctttgagtttcccagctttttttcaagcttacactagatgcattgccttttccttttgttttaaaccatttcttcagactcttcttataggcagtcttgttatggcccagaattatcactatcattttcaccaaactcttcaaaatacatgatgccgtaggtctcttttctcctatcttctaatctggtgattcttaccctggctatacatcagaatcatccgaagtttggttttctttctttttcttttttaatgccaatgcctrgctctttcctgtgtcaattaaataacaatcaatcttcctcatccactttcttaacaatttaccacatatgtttacccttctaaaattgcatatgtaaaagttactaacatgtattattttacagttacagatttttaaaaacaaattgtcagtaagacttcaaaaatttgtgttgattgttagtttaataaatactccaaaaggattacaatttactaaatacaatatagaccagaaaaatgaaaataagaaaaagcaattataattaacacagaaacagatgtgaacaagtacctaaaattaacttttgcaggtcaatgttgaatttggctcatacttccagggtagctaagcagaaagaaatttgatttaggttagaggttctcaaactttatcacacatcagagtcacctgcaggactggtatatctgattcagctggcctggggtgggatctgaaaatgtgcatttctaacaagtttccaggtgatgcggatgctattgttctagggatcacattttgagaagcactggcttatgcaattccttctgtccagtgaaaacacatatacacaaggaattcacctgacacaacagttgtttttcctggagttgatgaatagtggcagtatttgttaggtattttacctgggttattagataaacgaattacactgttgtcaatgtttatataagtaatactttgtttccccaaatatttttaaaatctattcagtgcctcccgccactttccattgcctgtcttttctgccaggtatttacaccatgtttattataaagcttattccgttaaagaataacaaacaaaagttcccaaatgttttactgattacaggaagtcctcacttaacatcctcaatagggttttggaagctgtgacttgaagttgagaaatgtatataacaaaaccactttttgcttatcaatgttataacaaaatgtcatagaaggaaagggtgttattcgagaaccctctgtacattgttttgcttgaagtcacagtttcccagtatctagcaatyatattgaggacttaccatataagccatgtcttcagctttatttcctttatgcaatcctaattcttctctctgaggaccttcccgtcccaaggctctatcaggtagaaggtgtttgttacccttggatgtgtgcttttgcatgcatgcatacgtgcatgtgtgcctgtgtgtgttggggttgtggggaattccatttttatctctccttgttggtaccaattaccaacagcctctgtgaatgaacaaggacatggtctcaggrctgatttgcccttctaacttcaagtgctccatagtactttagggaaagtcamcaacctctcttttaccctcaaatcctgtggctttgcctccattttctttcagccattcacttctgttacaatactccaagccttgtaactgtcgagaactgctattattccaaaactaaactgtcaattttactttgatcccagcctatgttcacttaacttctcactttcctacttttaatttaattattgcatagtacaataattaaaaaccttgactcttgatttataatgattgaatgcaaaccctaggttgagaattcactgtctcagtgatctgagttcatttttaaaacttcctcaggactcagttttctcaactgtaaaattgagatcattaaatagtctctgtcccatgggataactatgaggattagattaaactagtatttgttcacatacattccttcacacttattacttcccataaatgcatgttaggtgaaataaaagtaaattaaaactgttttactcttgcccactttactccctcttgaatttgcttgctgacttttggttgcccatcctttcaaatttaaactgatctcataatccatgatgtcaattagtttttcacacttaatttcagacattcaacttatttgctcctatactatactgagtggcagagacttagtgaaataaaaatataattctttgggttatagctctactcaaaacctcagctggmcttcagtgctcagtgtttctcttgtctagttttctagttaaaarttaatccagataatgtttttttttccaaacacctacctatttaatcatcatcttactcattaagtgtatgttcttgcaacttcctttcatcttacttaaaaccttatcaamtaacatacttattttttttctgtttctcttctgattcagagtgaaaaatcccctttgatagttcctgatttcataatgcgtaaaattgaaacccttaacttggcgtgcatacaccgatctgactccacagtttgaccccaacctactctgccaggcttgctttggctgtgacctgcacacatatgcacaaaccatgtcctagtcacaagggttaacttttctatcatcagacaaaccctgaacttttccactttgatccctttgattacaatgtgcaattgctgggtttcaaccccctgcctccccacagtgtatatttgattgagtctagtccacatttgaggcttaccctgcatcatgaatcttcttgccatctcctaattggatttattttgctctcttttgtacccttgcacctacatcagtgtgtgtgtgtgtgtgtgtgtgtgtgtgtttcaacaggtatatgctcaataaatgatagttaaatggaagtgtattaaagtcaatgggtaaaaataaagtcaatgagtgcttgaaaatataaaaataacatcaactatttaagatattgaataatactaactttatatttttgactttaaaatacatgatattcacttttgaatttgtgcttatcaagttatcaattatttaacaagaattttttatattatcttacatttccttaaaatgtatcactaaagagaaaatcaatagggaatcaatattcagaaagtagataactgacatatggagactgaatagtaagctacatgttaaaagttacttccctgtgcagtattaaccttagaaactatgagatttaataatgaagagaccttaaagaccatctagtcaactttcctatagtttgacaatgaaaaaaaaaaaaagaccaagagagggtggttattaattacaccaccagtttatctagctattwctaaaatccataatttctgagctactttatagggctctttttattttgaaaagctgtcttttgttgttcttattgttgtttctcttatgaataaaaggcgaaaatctctctccattaaactggatgtcaaacacacctaagcagctgatttttttcacctctgcttttaaagtttattaaatcagtatcaaaatatacaagagtggaaaaaagtgaattaaagaaattccagcttaagtgccttttctaaatatattttacattgtttatattaataacatatatcatataatgctcatatcaacaacacataatggcaagtgcaaaacaccagagtgtgtatagtaggatatattcattatgaaaacagatagaaacttgcaaatcttttggaaggaaaaaaaatttggatataaaaaattatcttgcataatatgcctttgctctgatcttttaactaaatacrtgtgtgggcataattgtttctatataaagtgaaatgacatgagcataaaaataggaaaaaatgtgggttaaactagtttataacattgaagcaggtatacccatatttggaagctgtcgtgttgtcagaataattttaacattgggctttttaaatttttgcagccaaacagctatatatttattttgtttttaaaaatatgatccttttgttcagtgattcccttgacctttgggcctgactttacttttgaatactaagaaatagtcttactatataatttgaaaattcaatattaataatgtctatattatttttaaatatagttttaaaagagaaaggttttataggctcaccaggccaaacaacttttattttccatggagttaataattgccttttttcttacttaattatttttctttctatttatttatttatttattttgagacacagtctcactctgtttcccaggctggagtgcagtggcacagtcttggctccctgcaacctctgcctcctgggttcaagtgattctcctgcctcagcctccctagtagctgggattacaggcatgtgtcactatgcctggctaatttttgtattttagtagagatggggtttcaccatgttggtcaggctgctcttgaactcctgacctcaaatatccgcccgcctcattttctctatttctataactaatcaattcccaaattctccaccataaatttatgttcataaacttgcgttcttcatttgttcttgaatattttcattgataatcactttcaccctttattttagttgttctctttctagaaccaatattatttggatgctgaacatccaagacagaactctgaattactattttttcttgctttttctattttccatcttcttttctttcttcttatgtttttcactccatatctgggacatcttttatacctggtgatgagatttttcccactttttccttacatttaacttcacagagaatccattttattctcagcttgatccttatgtgttcctatttgtatttcatggattgaaactttccttttagttataaggtttcccctcctccctgctttgttgttttcttccaaactacttgtgttgaaagaacttttctgatggtagtagttgtataggtgagtatccatacggatggtattgacttactggggataaggaaaaggacttattctctcaatattcggtatattcgctttcacataattaccttgttttggtattgtatccttatactcagaattcctgagtacctttagcccagaattcctttcatttcacttttgcagaactcaaagatctagtcttctgttggggaagagagcttacatactccccagagatcatcctgtgaagataatctgttaattttccaactcaccaccctttctaagcaaatctatgcttcttctcctctgccagcttacatttatatttctaagatctctaagtcaatatacatgtgtacatattttctccagctcctgaaaattgtgttagtgttttctcctctcatattttatttctgcttatagatttatacctatttcatctcttactgttactatagtggtacttcaatagaaaaccaaggtaaatatgtgtgttcaatacttcatgttttgcattacctagctacaattttaaattagaaaagtagacttatcactgaaaattaaagtccttgaatttctctttcttcttctggatgaaagaaaagttctatccttgaccttgacttggtaatatttagagtatatggtacttggtactcaatatatgtatgatatttttattattgttattatattaactagagcttaaaactctccaaactttcttccttgatgaattagacaggatttatagagcattaactcttgttaatgtgtttaggaataaattatttaaaatattagtttcttcagtcactagtgaagtagggattttcagaccaaccttcctactggaatcaactggaaaatttggaacgaatgtgtattttaaaaacctgttcaaaattttcagggaagtatcaaagcaacttggatttttagggcaaatatttgggagaaggaagcatggctttttccatttaattaaagaaattaaagtacaagccattcatatatttttccagataacaagcagaaaggaaacaagatattagcaatcaagtacagttatatatgtaaagtagctaaaataacatgtccaggttcaatttgggattattacaggcatttaaatttgacttaactttagaaaatgaaacaatgtattatgccacattaagagaataaagaagaaaatcataaaagtattttatcacattccatatgcattctattcatgattaaaaacaaaacaactgtaatagcaaaaattcttagcgaaataaaagtagtatagaactccattaatctaataatgtgtatatataagaaacacccatcaaactttatatttaagagtgaaatattgaagtttctctcattgatattgggaacaagacaagaatggccactactctaagtatagttcaactttctgttggagatcattgctcatggcaataaggcaagaaaaatccatgaagtttatgagaatgggaaagaagaaattgaaattcattgtttattatagactacccagtaatctatagatagatcaagtacttgaattaataagtgtgtttagcaagatctatgcctacaaggtagaaataaaaatcacttgtatttctgtatgacatcaactaataataggtaaataaaatttaagaaattttaccatttatcaaatcaaaatttttaaatacctggaaataaatctttaaaaactatttgaaaggtctctatacagaacaatatgaaatattattgagagaaattaaagctctaaataaagaagaatataatatggttgtagatttcaagactcagcattttaaagattctcccccaaacagatctataggttcagtacaatctcattagaaatccagcagtgttattttggtttgtttttcattttgttttgtaataggagaagaaaagattggcaaacattttcttttttttttcttttcttttcttttttttttttaattatactttaagttttagggtacatgtgcacattgtgcaggttagttacatatgtatacatgtgccatgctggtgcgctgcacccactaactcctcatctagcattaggtatatctcccaatgctatccctctcccctccccccaccccaccacagtccccagagtgtgatattccccttcctgtgtccatgtgatctcattgttcaattcccacctctgagtgagaatatgcggtgtttggttttttgttcttgcgatagtttactgagaatgatgatttccaatttcatccatgtccctacaaaggacatgaactcatcattttttatggctgcatagtgttccatggtgtatatgtgccacattttcttaatccagtctatcattgttggacatttgggttggttccaagtctttgctattgtgaataatgccgcaataaacatacgtgtgcatgtgtctttatagcagcatgatttatagtcatttgggtatatacccagtaatgggatggctgggtcaaatggtatttccagttctagatccctgaggaatcgccacactgacttccacaatggttgaactagttcacagtcccaccaacagtgtaaaagtgttcctatttctccacatcctctccagcacctgttgtttcctgactttttaatgactgccattctaactggtgtgagatggtatctcatagtggttttgatttgcatttctctgatggccagtgatgatgagcattttttcatgtgcctgttggctgcataaatgtcttcttttgagaagtgtctgttcatgtccttcgcccactttttgatggggttgtttgattttttcttgtaaatttgtttgagttcattgtagattctggatattagccctttgtcagatgagtaggttgcgaaaattttctcccattttgtaggttgcctgttcactctgatggtagtttcttttgctgtgcagaagctctttagtttaattagatccgatttgtcaattttggcttttgttgccattgcttttggtgttttggacatgaagtccttgcccatgcctatgtcccgaatggtaaagcctaggttttcttttagggtttttatggttttaggtctaacgtttaaatctttaatccatcttgaattgatttttgtataaggtgtaaggaagggatccagtttcagctttctacgtatggctagccagttttcccagcaccatttattaaatagggaatcctttccccatttcttgtttttctcaggtttgtcaaagatcagacagttgtaggtatgcggcgttatttctgagggctctgttctgttccattgatttatatctctgttttggtaccagtaccatgctgttttggttactgtagccttgtagtatagtttgaagtcaggtagtgtgatgcctccagctttgttcttttggcttaggattcacttggcgatgccgtctctcttttggttccatatgaactttaaagtagttttttccaattctgtgaagaaagtcattggtagcttgatggggatggcattgaatctgtaaattaccttgggcagtatggccattttcacgatattgattcttcctacccatgagcatggaatgttcttccatttgtttgtatcctcttttatttccttgagcagtggtttgtagttctccttgaagaggtccttcacatcccttgtaaggtggattcctaggtattttattctctttgaagcagttgtgaatgggagttcactcatgatttggctctctgtctgttgttggtgtataagaatgcttgtgatttttgtacattgattttgtatcctgagactttgctgaagttgcttatcagcttaaggagattttgggctgagacaatggggttttctagatatacaatcatgtcgtctgcaaacagggacaatttgacttcctcttttcctaattgaataccctttatttccttctcctgcctaattgccctggccagaacttccaacactatgttgaataggagtggtgagagagggcatccctgtcttgtgccagttttcaaagggaatgcttccagtttttgcccattcagtatgatattggctgtgggtttgtcatagatagctcttattattttgaaatacgtcccatcgatacctaatttattgagagtttttagcatgaagggttgttgaattttgtcaaaggctttttctgcatctattgagataatcatgtggtttttgtctttggctctgtttatatgctggattacatttattgatttgcgtatattgaaccagccttgcatcccagggatgaagcccacttgatcatggtggataagctttttgatgtgctgctggattcggtttgccagtattttattgaggatttttgcatcaatgttcatcaaggatattggtctaaaattctcttgtttggttgtgtctctgcccggctttggtatcagaatgatgctggcctcatcaaatgagttagggaggattccctctttttctattgattggaatagtttcagaaggaatggtaccagttcctccttgtacctctggtagaattcggctgtgaatccatctggccctggactctttttggttggtaaactattgattattgccacaatttcagctcctgttattggtctattaagagattcaacttcttcctggtttagtcttgggagagtgtatgtgtcgaggaatttatccatttcttctagattttctagtttatttgcatagaggtgtttgtagtattctctgatggtagtttgtatttctgtggaatcggtggtgatatcccctttatcattttttattgcgtctatttgattcttctctctttttttctttattagtcttgctagcggtctgtcaattttgttgatcctttcaaaaaaccagctcctggattcattgactttttgaagggttttttgtgtctctatttccttcagttctgctctgattttagttatttcttgccttctgctagcttttgaatgtgtttgctcttgcttttctagttcttttaattgtgatgttaggctgtcaattttggatctttcctgctttctcttgtgggcatttagtgctataaatttccctctacacactgctttgaatgcgtcccagagattctggtatgttgtgtctttgttctcgttggtttcaaagaacatctttatttctgccttcatttcgttatgtacccagtagtcattcaggagcaggttgttcagtttccatgtagttgagcggctttgagtgagattcttaatcctgagttctagtttgattgcactgtggtctgagagatagtttgttataatttctgttcttttacatttgctgaggagagctttacttccaagtatgtggtcaattttggaataggtgtggtgtggtgctgaaaaaaatgtatattctgttgatttggggtggagagttctgtagatgtgtattaggtcctcttggtgcagagctgagttcaattcctgggtatccttgttgactttctgtctcgttgatctgtctaatgttgacagtggggtgttaaagtctcccattattattgtgtgggagtctaagtctctttgtaggtcactcaggacttgctttatgaatctgggtgctcctgtattgggtgcatgtatatttaggatagttagctcttcttgttgaattgatccctttaccattatgtaatggccttctttgtctcttttgatctttgttggtttaaagtctgttttatcagagactaggattgcaacccctgcctttttttgttttccatttgcttggtagatcttcctccatccttttattttgagcctatgtgtgtctctgcacgtgagatgggtttcctgaatacagcacactgatgggtcttgactctttatccaatttgccagtctgtgtcttttaattggagcatttagtccgtttacatttaaagttaatattgttatgtgtgaatttgatcctgtcatcatgatgttagctggtgattttgctcgttatttgatgcagtttcttcctagtctcgatggtctttacattttggcatgattttgcagtggctggtactggttgttcctttccatatttagcgcttccttcaggagctcttttagggcaggtctggtggtgacaaaatctcttagcatttgcttgtctgtaaagtattttatttctccttcacttatgaagcttagcttggctggatatgaaattctgggttgaaaattcttttctttaagaatgttgaatattggcccccactctcttctggcttgtggggtttctgccgagagatccgctgttagtctgatgggcttccctttgagggkaacccgacctttctctctggctgcccttaacattttttccttcatttcaactttggtgaatctgacaattatgtgtcttggagttgctcttctcgagtatctttgtggcgttctctgtatttcctgaatctgaacgttggcctgccttgctagattggggaagttctcctggataatatcctgcagagtgttttccaacttggttccattctccccatcactttcaggtacaccaatcagacgtagatttggtcttttcacatagtcccatatttcttggaggctttgctcatttctttttattcttttttctctaaacttcccttctcgcttcatttcattcatttcatcttccattgctgacaccctttttccagttgatcgcatcggctcctgaggcttctgcattcttcacgtagctctcgagccttggttttcagctccatcagctcctttaagcacttctctgtattggttattctagttatacattcttctaaatttttttcaaagttttcaacttctttgcctttggtttgaatgtcctcccgtagctcagagtaatttgatcgtctgaagccttcttctctcagctcgtcaaagtcattctccatccagctttgttccgttgctggtgaggagctgcgttcctttggaggaggagaggcgctctgatttttagagcttccagtttttctgttctgttttttccccatctttgtggttttatctacttttggtgtttgatgatggtgatgkacagatgggtttttggtgtggatgtcctttctgtttgttagttttccttctaacagacaggaccctcagctgcaggtctattggaataccctgccgtgtgaggtgtcagtgtgcccctgctggagggtgcctcccagttaggctgctcaggggtcaggggttagggacccacttgaagaggcagtctgccggttctcagatcttcagctgcgtgctgggagaaccactgctcccttcaaagctcagatggaaatgcagaaatcacccgtcttctgcgtcggtctcgctgggagctgtagaccggagctgttcctattcggccatcttggctcctccccctttttttcttttttctttttttttttttttttgagatggagtctcgctctgtcgcccaggctggagtgcagtggcgtgatctcggctcactgcaagctccgcctccctggttcgcgccattctcctgcctcagcctcccgcgtagctgggactacaggcacctgccaccacacccggctaatttttttttttttttttttgtatttttagtagagacggggtttcaccgtgttagacaggatggtctcgatctcctgacctcgtgatccacctgcctcggcttcccaaagtggtgggattacaggcataagccaccgcgcccggccggcaaacattttctaaatgttatattcaattcaattcaaaagaaragatgtagaagtcaagataatgggtgtctttggagagagaagaaaaaataatgatgggggaggatgaaaggggttctgatttgttagtaagaattctatttttcgatttagaggtaatagttacattggtgtgtacactttaataaggtgttaaataatacgtttatctgtaagtgtaatattacaatagtaagttcatttttaaaaccaacgttaagtacacactatccttgggaaagacatagaaacgggtttatttcaactggttgtttttaataaagcatgttattatttttaagcgatatttaggagcatgcagaatcactgggagaggtagagaacaaattctagaggctgccttttcaggaacgatgaccaaatgaagtattaaattgggctgggatggttgcctcgaaacacccctgactcatccagaaccctggatattctctctgaaatcactgccgcctcccatcaccagaagggattctgtgcaagcttcttttgcttaggtcactagcatctgattgataacctgggactgtgcttctgtgtggtggagcctgggccatgcacacagtctagcttcaagtcaggctagtaaagaaaaggtatctagagttttcattttctaatgctcttcataaagtgtgattttcagaaaataggaagaagtttcagacactgtcagtaatgaatgcccattatctatatatatcctacccatgtgtgtttctttgagttcatgttcccattaaggtcaacaaatcagaacagggtttccacaaatttgagcgacgtgaaatggtcattttgcagtcatttactccagtaagggttaacagagttataaatgtccctcaatctgaaatatatttaggcttttctagatatttgccttattcctggtagttaatcatttctctgagtagtccgtcaattcttgccacttacaaagatatttttcactatttgctgctgcactacaatctcttgaaatgcctagtatccacaatgttgtaagttgctgtttccttctgcattttatttcatttattgactgtatgagaaggaatcattaccatgatttacaatacagatatttaagtcttttagccagtttagtattattgcccttaagtcaatagacagacatttgttttcttacactttaacatctttaacatttgtttgcctcttacaataaatataatattatagtgacatggctaactttttttctttttagcaatatatagactaattatgcatcttattaataataatatgttagaattggtgaaatgcagtaaccattaaatacaaaaataatcacctacaaatagaccatcagggtcattatataattatgctgcttagtaatcaacatctttattaatattatagacttcagacatcaagatcattcaggaaattatacaaacccaagacaaacccgtacttccattcttctatttttacagctgtgtctgtcttctctatttatctcaaaatggcacctgtggcctcctccacagcctcctggggatgtgtgaattatacaagggaatcctcaggcccatcagggacctctgtcatctgctttcctgaaccccctaacagagacccaatgttctcctttcccttacttgattagttcaaacatcagttaccctctgaagctccacctcagatttaaacaaataaaccatgagagccatgatcataatgcagtttttctgtgctggcttcctccatcagaaagaacctgttattttgcactccgccttcctcgcccatactgcttggggatcaatcctaacaatggcatctatttgtatcatgatctatggcttacattcacttttgtgtctatcacctcccttaactttcacagttaatatgtgttatggtagaatgattattctcactttacagataaagaaaagtttttgaccaagctcttataattgtgaatagtggatttcaaattatagttgatttctaaatttcacatttgttgtttttccttatgcactctgctctttaatacccaggctttgaatatttcaacttcttctcttttagttttgagttgacatttaatgatcttgtaataaagagtttaaacaaataatagtactttttagtgtcttctagaaacaaacaaaatttgatagactttatgctatccagtatttctattaactaattaattcattttcaatttagtttgagaaataatcccacaaattaattgtttggagcaggagaggaatttagtatttgttttcaacacaaactaaattttaatgaatatactttaaactaacattgatcttatttgcctataatcttgttttcaacacctctttcattctagttatgtttcgcctttatgacacggatgggaatggcttcctggacagctcggtaatttttttcttcaaagtttctgtgaaaacttcaaagattttcttctgaagaatgcaatgaataaatttgtagttattaccacagaaggcacacttaatgtaatttacatccactcatatggcatttttatctttttgactttttgcgagagagtgatctgaggaaactgttgggattacaattgttctactgaatagttttgcataccacagcatgacttttttaattttatttttcctgcactgaagttaggtaaaaaaaagaaaggcaccagccttgtctgaataaaacataagattaagttgaaaccattgatttagaatgagggaaaaactatctgtaacatttggcattaaggaaacttgagactataagtagaattttaaggatgtataaagtcagtttaattatctcattattttcccagttttacatggtatcttttgtcctatatgyggctgaaataggtaaatgtatttacagattgctttcacaaactttgcttttaaaatatctcatccaatttaatattcattttacattgtatagttatagtcataaaaataagaaaataccatctttatatgattaactgaagggaataattaaacgtttatttgtaatatatggaaatcattgctagctttcagagaaatagaaagtagttcttagtcttagtgcacagatcagtaccatgcatgaaattccatctcaggttctatccaataatctaccttatgtttggtaacatattttgcatattatattatttcttgttctatcaaggaaatataagaatattaatagaataagtgtcatttggaaattttgaagtgtaccatttttaatgtatttaatattattaaaaacaaatgttttgatatatttaataatgactgaaatagacatgatctctgaaaatgagtgagtttttctcgtcatctgatagaccaccctatggcagctaaaatagacttttaaaagcaaagcaatgaggttggaagcctatttatgtaactttgagtaggataatggtacattagcttctccagagagagattaaaatatataactcctactctaggaaatgaccatcactctgaattgatgctgtgattgtgggatttattatctgtamgtctcagtaatttttcaaatgctggctgggtgtggtggcttatgcctgtaatcccagcattttgggatgccaagacgggcaggcgatcacctgaagtcaggagtttgagaccagctggccaacatggtgaaaccccgtctctactaaaaatacaaaaattatcgaggcgtggtagtgggcacctgtaatcccagctacttgggaggctgaggcaggagaaccgcttgaacccgggaggcggaggttgcagtgagccgagatcgtgccactgcactccagcctgggcgagagagcaagactccatctcaaaaaaaaaaaaaaaaaaattttttttcaaatgctattatttttaagtgcctagtggtcttcagtttcccattagaaataccaagctacataataaatttgctcattttatggtgccatttcacgactagaaattttaatttcttctagatactttaatatgcttagtatagcacttgtgactacactaatgcaaattctattttcaaggagagttgttttatttaatgtttcttttttaattaaattaaaatgatgattctttactaggctttagccatgggttggcagttgatttgaaaattcagtcaaatagtcctttttttttttgtctctgcccattttttgttagcatatacagtagactactagcaatatttagaactatagtcccaatattaaacaatgagttggggataaatatatttagttttgattaaactagtctctatttttttgtaattaaaggcctggatttcatttctagggttttctccacaatagctactactccaatatttttccttcgctgtcaggtttaaattgtaccttctgacatcatgtgtcttggtacctttaaggtgtagcagttcacctactggaggcaaaacagaaagaaaatgataatttgaaaattgtccactatttctaataataatagttaagatttgttgatcatttgcaatacggcaaacaacaaaataaatgccttttgtataataacatgtttaacctttgaagcaattctatgaaggaggtaaagttagagtagctattttaccaacgagaaaactgagtcttaggtggggtggcttacctaatatcacatgcctacgtaacagtccaccaaaaatagtttctgttcttaaaagatatccgggaactttaacacttccaaaccattaaggcatatgtaagcaaagatggagtaggtgagagattagtaatgcatgtgtgcatacacatgcacacttttaacctataattcaaagggatttatgttttaaaatttgttaatctgtaataaatacatttatctttgtattacttctggggcagcctgtcttacttaagtaacatattcataattatattttttttttctggagagagggagtatagctttcattagttcctcggagggaaacacggcttcccaaaagagaatctgttttatcgtatttcttctctattccatgaacatcgactacatatattagattagagatttgagtagaatactctttgactattgcactttcaagctttattcttttatacttcttacattttaaatcatacggtaaaacaccacttttcaaattatgtaatgttttcatgtgaaattacaagcatttcacaaagccatgtttaatcttttctgtaggtagagaaaaattaaaacattagataaataggcaggaaaatgttttaattaatttagccaggtcatctgtattaacttgcaattcttcaaagagttgataattgagcagaataatatggaaattcaaactaaaatttcatcctctcacaaaataaatgctgcatatacttgtcctgcaaaccttggccctgaacactcttctttcaagagcaaattattcaatacatgactaaaacagtcaatgtatattctcagtgtatcaagataaaaatagacttctcagttgtcctcaaatgatttktccaccctttcacatctattttcaagccaaaggttcagggaattcagtgtcttaaaaatcacrtgtgacartatgtatttggtcctgctttcttcagacactctcttttagtagaagaaaatgtattttttgtaaagttgtgccctctcctggtgaaaatttctagacaaygtacaagataaatttatattcaggattcttttttctttatatagttaattagacctttaaaaaggattatgtacatatatatattcccatagaactcatttaacttttttagctacacattgaacaaaacaatttctgcaagtgaaagatttaaaactcactaagatcttgtattcatattttttatctctctttctcttccaggagctagaaaatatcatcagtcagatgatgcatgttgcagaataccttgagtgggatgtcactgaacttaatccagtaggtatatgaatgatttcactattggctaaattctggaaggcctctttctttcttttctttctttctttctttctctttctttctttctttttttctttctctctctctttctttctttctttccttccttctatctccctttctstttctctccctctttctttctctctcttccttccttctctctttctctttctttctcccctccctccctcctaccttccttccttccttctctctctcccttccttccttctctctctctcctttcctttctttctctttcttccttccttcctttctttctttctctttstttctttctttctttctttctttctttcctccttctttctttccttccttccttttctttctttccttccttccttccttccttccttttcttttctttctttttctttttttttctcttgtctgggaccctgatatattcctgtcatttcattttatcttttgataactaagttactatttctaatcagaagtcaaagtggattctgaataagataacaaggtatatgtggggttctgaagctgttaacagtaacttttgctttcttcctcgtggaagttattttgaatggtggtcttacatacatgtggataagcagaaggtcctgatagacactgccaaggccatgccatgccataaaagaagatggtagttttccatgcacagtgcatcatgttaccttgtgtatatgttatatattgctttcaactctctgaggtagatacactattttttttcccttttgcagagaagtaaattgagacccaaatatgttaaaattacttgcccaaagctcttcagctagtcaggaatttttaattaaattgtttagagaaagagtatctaaaaatgcttttaagaatatagaattcttattttgaataaacatcaaaatttcaacattattaaaatacatattaaaatatacttgacttgaaaccataactttggccacaaaaaatattttggggaaagttgataagagatattgagtttatattatttttaaaacctttagcaaagtgtatatgaataaagcaatgcaaataaattttatttaaatgattttacattttatgcaaattcaagaagtgtatatttaacctctgttcacatctatgcggtaaacaacaggataatggcatgagtatatgctgcaagaactctgatagcattttcctgtcttactgggattaggatttttccagttttaaagcagctattgggaaatgcatatgctgtgcttctagtgagtggcagatgtcattaacaggttgtcatttgtatgtggaataataaagtagatggtaacatgtatttaatttattgtttgactcaccttaatattttcactgaaagccaggaatttctgattatttctgttgcccttktaatcgacaacagctttctcctctcctactcacctttctacctgtgcagattagtcatctgtcaatcaagccagcttgttattagatggagagtgggagggggatttgtttttccattcaggtttcttttttttttttttttttttttttttttttttgagacggagtctcgctctgtcgcccaggccggactgcggactgcagtggcgcaatctcggctcactgcaagctccgcctcccgggttcactccattctcctgcctcagcctcccgagtagctgggactacaggcgcccgccaccgcgcccggctaattttttttgtatttttagtagagacggggtttcaccgtgttagccaggatggtctcgatctcctgacctcctgatccacccgcctcggcctcccaaagtgctgggattacaggcgtgagccaccgcgcccggcctccattcaggtttctaaacagcgggcactaacacttctcaacaaaagcatttttggtgtgtgtgttggggggtgtgtttgtagatttgagaaaaaggacatcaggatgctaggaggaaggggaaagctggtggctgagtagtctttctacaacaaatacctagtgtatttgtcagattattgamtggagaatacaagtaataaactatagcattatttgacatgtgtgttactgataagwctgctactattccagggagctgaaatggtacaaagttgtacattatgtctgctgtcatgggaactgccttgtcatcttgcctaaggcttcagtagttctcattgtaaayaaatgtacacatcagcaggcttctcataggtttgcatatataaataaagagaaatgggccgggctcggtggctcaagcctgtaatccgagcactttgggaggccgaggcaggtggatcatgaggtcaggagattgaggccaacctggctaacatggtgaaaccctgtgtctactaaaaatacacacacaaaaaaaatcagccgggcgtagtggcggacgcctgtagtcccagctactcgggaggctgaggcaggagaatggcgtgaacccaggaggcggagcttgctatgagcccagattgcgccacagcactccagcctgggcgacagagtgagactccatctcaaaaaaaaaaaaaaaaaaaaaaagagagagagagagagaaatgaacatttgaggttgattacaatagtagtagggaagactggagcgtccctagaagtttttatcaaattaactcaggctctacactcagttcaatcttatttttttatgaggcccatgggatttgagacacggtcagaggatggctttaacatgagatttattaggtacaaaaaggaaagcatcacccatctgaaacaaatgtcattgttttatttctcttatgattgatacatttctactaattcatcagcaagctcttgagaggcaagaggagaaaaataatctaattttcaaatacaatacttcctgagtgaagacaccaagcacaagagtgtctaggcagacaatacttctaccaacaaatcaaatatttcatgcattgcatcttttccaatctctgttccaatgctctctgcatttctcttttttccaaattgattaacatttttgtattatataaagacgtgagttcctttcttcattagaattcttaccatgtttgccatcttgacgccattagatgggaagtactttgctttcccagcaaccaagggtaatatgtttggaacttatatataatttccattaataatarcacaaacaacactatatgactctgactctgtatgccaggggctcgtctgcttataatacgttagcttatttaatcctcacaacagcccttctaggtaagtactgatattgccaccataccacagagaggtaaatgtattgcaaacaaacactgcagagaacattttaagacattacgtgcaagtcatctttagaaacgaagtttaattaaacttgatttgatcctttaacttctcgactctattaaattctgataggcaattaaaagcaactaaattccttcgccccttactacttagcaaagaattatatgagctctttgccatgaagttaatttgttcagacattttctggcatatatatgaatctaaaaaataatatgragaaagtaattaaagaccactttcacacttattaaagattcttcttgttttagctgtgctgttcatgggaaaaatattgaaaagttaagcacttatttctaaaaagtgatcagtgttaagtggccaggtttagaaatgctaacaaagtcgctcttcatcagtaatagaattaatgttgtactgagttagcaagacagttatcccaactctccacttagctgttagtcacaatttcatatgttgtagcctatgaaatttattttattggttgaccaccaattttcccttatctcctctactccagatcctccatgaaatgatggargaaattgactatgatcatgatggaaccgtgtctctggaggaatggattcaaggaggaatgacaacgattccacttcttgtgctcctgggcttagaaaatgtaagcatttccacagaggagggtggcctggtggtgagtcagtggggctctctattacacattttgattacagattgatgtgaccattttctaccattaagcatgcagtgagtgcctggaacttttaataagtatgccacggtgcaatttgacagtaactccttgtgtagtaatacttgccacacacatattgattcactccaggtattacttcaggattaaaaatatattctctctcttttgttttcctctgttgaaggtgcaatctagtgtttttaagttactgacctcctyatattatctaaagcaagaggctctccagtattattgtattttgcagttcttttggtgcttcattatttcaatgttcctcctacctataaaggtaatctattttattgaaaactgatacttggaggaggcagttaaatatctccagtggtttaaagattagtggtgccaaaagtcattgcgttttctgccattacctttaatggcagaaaacgcaatgacttttgcaccaacttaaataaacgtaagtttttcctgtatcagcaggagccaggttcttattctatcgcctgtcaaaagttttcttggagtagttcctctagttgcaattaaataccattgtgaaggaataaaataaatcaacctaagatgagaatgtaatataataatgactttgaaagcaaatcttgctgacccagacttgaagcagatttcagttatttttattctaaaaatctgatgaaatctatagtgtatgccagatttttaaattcagcattaatagttatgcaataattagatatactatgtatagaataacatgtctacttaatttcaaagaacattaggggtggaaagaacaatgaaattgtaatatttagagttttaaggtgtaagaccatagtattcaccactttgctgccaaacccaaaactcttcatacttcttattaccagctgaaatatttttacagattcaagactatatcatagttattcaagacaccaaatttttaaaagtcatttctcaagataacttactgtctgtgtttgtgaaacatatgagtatatataaaaatatgttggcacatatgggtttaggaatatataaatgggctttaggaatatacaaatgagctgagggttaaggaatatgtataagtttaggaaaaaataataggtttcaagagattactatttgttttcttttttacctgggtcttcaaatttcttctaaactcagttgaagcttacctttcatgaggcccatgggatccaagacatggtcagaggatggaaaacaataaaatactaataagtgatatatggaaagttacccttaaactaatttatttaaacaaaatataatatatatattattgttaataagtatatagttctacacttaaaaattttgtgaaatagtattttcttgtacctgaatttcttatactacacataactgagtatttttttataataccatatttagctctatattatcaatatttatttaattgttcatgtaccttatgacaaaaaccattatgtaaatcagactactgggagaaaacaaaagaaaaattgacaaaatgttgacattttaaggtttaatgtatactttatcctgaaaaattgtcagataactttagtcaggaaattccaataataatgattcccgagaaggacattttatgtttgtaaagctaaactttgtatattctaagcatctatgtaaattctaggatgagagaaggagggaagatgcaggaatgagcaagtaaatcatctggtagtcgagggtgagatagaaaagtgcagaaagggacagtcagttgcccgtattttaaatgtcacaagagattttttgaaatgatgattttttttggaaactactgctgatatattatttattatttaatttataaatatagatatttgtgaagttataaaaattatcacaggtaatagagtccacaaatctatatgatttaactcaaagtattttaaaccaatataatacctcattagtttctagtgyagtattatttcaattgtaaggcaattctatgcatttaatgtgcactctattaactgtacataatttactttttaatagtatttgtaaacttattttttatgtttttagtaaaagggagtgtctggagctaaataggagaaatctaaggttttattatagctatcagagctgtgttccagagttgtgttaccagtgacggccgctagatggcagaggcaccttatttaatctcaagagaccaccttaaatctgagactaaattccgccccccaccccatctctgtaaagaacaactttaaaagaagaaatttcccttttctttcatttttgtgaaaaaagtaagccacctacattttaagctgtcttttaataaaatgtataagccatataatcatgtgtaatgatcacaaaatacagcatctatttgttagaaagagctgttgaattctaaggcatggtaattgttttaaaaagcaagaatgacaccaagacaactgagtgatgagaaccttttttagcaattgagatttatttcctttctgtaggcagttaatgtgttacattattacctgtagagaatttgatccatgaatctatcccctcacctttgcttatttaattgaaaatctagatactgcagtttgaagttggccatttgttgtgaagcttgtcttgttaggttgtcctatatgttattgtctattgtcaattatgagctcggggagtaggttctaattgatggtgcatgtaaaataccacagtgtatttgaaagtgactgtggtgtcctagtcaaattacacagaaaaggaagtagtcctgggagagtaatcttcacttctaatgtaaggcacmacatttacgatttcaatgcaatttatttttctccagcaacagcagtttaaaaactagtctattttaaagaatatctattttggtaccaaaatcmgaaatggagttgatggggaccagattctataccaaatagcagagagcaagagccatatcttttctcttacaagaggctctacaaactttacaaaatacaagatgaatgggtcagaaatggtatagagtgttagtgtctcttagatttgaaggaaaattgagaatttggatggctttgtgattctgattaccacaatgaaaatttatacctgagacttattcattcttccttcagaattcatctcattggagaattgttttttaaaaaaatccaatgtaattaaaacacwttttttgttgaataactttatatagaggtaaactctgttccagtgattggaaactgtctgcagagggagagatattaagtaattttggctatggggccataaggtctccgccttaactgctaaactctgctgttccagcacaaatgcaatcgcagaaattatgtaaatgaaccacaaaagctatgttttaataaaactgcatgtgcaaaaacaggttgctggccaggtttgactcagtgccatagtttgccaaccgctgatctgttctatcactcatttctcagattaaaaaacagaaaaagttttaatttattttaattcatttggaagaaaggaatctaataccttttacttggcacaatcggacaaccacagcaagacatgaggactaatagacagaaagcataggagcagtgaacgtcatcaaattgatcagataacagaccttagctctgttattaactaactaggtcatttttataccaggcagttgctctctccggaaaaacgagaagttagccaagaagagaagttagtgtttcctaatactctttcagtttgaacatttccttttcctgcatgaacaagataattaataaggcttcaatttctgaaatctctaactttggatcgtcatttaattttttcaaggaaaattcctgaatttatattatagggaaaagagaaatgtacatttaagcagtagactagcttgaaatagcgataccttaacttgttattgtggattgttgtacccacatctagcctgcatggtttctggatggtttatactttggtctcactatatgtgtgccaaaaatcctggtcttcaattcttataggtcatttaaactttgcctttgactgagattgtttaagacacatttttttcttgactctcagtaaagtaatatgcagtgtgttctctgatgaaattcctgagtgatggagaatagaagactatgtattatattttgggagctgatgttcagcacatcgatttttaaaagtttttaatttggttaagagtttttgttctgctgtctatactttgctcaatgtagaaagcagttacaaaactagatgaatgcaaaaattcttgagattccagattgtgtcatttaagaaaaatgactacgtggtgtaacctgctgttgattttgcatttgagcctcaggaatgacaggtgaccttacaatgtgtggtctggagatgaacagttgatgacagctccactcagaattttaaaacttttctctgcattctctttgcccaggcctaatagagctcatctttttgtctaaaagagaagtttcggccgggcgcggtggctcacgcctgtaatcccagcactttgggaggccgaggcgggcggatcacgaggtcaggtgataccatcctggctaacacggtgaaaccccgtctctactaaaaatacaaaaaattagccgggcgcagtggctgaaggcaggagaatggcacgaacccgggaggcggagcttgcagtgagccgagatcgcgccactgccctccagcctgggcgacagagcgagactcctctcaaaaaaaaaaaaaaaaaaaawaaaataagaggagtttctgtcacattgtcataattttttttttggagaccttggacaaaaagtaaggtaatttaatgttctttgttatttaatgagttggaagtaattatttgtaacattagctcctctctctctctatataagttaagtcagttgaaacataactaggtgtggggagagaagcatgtgggttaggacatcaatgaaatttctccttgaggtcttctgaaaaaaaattatttatagtagccctagttcacttgaacattttatgtgatcttggaagtatttatggaaaaactaaaactttagaatcactaggataaagatttttatttatggaaaaactaaaactttagaatcactaggataatgatttttatttatggaaaaactaaaactttagaatcactaggataataggttttaaaagttctgaagagcattatttcctttgaaacatccctttgccttgtaggcaactaagagttggggaaaatgtaaagttccttctcagcatggagtagcctaggattcattaagcatttatctgtcataaacacrgacctgaacagcttcattacaatacacagtgttatgtctggtgatgaaaaaagagcacattttaatgaaataaagtgaaattttaggtatctttctcaattattttgactgaaaaattgggatgttacacaacacaacccaatgagggtgataatatttgctgtttatataacacccgtcttctgagaaaccaaattaacttcacaggtgttgtataatgaaacctcacaccacggcctggaaaagggaagtgggtattttcctttcattcgagaggaaaataggaagaaataggaagaaaggtgaaatggcttattcacattttcatagtaggctaggaatcaagcctttctggatgccctgcttatttttgttttataaaaaataaattcccttttttgacaataaatatatatttgcagtggaaggactaataggaatgtgctctactggctgatagaaagaagggacagattctttccctcccccattaagtttacgatctaagtaagataaacaagacaagacatgaaaatagagagttggagtataatttgcactgctgagaagtaattggctcctggtttcaatttcttctcttaaagaagtcacatacatatttcatcccttgcatattttggcaatgtatccagctaagagctataaagccatttaatttgttttttggtaaagcattttatgcctgggtaatggatttgtacatcagttgcagcctgtaacacggctaagtgttctgattgacagaacacccacgttcagacttgtttattttttgataaggaaaatgccagctaacttactccatatgtgctcttcaaaggatgaagcttattcacatgtaatggacaatcatttaaaaataaaacgacaagaattacaagaacagtaatatatacgaaaattagctttttgtcctttttatttaaaaatgtttttaagcacttagctactacttttaattttttaaatattaatttagttttttaaaaattaacaaccccatatttaacctttccacataaggatgtttaaatattatttgaggggatataaattttaaaatgtaggcagttttgaaaatatagcaaagttaaatatataaagtattctattcacgtgataaagctactagaaatctatgactcaccgaaaccaaaataggaagttcagaaattaatacaaagcctatttcttaggttttgaaagaaaattaaaacacctgtgttttctgaagttttctgtatgacacctgcgtagctgtatttgttgagactttgttagccccttgtcagaaaggtaaatctgagcaatgtcaagaattgtaaagggtccaaaatttaccctattggaagttaatgtattagcttgccacagttttatggatgctgccagaggacatgagactcctgagtcagagacaatagactttgttattcacaacaaagagagcaacaggagcttcacgtttgagttcaccttgcctcmaaaatctcatgggaacgacagagtgggacccaattratgattgtgcacagcatcacgttttggaaaccctgacttaagaaaactaaatgaattataatgtgtaggaaacaagcccatttcacctttgcctacaagggagtgattatttttattatactgtaagtatagtaagcaaactggccctctyctctggagggagacatgtctctattgtccaaggctaggctgtttgttactcaaacatctttgaaaagatagtcttaagaagaaaaaaaagaaagaaagaaaaagaaaggacagtgcttctgtttgcaaaacatgaagaaattcaagagacccaccaagaattatcgcccaggaagcatttcattaatgtttcatgttgtgaggcaaatttgacatttctggttctaawgtaagaattagttactgtagattttctctagtattacaaatctggtggtttatcccttgactgggaataggaaaggtagttaggagcattattattaatattttattatcaagagaaacaagatgatctgaatatatttatattgcctcactaccacaggagtaacgttaatgcccaagcacttaaaasatgctcagaaattattaggtgaatgtgttccaagaaatatgacaacttggacaacctgraaagttatggcaaataatgttttcaatagaataccaataaaygttaatctgtttgatataatttgatgattagactacaaacagtacatgttaatggagaaaatgatggtagcaaaagtaataatatataataatttcatttaatatcttgaccttcttgtaaggagttcaagaaattcctragcatcatattatttcattttattttaatcttgaacaatgcagctgtgattaaatacctacaggagtagctattatgatatagagagttttactgagaagagaaaaaaataaagtgttttgctaaagtgggaattaatttaaacccaaggttgtattgtggcaaataaccatagtgattgttataaataaaaatattaatacagttttaatatttttaccatctttctgtgagattaaaactacttatattttataagggggtaaacaaaatggtaacataatgaaatcctttaaaaagtttgccttttaaaatatactatttgtggcatactcaatgtattaatataaattggaatatagtataaggactcctcgaatgaagccctagtatgtcaccaataacttaccttttagtattagttttccatcccatcccattcctctgccaccttacatgacctgatcaccatcatgaattttgtatattactactagtaagcaagggttaatgacgtctttgcaggtttttctttgtcaggctgttccactgaagggtattttctctttctctttatttatttatttgtttatggaattgtgctaaggataaagtatttaaagaagaggcaatcacgtccctgatccatttggcaggtcatgacgatggcttggggtacgctgttgagctgttaatattagacaaggatttgtgggttrctatagcatcggtgatttgttagcactatctcatttcactggagcacatgtgtttttctaaaggctctgcggtgatcttggagaaagtcagggatgaaataacagattgtcttcacatgcttcagtccagctctgaatttcattggcacttacatctttcactgtttatttcattaagtgaaatctgtttctcttacgtcccatgcagaacgtgaaggatgatggacagcacgtgtggcgactgaagcactttaacaaacctgcctattgcaacctttgcctgaacatgctgattggcgtggggaagcagggcctctgctgttcctgtgagtacatttgctctgcctggacatcatctcctcaagtgaggaaaggttgatttcatggaatagtcttatttgtaaatggagacctaagatctgatctggactgtctctgtacatgtgatttatattttcctgtagtgtgtttttgaatatttaggttactctaatttcttcagttttggaaaaacctaccgttggaaaaaaatgaaggacattttccaagtcttcagcaattttctttccactgtagtttaatttattcatgtttcccatttcttcagggattattttgaatatttccactagtttttcatacttacatcttattcatattcatccccccctccccacatgttagtgactttattcacatgaacatcttataatgagttgattcctttgggtattttgtttaagttacattaattgattaaaaatagatttgcattaaaattaggaaatcgcaagatatacgaactaattttacacctcaagcctattattttcaatgctaacagaaagaaaatcttcatatatggttaatagacattggaatgcagagcattgatgattaatgagtcgtggccattttaaaaatttcagttcacccatctttgcaattttcattttattctgttaactcaggtctgccaattagaatgttcttatagtgtatataacagttagtttataaaatcacctaagtaattttaaatctacagcatatctacctgagaaaattttacaatccatgatagtcctgataaaaaagggtagatattataaccccttcatttaagttctccattaatccatcaatttatctctccccaaccttttcagcttgtacagaattactgaaactgtcaagttcattagatacattccattgttgtgcatttcattaaatctaatttcttactggcttccaataccatccatggtttataggttttttgtttgtttgtttgtttgtcgttagctagcagcttctttggtaatatgtttgagaatttcctttctctcagctgtgttacttgaaatttaataccatgttttaatgccacatatgcatatgatttctgaactatttacgaattttaataaagttacctgaaatttgccatgtgtaacatagtctctgacagctacgtttgaaagtttagttacatgttagttacactagaacattctccctatacaaaggaagtactttgtttttaaagttctattatatttaagaaaaggaatttttatggtacagtctgttaacaagaacacataaaacaaaatgataagtctcaaataagatgagtgatattatatgaggaatgagaattttkctcataagtttttactgattagtgtggtgaatgcaatattcaatattatttttaatacggaggagaagagaaaacatgttttctccctcaatgttgccaaagaaaatcacagatatgaatattttgggagagttttactatataaatattatttagatttagtgtttttcattttaatttgaggcagtggttagttttttgcttttgtttttattgaggaggctatatgtttatttttaagtactgttttatatatttatgcatttagaacccttaatctggaaccaacattttattaaaagaacacatgtagttgaccctaaatcatattcagactcaaaccataaagaatttgaagatgccaaaaatgtatgtcttggttttctgacacgtattatatatatacatagatacatatatttgcttatgtgtaggtatacatttgcatagtgacataaatttttccatatgtatacaatatgccgcccagcaaaggctgttgcttttggacaaacgatgccatgatggcaagtgaaggatgaattttcaccaaaggcctggcatgtatgatgaaatctcttctctggaaatagactaatcagccatttaagatttagataagagacaaaatarcataaactcatgggcttttattyccatacccgccagctgctctcatrcctatactttgtaaaatatagatctcttccttctagcaaatgacaccaagccatttggcagtcatcaatttgtctttaatatttttgtcatctgggaattattgtgaaaaatttgagtgaggactgatttaattaagcatttcctgctatgccatgatagaggagccttggtttttcacatgcataatatttcctgtactaattggccttttatattccatggtaaaaacagtcgacttggacttctccttgatgtggctgattggattgattagggagcagtggatatgaaatgaggttctgttaatgtcattctttctctataaaattacaaccaggaccaggattagctctgaatttgtgtacctgtttyctttcagtctgcaagtacacagtccatgagcgctgtgtggctcgagcacctccctcttgcatcaagacctatgtgaagtccaaaaggaacactgatgtaagtttgtgtgcatgcttgctttctgaaggkggccattrtgtagtgtgtcctcttatcacaatgttgtcattctgttctaggtcatgcaccattactgggttgaaggtaactgcccaaccaagtgtgataagtgccacaaaactgttaaatgttaccagggcctgacaggactgcattgtgtttggtgtcagatcacagtgagtaaaaaytggaaaacaaatcccagcattcacccacactgaagacgtgtatatcatactctctgaaagtcctaccctagaagggcttcctgaaactgastgtaagcataaaaccatggaaacttctcatttcagcttgtttgcaaagagataggctcagggtcagatttgtccccatagagtcctgaattttagagctggtgacaatctaagagatgataccatggtatggtttttaaactgtgttccatggagtgttagaggttcccaggaaggtaatcagaggccatggctaggagtaagcaataagaataggatactgtttgggtagaactcagctctccctttactccacaaccctgtttaataagggttttctggtttgcttattgtaaacttattttagtcataaaatctatgggcttaaaagggttagaaaaatgaacaatgagcttcaatgatttaagtacatagtgaagactaagaccaaaaaagttaagcagattgtccttgaccacgtgactagatagaagggcaagtagaccgtgttttattcaggtcttgatgcatctaaaaattcatcttacgcttcttccaacatattgttgccttcctctttcagttaaatcatgcattggggtataagagagactgatgtaaatgcttgtcttgatggtgttcacaattaagtaagaagagataaattggtcttttctgggacacttgggaatttcacctggtttgaatgactgtcaaatctagcttgaaaaaatttttggaatgaatgcagttgttagatggtacttctacagttatatgtgtaatttctgtaagttaattagaatcacacattttcaataatagctatttttgataatgtagtacaaaatatttatggggctgaggttttgtttcccagcttagagtgagtattcgtgttacaggactaaagtttttacttttgtcaaaataaaacagtaggaggcactgaatcagttaagtaaataactgtctccactgtgtccccaagtgccccaccctcaacccagggcttaaacaattctcttaaatgctctctttttctctctctctcacacacacacatacacacacactcacacacacatgcacactcatacagaatgatgrgaaaaacaactgacttacttttcaaaaatacaattaagtactttcctttaaatgaacacattttctgcaatcattttcagctattagttaaattatgtttacatttgaaattttctcattatgaaagatagttttttaaaagtgtttggttagtataataaaatgtctaacgatgattcaaattttacacatgaattactcaaacattgaattcccagttttaagaagatcataactacttcatttttaaaaacattcatgtagatttttaaaaaccagtttttttttttgctaagcatttacaaacatatgtcatttttgtttcagaccttgcagggagcttcctcttatttttttcatatagtgaatatttcactggttatatcttaactttaacataagctgagattagataatattagaaataatttcttctttgtatctccaattgtttacctattcttcataaattacaaacttattgtcttaggtttattattcatattttcttttttagttcttaaaaaatcaatgtttttaagtgtgtactcagtttgaaccctctaaaaacatgcattgctgccttttctaatggaaaagctttcaaagctgttagaattttctgtatttgaatcctctcattctttctctatttaatctccatgaagtctgtcttctaccctttccagtcatgagaaccactgtcctcaaagttaccattgctagtggtctcttactggtacacaaagcatcttaaaattcttcctttccttgtattatattccattttgttttcctcatggttttgctttttgtttttctcattgttttcctttttgttttaatggttcttcttatctggtacttcagaatccacacctagccctaccattcacaagttattcatttttctttggtcttgatcctgaccctagccttacaggaaaagaggcagtttcttttacaggaaaaaggatatcacttttcaatagactgtacttttaaaaatctaaatatcatatgtctcaaatcagataagacaatatacccttaacattttattcttacactaaataccattgaatagctgaatgtgattttgtttgtcattatggcaaagcacaacataaacagcaaatgtcttaaatccccamgttcaaaattattaataaataartcaaytaatcaatctcaaagctctatttaggaaacaaggctaaccagggatctctggtggagttaaggcagagtcagaaagaaaaaaaaaggctgccctcttactaaactctctaaagtcctgagacttttatccatcctcagccttattttctataaacaatgagctttaggggtcttatgggtattaagttcataaaacacaacttgtgcaaatttttaaaaagttatcatatatccaggagactctatcagtttctcaaaagtcacttcagcctccatccagttccggatttttaattttaagcaattttagggacacatttacttaattattgattttgtgccttggttaaacaggatatatttacctcagaacatttatgtatttagtagtatttatagttttctattgaaccattgcatgaaaatttcagcataaaattgatctgctcttgactgatgagtatctactactactgcttgcctttaaacaactgaatgtactttcttttgctcttacactttccagaaagtactayggacataacaaagagctagcagaagttatgggagtaatgggatatggcactgccagtgctggcttcagaaaggcctatctgaaattcgggttccgtgaagaatatattgtagagagaaacagaaagaatgatrcttggctttctttcagggtttgtccaaaagccattacttccttttatatatgacttttggaaatgatttgactgttgcaactcagaccaaccagattcttaagatcgtctcctcacttactagttgtgccatcttgggccatttatgtaaccagtttagacaaatttcctaatgtgtcaaatggagttaatgatacctaagttattagattattatgaggattaaaggggcaaaaaattctctgtagatatgtttaggacaagacctcatacatattaagtgcttagtaagtaacaattatatttgtgggtattatgaaatacataaatacatttgggtgcacataaaccaatccctggttttccagagggcactccatgaagaacacttacgtcatttctctctctcctgtagaaggatggatagttgtccagtctgagtcagaacagcacctgcatgcactcaaaaaaacatccagaatcctgtggtcctgaatctcactaaatcctaagcccaactgactgatttttattcccaaagactgttactacaactctctcattctatcagacctggtattgtcatgcttccagtcactggaaaaaaagtttgaagtcaattttttttactcttgtcttttacctttatctcttgtacacaacctgtcactgagtcttgtcatttcctacttaaaatatctctctcagatttgaggttttgtctccacattcgcagccctagtgcaagctcttagcacctcttgactagattagagtcaaaatctcttggctcatctccctaacagaaggtacttttcctataatgcaggctgcataccacctccagaaagatcttctgaaaatactagtttgttatatgccttctttagcaatctataatagttctgtgataataaatgcagccctcaacaccccttgcatcaagttggtttttagttctttagaaatcagaatcaaacctaaacataactgtatataatattcctcttctacacacaccctctgccatagctgtgtatttctgttggcagtcccttggggaggccatgtttccctcatgcctactattttgttcatcccggtcccttgaatgcacctgtcttaaattctaatcataccttaggaaacaagttaggttacctgtcttccttgaaatttttcttgacgctaatatatcttgattctgaatagtttctgtacttacattccacatccaaaggaaaaactcaaatgctctccattggtttcacaccatagtctaacatcgtttgcactgttaactrtggcccgctcctgttgcttgtccatgtcacacattttttcctaatcacctgaagttcttgacaaagtactgagtgtagaaaagtcttcagtaagatcactttaatctctgatatgctattcttacagtagaatattaaatttcaaacatatgtmctatttaagttttgttttataatatcatcctgtaatactcaaatctccatcagatatgcaagtaaacttaaacaaatacttaagaatcaattttcacacccatttttcagttcatacttgcagtttcttgatttactagttggctatcttgtagatataaagttaggctcttagaatgaaattttctgttcatttgtaaatctagccacttcaaaattaaaaatacgaaaagcttaggaaagatcagtggaaaactgccttctgataattaggcaaccagtctctgtgttttatatttcaatcctctgtgacaggcaaaatattcacctcagttctcttttctgtcttgattactaacatccttaatatcccactgcttatacctgttcatttcttctgaaactgtgttttcttgaccttcrttgtataacatgttgtgaatcattgcttgtcaaggtaagctctcactggtcaggcaggactcaccaggatgggaagttgagggattttatttaggcttgaaaaaataacacctatttcataaaaatgaattactaacttttgctatgatatagagataatattgtttattaagatactaaattcctaacagtaatgtttaaaggtttccaatgccatggaaacatttctgcttcagtaaatgccagtcttaggaagtaccccaaactgcaaaatattaggggccagtgtaacaggtgaaccagtaaatatgtgcctccaaatcaggtcttcaaatttttctttagaaaagtagcttatttctcttcttattttcctctaaattcctatgaacacttattttccatttttcctccttttgacttctcagatyccattttcttctctgaccagcgcagccactcttcctaactccatccatagaactatatgcyggcacacatgcacacagacatccacacactttctttttctttctatcttgagacagctttttctaataaacatagatctggctctaaattaggtgctactggaagttgtcataaactctgaaattatttccaagtgtttaattcmcttccaggaaaagctggtttctattatatgattttcctacatatggcactgaatcccttaacatgaatgggaatttctggatgtatatttaaaaatgagctaaggatttctatgccttggcttgaaaaaaatacaaagataactgaacaaaaatgtttttttaaattttaaatagtaaacatttgattttctctggtgcrctattggttattttactaaagaggcagcatcttcaatgctstagttcatttctattcttgatgaggaccctggtgtttaggattttgctgatttgggatataggttatctttaaaacaatagtcagccttcagcatcttatttacactgagaaggmcccagctgtgtctttttcttatattcttgtccacgaaatatgatgataagtttaagcaactttctattgttgatgatattcacttatttaatttttttatttttaattttgtgggtacttagtaggtatatacatttatgaggcacatgagatgttttgatacaggcatgcaatgtgaaataagcacatcatggagaatggggtatccatcctttcaagcatttatcctttgagttgcaaacaatccaattaccttctttwagttgttttaaaatgtacaattaaattattactgactgtagtcaccctgttgtgctatcacatagtaggtcttattcattctttcaaactataaaaagcttttcattgaaggaaagtgtacatacagaaaggcatttatatccaaagggcagagcccaatgaattttccccacatgaatgttctgtaagcagtacctgatcaggaaacaaaatattaccagtatcttaaagaaaaaaaatttgtagcttttgaattctattgtataattttgttgatttttgctttttaaaatagactttatgatttagagcaattttaagttcacagcaaagatgatattcacttttacactttataggtggtcctgaaaatgatacacatttttcacattggctttcacattgtatattttttcctcaagtatatctccaagaaatatgatgcataaactaaacctgtcatacaaatttgattcacgacttgtaaaatgatccgtactcctaacatgatgccctcagttttaacactcttggctacaaacaacgtcataatgttgatggttaagaaaatgtatttattagctgccagattctagtcttaatacaagcataaggtattcctgcatattatcaaatatagacttcttggttaggagaattttcttgcattgtgtgactctgtttaacagatgatagtatggttactaaacttatagatcctcctatgtcttggggagtgccttacgaccgcctagacaaaactcaggaccacagcggcaatcaaactgggaaatcccatactagatttatttggctctgcaaagaccagaatttcatggaatcaactgtcagtacctatgctctgaaactcccaaatcccaatatacagagttgccccttcacacacactctggtaagctcatctattgcatgattctatctgagtcttcgattctttccttccttctgggaaactagcctaaatgcccccaaactatcatcaaattaattttatttttgtcatcctttcttacatcagtaaccctcaaataactatacagagagcttagtcgtcctttaccatgtcagttgcaaattgttggaaacacatggatggaggtgtggaggaggctgaggcctctgactgcatctgtagtcagcgttggcataagactcagtatgtcctgcccctgtggccttcagagtcacgtgtttagctttacactgtaatcaagaataatatttcaacactttcttgctgtaaacacaaataggtttttatctcagatctgttttttgtagagggttcttagcgtctgttttctcagttttaaggaagttgcccaagattaaagagccaaagctctttctctgtgacatccatagtgcagcagagtcttaagacccataatctctctttggttttagtgccgttttcatagtactgggtttattagtttcctagggctgctgtaacaaaatgtcatataataggtgcctaaaacaacaagaatgtattcactcatagctctggaggctagaattccaaatgtcagcaggtcatcctccctctgaaggctttctggaagaatccttttctgcttcttcctagcttctggtggttgccagcaatccctggaattctttgtcttgtagtgcatcactcagatatcgacctatgttatcagagggacttctcctctctgtgccgttgtctctctgtccagattcccctcttcttataaggacaccagtcattggattagggtccagctaaaccaacatcttagcttaaatacatctagaaagaccgtatttccaattaagttcacattcaaaggtcccagaagttaggacttcagcatatcttttgggagaaattgatccatcccaacacttgctaatctgttaactctaaatccaaacatccatggccatggcagattctaagaaagttaattactaggtccaataaattaataatacattttaaacaagtcactaattttattttgaggaaactataccttttaatttgctctgagtatcagtttatttagttctattgtgcattcagctgcttctctatcttcaacacttcttgcctcttgacaaagaccagtagtgcctaatacaattaaatcacttttttatagagaagtttatatgcccctgagaagcagagctgctaattatggatgaacatggaaagatacgtttatttcatgtaatgtaacctaatgggcattaattacagtacaagtcatcttaactccaatgcagggagttagcatgacagcagtgttagattctaggaccgcagaaatacctctttgatactgttctattactaaaaataaatcaactctcattagactcctatgcttagttgataattaactgctcacaaaggtatgtatgttgtggaaattaatgcagccaaggcttaaatgaggtagcttttgattcaaaatggaaaaataatgtggctcttttttgttttgaacataacatgttatcttattgaaatgtatatttttttctaaagtatgaagagttcatatcaaattaatgcatagtgcaggagggagaaatctctagatgccctcaagcaagtattattttaccaaatctgtgtaattctttaaaaaactaccatctcagttttaaaacatcactatttaaaacaccacgttgtaacaccttaatgtaaacttatgaccaggttaataaaaatattagtttgggctcatacatattaaaaaataaataggacattgtatgattatatactaacttaacgttgagctgataaatmcaatatacagataaatttttataatcataatcatcttcttttatttatatcctgctcctactgagatgaatctctggttacatttacatattgaattacaaagttaaaactaatgatgggatcaattatgccccatactgagctgtgcactttggaatgactttgagaaaacaggagggtcaaaaaaaaaaaaaaaaaagcatacacaggcacagtggtttcaagattatgctaacagataagcaaaggaagaactgtaatggacaataatttgtgtttgtcaaagaaatcagggttctttggtgtaaaacctaaagtacatttttaatataaacatttctgagaattataaaatgtatagaatgggtcacagaagctgctagatggtttatttagggttcatatataaggacaaatgtattatgaattcctttatgactctgtttatttgttcttataatttctttattgtacttttaatgtgtttgctgtatctcgattgaaatataatctcccccatgttaggcgttgtcatgtagaatttgatactatccccctttctgtttttctagctgcataataaatgtgcttctcatctaaaacctgaatgtgactgtggacctttgaaggaccatattttaccacccacaacaatctgtccagtggtactggtgagtttttccttatcattctactataacttaggattgctgtgacttatcagtatcgtataccattaaaagcttctagagataatttttcatcaatcaaggtagaagtatatagatctaaaatacgtcgttactctgaaacagaacacctttgtccactatatttcctttttccttctgtcaaaatacgctttctagaacgatatgcttgaaatgacgctgactcaggttttatcacttagtcgtgctgctacttaccaggaattgtaaaggcagaasacttcaacattttatatattttatagatctagcttcccagaataatgaagttattcttatgggcaattttgctggagatgcacattatatatctgcaatgttgagggctctcatctaggttagaggctacctaaaatgatgacacatccatgaagaaagttatgcactgctattagctgttttttaaaaaaaaaattttattgaacaataaatttaactacctgcaaaataattacttaattcaataagtatagaaatgaaaatgcatgagtaaagtaactatgaaaagaacgaaccttggtaggaagagaagcagatattcaaacaatattcatattcaaaacccaaattactttgaaaattaaagttattttaaaaaacaaactattttatatccatgatgcacttctcattttgaaaaacaacatggaaattaaatggctggaacttccatttgatataataaaattataacaactaagaaatgatagaaaaatacttttctaaaggtcaacctagaaattaatcatattactcattttgtaccacttatgattctaattatctgtaaaatactggttgtattttaaatgcctttatttcacaaaattattaaaaatgcttcattttctcaaactacaaaaatagaggaaaagaaaatacctccatattgctgagtatagcaataactaattctaaatttcctttcttcatgtaaggtttattagacatcctatggtaaataagattaattaaataaaatgagagccatataaaaatactttacattttaggttaatttaaatgttgtttttattcatttaagtgttgtcttgaagacttctagaatttttgtattatttatattcttattttgaaatatggcaattttactggtttagatgcatttttgatctcagattttaactctaagatgagatctatgatttcttcctactacccatctgtctgtgcaagaccccactcaattcagtgagcctggggtctgcctccttggcccacttatgtcaacctctagttatataaattcaaacataaggtgtattctttttattatgctatcacttctttttttgagagaatcaaatgtaaagagcgtgtgttacgtgaattttcttgtctttgaacaatcttgaaaaatctttcattgctgtttttagacagtttttattctgaagattcatctctaatcattaaatatccccacagttttaataatttatatctcagcatttgttgtttaccatttttgtggtactatctactctgaagcgtgtgatgactattgagcatttcgtccttccaaaatgtctacctttcattgacttccattatacctcactcctggtcctttctctgtttctctggatacttgctttcagtatctttcctgggttcacaatgtcgacatgcccatgtcggtgcatccctggattctaccctcctatgtcatggcattcctctcttagtattcttctcaatgagatcttgtttattcagttgattgcattaccatgttaatttatgttcagctcattatcctaaattccaaacctagaactgccacctgcaggacccatattattttaagtgcatatacccgatatattattatttactactgcaataattatagctcttttgattgagcatatatgctatcccagagactatgctaaaatattatttaatttattcagtaaatattcattgcatgcctagtatgtgccaaacagtattataggtaggaaagaaaacattaaaacaaagacaaatctttgcttttatggagtttacattccagcaggggtaatgtagacaataaacaataaaactaaataaattatttagtacctggttgtactaaaatacataaacagagtagaatgttgatccctgaagatatgaagaggggaggagtggggagatgttggtcaaagagtacaaagttgcagttacataagatgaataattgtagaaatccaatgtacagtatgatgactatagctaatattgtacaacatggctgggcatggtggctcacgcctgtaatccctgcattttggggggtcgaggtgggtggatcacttgaggtcaggagttcaagaccccccctggccaacatggtgaaaccccatctcaactaaacatacaaaaatttagctgtacgtggtggcaggcacctgtaatcccagctactgaggaggctgaggcaggggaatcgcttgaaccctggaggcggaggttgcagtgagccaagattgcatcactgcactccagactgagtgacagagtgagactctgtctcaaaaaaaaatgtgtgtgtgtatatatatatatatatagtataacatactgaaaatctgccaagagactaggtgctcttaacacacatacacacacacacatgcacacacacaagggtaactatatgaggagatgtgaggagatggttatgttaatttgcttaactataataattatttcactatgaatatttacactattgaaaacaaaataacaacacatttatttatagatcaaataggcctttattcatgaattaggacagcatctattctacagagtagaatgagagctcccactagacatagaacagtggattttgtaaggtgggaacaagaaaacacaataatacaaaacaaaagctgattgtttaacatcatgttacttcaggttactctttgggtaaagagttaaaggagaggttacatccttattatcccaagtcaggtagacttgaatttcacatttttagaaacaactgatgtgttctgggattcagtttgcttccttaaaatttcagcttgattatgtgacactttagtacaagttgtttgtactaaagtttggtttccattttggtttggtctggtctggtctgttggggcctcctgtaggagctcagtccaaaacaatggactttgataatttttgtttaacaatatcaaaacattaattgtacagtaatcatatgccttaaatatacacaataaataagtactggttttgttttcaatgtcaagggaaaaattaaagcagagaaagaagaaatgttggggctgcagtgataaaagaggctgtcaagatgttcactgaagagacagttgagtagagttgagtgatttgagggagtcacctctgtggctatctggggacagaacttcaccaacagattctgaggcagtagacacttgacagatctcaaaggcactggggggattagtggctagccctgagtgtataggaggaaaaatagaagttcaaagatatcatacgatttttatattgggtgggacaatttaggtcgttgtaaaatctttggcctttactctgaataaaataggaagccattagaggattccgaccagaaccagaaattatctgacttatattttaaaaggaacaatctgtgtagtgttgaggggcaacaatggcaaaaagatataatacttctgttttctcaaagaaatagaaacctgggtcattagctagagtgaggatggtgcaagatgtgtaagaagcctgtgtcacctaggaaagtgggaacaaaattgttcaaagaaactgtgattttcaaggagaaaagagcagctacctctagttaataatcatccatttagtatataattccagtcggcttggatgaatatatttctttactcacattcagtcatatttatctagttacattccagctttatgaatggaataggcacagcccagtcttcatgtgaccgtgtcttttggcaaatgtgatgtacagagagggcagccagagagttgagaatatatgcaaaggagtaattgtaaggcttaatcgtggaatttgagctggaagtgagggaagtaagaacattaaatatgaggtacagtaatagattttagaaatagtacattgtaaattacagtgaagtcaaaggttgttggaatcaaggttaatggtgtcaggttgagagtgagtgaggtaggaattgagattatgaaggggtatggttataagtaacacaatatatgaattcattttgttttcaaagtgacaacataagataaatattataattgttcccattttacatatgaggaaactgagaaacaaagaggttaagtaaatttcccagtgtcccatgaatagtacatggcaatttagaagtggagcccgagtggttatcactccagagctgtgctctgagattttctccaaatcccaatagagagattttatctgttgtatctcagctactgaaaccttcacaccccaactttcccaaactagaaacctaagtagcattttttatttctcatctggaatataatattactcaattctattctaatgttcttaatcctgtctctttacttcagcccaactgtgactgtcttgtataccagcctcacaaattttattctaggattgtcccagtagcatccttgtgaactacctcctttctgtacaccccaacctgcttcctgggtcaactttcaaaaaatgcaaatattataagtcyctctcactcttaaaatatttttggtgattccctatttgaatcccaaacactctattacagtaaacaagggtctttaactggatcaacctactcattctctcatatagtaccttatccactagaaatcaaggataattgaactgcttgtaattctttaagtgcacttgttgtgtcaagcccttcgggtctcgtatgtgttaataaatcaatttaaatcactttgctttaaaattttgcccacctagctaagtccgaattaaaaggttactttcttgtcacggaataaaaatattgactgttgtacacattaactatttaagtgatcatacttcaaacaaattaatgaaactgttctgcccacaaaattgcttaatcagctccagctgataggctctgagccttttcagtctgcgaactttcagtaactttccaggaataatttcacactgcatgacctgtagcccttcatttaaagcaaatcgttagtcctcacatatatcatgttgttttggtttttattatttagtaccagtttcctctttaagaaattgtatgccccagtttctttkgctaatcttctctaagaggagcagatgaggttcagactcagttaatacaaagtggatattgatattatctctatcacattataaaaaatattagagaacttaagatgtctagttttattttttccttagtctttgactctgtagttaggaattggttattgaatgacctctataaatacagcgtggatccttaatttctggttgaagctcacatagccttgtatcttaatgacataccacaaggtcaagatccatagccattgtcttctcatattttagaacaccttctccagggtcattaaaaaaaatttgtaccacccttctcagccttcccattcctccccaatcrttgttataagctgtaggttaatgattcagtagatatatgctcaccatttccagagattagcaaggtaagcatctcctctgcactgatgaaatgctttttataagcatgcattacaaacggctttcacagataattggccttgataatggctgttgccataaaaatgggttaaaatcaactactctgaaattaaaattattatcatatggtgttttcattcaaataaaaattaaacaatgattccctacatcagatataattagttttctgaggttgcaattggcatccagtatcttttgaaagtactatcaaaaatctatattacttaaaatttatttaatgtgtgatttagtcaagattttyccatgactgtgtttaggtacttagaatgcttttttttaagaaaaaaaatgttctggtaacaattatagctatagttcatttactgccatattgaagagaggtcagaaactgtttacaaaggtagatttccttaaatcctccccttattttacttccaaaaaaatgtaggatgaatcccaactcatcgagactcatgataagctgcttaatttataaaaggccattaacccttcccaactgattgtcaaaacagatgttctgcctttaatagaatctattaaaaaatgcattcttggttcttgctgcagataacacactgaaatctcagctggccaatccaaaacaaagtgacattgcaaataaattttaataatctcatatggaatatggcctaatgaggccatatgcaagccactcactcttctatgttctaatttacccctaactcaagacagatgtagtctatgttgttttagcccttckcagtttctcttaaattaaattgggcttcagcaattatgtcatcagcctgcattgaaagggagttttaaaaattaatcatataaaactccctattttaacaaaaaaagatatgttggaaatgtccttcattacctgacaaaagttcttctcagttctgtttatcatgatgttatctcttagacttcatgtgtcrttgccatcatgcttttatttttggtacttaagaagcttataattaaatttatactaacattgaactatgatgttggaatataagttgtttatttttatgtgtttatatatamctttatcactattctattcataaatttctcttctgtttctctgcaatggcttaagtccatacttttgaaattattttgggtagtacataaatttgtgaggtcacagaaatcgataaaataggcctatagaatccctttgattttagagtaatctcatataggaggctacaaatctgatcaatttctctagaattatattttagttttacattcattctaagttttatataatttttatgatgaggtaaagtggctctttaagagtgcacatatttatgtaattatttttcagttttggaggggcttttattcaattaattctgccaccatcaacaaaagaagacttgagatatctcatgagaaaatcacattttaaactttgaagagtaaaatsaagcagattrtcacaaaaatcatttctgttgtattcacctccatgatttagttttgttttctgtatgtacacattttgtgttataatttagaaacaatattccttattttaatttaacttttaggttcaagggtccatgtacaggtttattatataggtaagcttgtgtcacgggggcttgttgtacagattatttcatcacccaggtactaagcctactatgcattacttatttttcctcatcctcttcctcctcccaccctccaccctctgtcgttgttgccctctatctgtccatgtgttctcatcatcgagctctcayttataagtgagaacatgtggtatttggttttctgttcctacattagtttcctaaggaaaatggcctttagctccatccatgctcttgccaagaacacgatcgatcttgaagagcaaggttcttaattctctaacaaaggggttaattasctagcctttttttcatatcaatatcaatattttatattgataaattggaattatgaatgacatagtgttaatatgctgattatttaaagttgaagttgtatgatacataagtaaccattgttttatatgaattgttatttttatttcttaaaggtacctttaagatcattgcattatttttatacacaatatctgcagtgctcgctttctactgtttatttttcctctctttcctcttttcttcctgccttctttccttccttctttcttttcttcctttttcttccccttaatttttactaaagacaatggagctaaaaatccagataagagcagttgtcttctytcctgcaattcagagtaaattagatgaagcctccaaagaggttaaatattagggtgtgatacatactcacttacaggggctctagaggtgggaatcttaatccatcccaagggaaaacagtaaattaaactttttcttaaagaaatgatgtctgagcataaataggtattttgaaggaaaatgtaaagtgatgtttatataaatagtctcagtgacaagagagtacatagtgtgatcatgaaactccaaaatattttttaaagggcatgtgtaagggtgaggctggagagggagaaaatacaaggtccaagataatggcttcctggcctgtcttgtcaaggagatcggctttatccaatataaatatgagcttaaatgattaactttgtgttgtagaaagacagctttgctagcagtgtggtgtaaaagaaatgtaaagcagggagcagaagagatatgagagtatcactaggagactgcaatgtgaatagtcaagagacaccaacagagaaagaaaattaggcaaccaggagagaaaactgtagcagagartagaacattaggatttgatgtgatttcaaaatagattattttcagatgatggtaagatccaatatgcagccatgaatctgggtggctcaactgatgtgcaggggaagttcattagatgttagaaagtaagggaactctgagaatgacttattggatattatccttaaaaccatccaggatagttgcagagttttaaaaatagttattacttgacagtaatgaataagggtagaggagaactattagatttcatgaacctcaagtgtaaagatttcatgaacctcaagtccagctttgtagctggacaaatggtaattttgatggaaggccaagagattgcccttaaaactatagcagttgtaaggaytgagagagtgagctgcctcttttcagaagtgttattagcaaaagtggcaatcatttagaaaggaaaaggataatttgtttttttttgcacactggttccagggagcccagttaaaagttttagaaaagaggagaagtgtggaagatttatgagacagagagagaaaggaagggaggaaagaaggaaggaaggaaggaagtgagggaagggaggggagtggaggggaggggagcgggaaggagggaaggagggaaggaaggaagggaggaagggaggaagggaggaagggaaaagaaaagaaagaagagaaggaaagaaaaggaagaagagaaagaaggaagagagaataatgatagccagaaagtgtggaagactagagtccagagttcttacatgaactcctgatctgtgggcaagtcgtttccatccagtagtttcaaaatggtgacaaatgacttgtatgtgaaatataaaaagaattgatatagatcaataataaacaaacaattcagttgaaaagggcaagagacctaaacaggcatttgaactaagtctatttataaaccacctataaacatatgaatatgcactcaccatcattacttatcaagaaaattgatgttaagtatcaggagataacaccagacactgaagagaatgatacaagcacattaaaaagcctaagctttgttaagattcagccaaattgttcatccattgcaggtgagagagtaaattggttcagttaccttagaactctggcagtataccatttgtattttaatcctgggtttttcactagttttgtgatatgaagcgagctattaacattttgtccctctgtattccatttgtaaataaaatcaaatgagttaattcatgaaaattgcttayaactatgcatagctgatggtgagtgctaagatgatatcatctaatattactattataagtgttatgctgtaatttgaaaagtgaattttaacattttatcataccataactrtgtaatcatacaaaattttaaaataataaagaaaaagaatttaaacatttaaaaacctgtgatacagttatataagaagaattacaattaatatataaatagaaacactattaaaattaccttcctgatttttaggkttttttttcacctttttaaagttaacctgaatataccatgtggcattatattttaacacttaacttgatatccttaaatttttatgtatttccatatactatgggacatcactgttaatgcctgtgtaatctcattaagtaaagaagtcatattttagttgaaactgtttttgtctagcatcttttcaattcctcattttgttattwtaagtaacatgatagtgaacatctttatgaagaatggtttcttctggctgttctctactcagaagtgcaaaggatcattttccccatactgtgttatttygtcctacaaatgagtccgcttttatggttgtttaattctttctrtactataaacccattcstaatgaagaaaataatgattaaatatttcctaaaacagaacatttgtcttagaatagaaaattatttaaaattttaaaatcatttttagatgattatttatctcactttttttttaaactggatttctagcccctgccaactctcatatctctttttttatttttatttttatttttttaattattatactttaagttttagggtacatgtgcacaacmtgcaggttagttacatatgtatacatgtgccatgctggtgcgctgcacccactaactcgtcatctagcattaggtatatctcccattgatatctctctcccctaaccccaccccacaacgggccccagagtgtgatgttccccttcctgtgtccatgtgttctcattgttcaattcccacctatgagtgagaatatgcggtgtttggttttttgttcttgagatagtttactgagaatgatgctttccaatttcatccatgtccctacagaggacgtgaactcatcattttttatggctgcatagtattccatggtgtatatgcaccacattttcttaatccagtctatcattgtgggacatttgggttggttccaagtctttgctattgtgaataatgccgcaataaacatacgtgtgcatgtgtctttatagcagcatgatttatagtcctttgggtatatacccggtaatgggatggctgggtcaaatggtatttctatttctagatccctgaggaatcgccacactgacttccacaatggctgaactagtttacagtcctaccagcagtgtaaaagtgttcctatttctccacatcctctccagcacctgttgtttcctgactttttaatgattgccattctaactggtgtgagatggtatctcattgtggttttgattagcatttctctgatggccagtgatgatgagcattttttcatgtgttttttggctgcataaatgtcttcttttgagaagtgtctgttcatgtccttcgcccactttttgatggggttgtttgtttttttcttgtaaatttgtttgagttcattgtagattctggatattagccctttgtcagatgagtaggctgtgaaaattttctcccattctgtaggttgcctgttcactcagatggtagtttcttttgctgtgcagaagctctttagtttaattagatcccatttgtcaattttggcttttgttgccattgcttttggtgttttagacacgaagtccttgcccatgcctatgtcccgaatggtaaagcctaggttttcttctagggtttttgtggttttaggtctaacatttaagtctttaatccatcttgaattgatttttgtataaggtgtaaggaagggatccagtttcagctttctamatatggctagccagttttcccagcaccatttattaaatagggaatcctttccccattgcttgtttttctcaggtttgtcaaagatcagatagttgtagatatgtggcattatttctgagggttctgttctgttccattgatctatatctctgttttggtaccagtagcatgctgtttgggttactgtagccttgtagtatagtttgaagtcaggtagtgtgatgcctccagctttgttcttttggctcaggattgacttggcgatgcgggctcttttttggttccatatgaactttaaagtagttttttccaattctgtgaagaaagtcgttggtagcttgatggggatggcatcaaaattgataaaccgctagcaagactaataaagaaaaaaagagagaagaatcaaatagacgcaataaaaatgataaaggggatatcaccaccgatcccacagaaatacaaactaccatcagagaatactgcaaacacctctacgcaaataaactagaaaatctagaagaaatggataaattcctcgacacatacagtctcctaagactaaaccaggaagaatagaccaataacaggatctgaaattgtggcaataatcaatagcttaccaaccaaaaagagtccaggaccagatggattcacagccgaattctaccagaggtacaaggaggaactggtaccattccttctgaaactattccaatcaatagaaaaagagggaatcctccctaactcatttgatgaggccagcatcatcctgataccaaagccrggcagagacacaaccaaaaaagagaattttagaccaatatccttgaggaacattgatgcaaatatcctcaataaaatactggcaaaacraatccagcagcacatcaaaaagcttatccaccatgatcawgtgggcttcatccctgggatgcaaggctggttcaatacacgcaaatcaataaatgtaatccagcatataaacagagccaaagacaaaaaccacatgattatctcaatagatgcagaaaaggcctttgacaaaattcaacaacccttcatgctaaaaactctcaataaattaggtattgatgggacgtatttcaaaatagttagagctatctatgacaaacccacagccaatatcatactgaatgggcaaaaactggaagcattccctttgaaaactggcacaagacagggatgccctctctcaccactcctactcaacatagtgttggaagttctggccagggcagttaggcaggagaaggaaataaagggtattcaattaggaaaagaggaagtcaaattgtccctgtttgcagacgacatgattgtatatctagaaaaccccattgtctcagcccaaaatctccttaagctgataagcaacttcagcaaagtctcaggatacaaaatcaatgtacaaaaatcacaagcattcttatacaccaataacagacaaacagagagccaaatcatgagtgaactcccattcacaactgcttcaaggagaataaaatacctaggaatccaccttacaagggatgtgaaggacctcttcaaggagaactacaaactactgctcaaggaaataaaagaggatacaaacaaatggaagaacattccatgctcatgggtaggaagaatcaatatcgtgaaaattgccatactgcccagggtaatttatctcacttttgaacttaaccatattattactgtccattagcaggaaatgataggatgtgaaacaatgaatatgttcagcmccatagccctttagaccagttatggtgtgttcttcctggaatacactctcttgttataatatctgatgagcctttaagaatagagttaatacaatgagaacacatgggcacagggaagggaacatcacacaccagggcctgtcgagtggtagggggttaggkgagggagaacattaggacaaatacctaatgcatgtggggcttgaaacctagatgatgggttgataggtgcagcaaaccaccatggcacatgtatacctgtggaacaaacctgcacattctgcgcatgtatcccagaactttaaagtaaagtttaaaaaagaagaatagagttaataaaaataccatcaagataaattatgaagcttgttagttcacagaaaggacaacaaaactatttgaaaaatgtatatttaaaaaatattctttagtattaaaattaattaatcctgttttataaacrtaatttttaaatcatatttattaaaattataaatataaaatatgaattttattctgtattgatatataatatttgtacatgtttatggggtacatgtaatattttgttacatgcataaaatrtgtaatgatcaggtcagggtatttagggtatacatcaccttgagtatttcattatttctttatgttgggaagtcctctcttccagctattttgaaacatacaatgtgtgaaactatcgtcattctactctactawtgaacattaaaatttatttcttctatctaacctcgtgtttgtatccattaaccaacctctctttatccccctactccacaaacatgcaaactcttcccatcctctgataaccatcattctactctctacccgcatggaattaactttttaactcccacayatgaatgagaacatgtaatattaatctttctgtgcttggcttatttcacctatcatattgacctccagttccatctatgttgctgaaacttaaaatggtcccagttctgcatctcttttttcttcactgtaactctgaaaacttggctaagttgtgatgttgctgaagcagcaatctacgtatctctacctataacaccctcagaaaaccatatgtcatattaacttctcctcttcttccgatcttgcttgctcttccacaattttaagaattctactaaattatgcattgtaaatatggtgattaagtcttaaatagcatagagtatgttaaatctttccttagagcatgtgttkaactaagtcattatttctcagcaatgtcagaaagtttgttaggaagtagaagtatggtgtgtgtctctttctcacagctccagtagtatggaaactttctgtagattttttcatctgacttttatcggcaagagttaataatgacaatcccaatgctacacatcagctaattcaaggagggtgggagatattcaaatcttctgtgattctgaaatttgaattttgaattctctgtaatattattcctaggctagttataaaacttccagaaatgcagagtctggtggggaggtgtgaacatataactaactaaggatgtrtcttgctgcactgagcttcagcttttatttcacatcattatggctgtttcacccttcttttaaatttacctctttaacctttaagcaaagttactgaagtcatctatttccttgaaatcctatgtcatctaccaaaggtttgtgcctatgcaacgttcttttttgttgaaagagcagggataaagcatattgtcagctctcaataaatgtttcatcagtgtcattacttaatattcatttaattaatattcattatagatcaattcataattgtcatcatagtaatgataggcaaaaagaaacctcatttttccatattttggaaatctaactcagactcaatttcatggtattattcataaaggatagctgccttttatttatttaattttttaaatgtgtaggattacattctcactattcaaattctgatgaggaacacattaagaactagggtgctataatatttataaaacatgtgtacatccattttggtttaaaatattcttcatgtacatgtattttaaaragtcatagcatgtccgtgtatttcttcatgtacatatattttaaagagacatagcataagaaaactggaagggacccagcctcactaagtgatttcataatcttacccttgggaggttaaccaaccatttatctgttacattgtctcagattggctgtgtgctgttgctttctgacaaactgtctttacattgaactagtttatattatgtagaacgtgtataattataaacagggtctagtctaaaagaaaaagttcaagtgttgtagacaattgtttttgtttctacctaaatgcataaggtagagttgtatacttaaagggattttttaaacagggatatgtatatatataccatatatataggatatgtgtgtgtgtgtgtgtgtgtgtkrtatatcctatatatatactgtatatatatcctatatgtataactgtacccagggtaagcaataataatttttttcaaaaatcaaacttgtgccacatttggtttgccatgatttatggaaaagccaaacaaaagccccataagacatgaattggaagttcagctaagaagaaatctgatgaaaatcttttagtttaatatatgaacaattgggaagttaatatattcaggatgcagtgtcctatggattgactcttgacacacaggagttcactgtcaagaagattaattaggccatcattcctatattaatttaaaatgtcaattttcttcrctgacctcaaacctagaaaaaaaaaycaaaatttaaatatccaaaaacctattataggtagaaatcttctaaaactttaagttcagatcataggtgtctatataatatctagaaggtacattgaaattgctgtgaaatatatagtcccacaaatcaaaaataataatgaagtcataaaaattctttaaaaattgtatttacatgattttggttggttttttgcattttttgtttccttcactttatctatagttaccataataattttacatatttataggatgcagaatgatattttgatgcctgtatgaaatatgcagtgattaaatcagagtaattagtataaccatcacctaaaacatttatcatttcttcgtattggaaatattcataattctccagtctagctttttgaacatacacaataaattattgttagctctattcacattatagtgctatagaacataacttatttattatgtctagctgtaattttgtatcagttaaccaacttctctctttgcctttctcatccctaacttctcagcctctgaaaaccacaattctacccttttatttcatgagctcaattttttagatcccatatataagtaagaatgtggtattgatctttctgtgcttgactaatttaacataatgcccttcaggttcatccatgttgcaaaaaatgacaacgtcccatttctttttatggttgaatagtattccattgtgcatatataccataattattttatcyactcatctattgatggacatttaggttgatatcacatcttggctatagtgaatagtgctgttataaacatgggggtgaagatgtcactttgatacacaagtttcctttcctttggctaaatacccaataacaggattgctggattatatgatatttctatttttagttttttaaggaacctccatactgtttttcataatagttgtactaactataattccttccaacaatgtatgaattcccttttctctgcatcctagccagtatttcttattttttgtctttttgataatagccattctaactggggtgaggtgatatcttatggtggttttgatttgcatttccctgatgattagtgatgctgaacattttttatatactttttggccatttgtatttcttcttctgagaaatgtctttcagattcttttccacctcttaatgggattattaccattattattattgctgttaagttgtttgagttccttgtatattctaggtaaaaggcccttgtcaggtaaatagtttgtagatattttctcccaatatacagattgtctgttcactctgtgattgtttccttcgctgagcaaaagctctttaaaagtttcatatagtcttgtttgtccatttttctttttggtacctgtgcctttgtaaccttatccataaaaatctttgctcagaccagagtcccaaagaaatccccctctgtttttttctagtagttttatagttttgggtcttacatttaagttgttaatatattttgtgtcaatttttggttctggtgaaagatggggatctggttttattcctctgcatatgaatatccagttttctcaacaccatttattatagagggtgtcttttccccagtgtatgttcttagagcctatgtcaaaagtgagttgactgtaaaatacatagatttgtttcagtgttctctatactgttctatttgtctgtgtgtcagtttttatagcaatgctatgctgttttggttactattgctttgtgatatacttggaagtcacatagtgttattcctccctttgctcagtattactttgactacttgtatttgtttgggttcaatacaaattttaggatttttccctatttatttgaagaaaaatgtaattgcaatttttaatagggattacattgaatctataaattgctttgggttgtatggtcattttgacaatattaactgttctaatccatgagcatgacatgtcttttgatttttatgccctcttcaatttttttcatcagtgttttgcagttttaattgtagagattatttacctccttggttaaatttattcctaagtattttattattttatttaagctattataaatgggatttccttctccagttccttttcagctagcttgtttttggtaaataggaatgctactgatttttttgtatgttaatttttatatcctgcaactttattaaactcatttcttagtcataagagttttttgtgaagtcttcaggtttttctatatgtaagattatctcatttacaaggagggataagttgacatcctcttttccaatttggatgccctttatttcatcctgttgccaaactgctctgcctaggtctgctagtagtatgttgaataagagtggtaaaagtaggcatacttgtcctattccagttcttgtagaaaatgctttaagcttttctctgttcagtrtactgttagttgtgggtttgtcataaatggcctttattgtgtaggggtatatctaattctatgtccaatttttgagagactttatgatgaagaaattttaggatgaagatttatgaattgctttgttttggtttctattatgatgatcgtaagactttttcctttattctattgatgtattatatcacatttattgatttgcatatatgaaccatctttgcaaccctgggataactcctacttgatcatggtgaattatctttttttttttaaattatactttaagttttagrgtacatgtgcacattgtgcaggttagttacatatgcatacatgtgccatgctggtgcgctgaacccactaactcgtcatctagcattaggtatatctcccgatgctatccctcccccctacccccaccccacaacagtccccagagtgtgatattctccttcctgtgtccatgtgatctcattgttcaattcccacctatgagtgagaatatgcggtgtttggttttttgttcttgcagtagtttactgagaatgatgatttccaatttcatccatgtccctacaaaggacgtgaactcatcattttttatggctgcatagtattccatggtgtatatgcgccacattttcttaatccagtctatcattgtgggacatttgggttggttccaagtctttgctattgtgaataatgccgcaataaacatacgtgtgcatgtgtctttatagcagcatgatttatagtcctttgggtatatacccagtaatgggatggctgggtcaaatggtatttccagttctagatccctgaggaatcgccacactgacttccacaatggttgaactagtttacagtcccaccaacagtgtaaaagtgttcctatttctccacatccactccagcacctgttgtttcctgactttttaatgattgccattctaactggtgtgagatggtatctcattatggttttgatttgcatttctttgatggccagtgatgatgagcattttttcatgtgtttttttggctgcataaatgtcttcttttgagaagtgtctgttcatatactttgcccactttttgatggggttgtttgtttttttcttgtgaatttgtttgagttcattgtagattctggatattattagccctttgtcagatgagtagattgcgaaaattttctcccattytgtaggttgcctgttcactctgatggtagtttcttttgctgtgcagaagctctttastttaattagatcccatttgtcaattttggcttttgttgccattgcttttggtgttttagacakgaagtccttgcccatgcctatgtcccgaatggtaaagcctaggttttcttcyagggtttttatggttttaggtctaacgtttaagtctttaatccatcttgaattgatttttgaataaggtgtaaggaagggatccagtttcagctttctacatatggcttgccagttttcccagcaccatttattaaayagggaatcctttccccattgcttgtttttctcaagtttgtcaaagatcggatagttgtagatatgcggcgttatttctgagggctctgttctgttccattaatctatatctctgttttggtaccagtaccgtgctgtttgggttactgtagacttgtagtatagtttgaagtcaggtagtgtgatgcctccagctttgttcttttggcttaggattgacttggtgatgcgggctcttttttggttccatatgaactttaaagtagttttttccaattctgtgaagaaagtcattggtagcttgatggggatggcattgaatctgtaaattaccttgggcagtatggccattttcacgatattgattcttcctacccatgagcatggaatgttcttccatttgtttgtaccctcttttatttccttgagcagtggtttgtagttctccttgaagaggtccttcacatcccttgtaaggtggattcctaggtattttattctctttgaagcaattgtgaatgggagttcactcatgatttggctctctgtttgtctgttattggtgtataagaatgcttgtgatttttgtacattgattttgtatcctgagactttgctgaagttgcttatcagcttaaggagattttgggctgagacaatggggttttctggatatacaatcatgtcgtctgcaaacagggacaatttgacttcctcttttcctaattgaataccctttatttccttctcctgcctaattgccctggccagaacttccaacactatgttgaataggagtggtgagagagcgcatccctgtcttgtgccagttttcaaagggaatgcttccagtttttgcccattcagtatgatattggctgtgggtttgtcatagatagctcttattattttgagatacttcccatcaatacctaatttattgagagtttttagcatgaagggttgttgaattttgtcaaaggccttttctgcatctattgagataatcatgtggtttttgtctttggctctgtttatatgctggattacatttattgatttgcgtgtattgaaccagccttgcatcccagggatgaagcccacttgatcatggtggataagctttttgatgtgctgctggattcggtttgccagtattttattgaggattttttgcatcaatgttcatcaaggatattggtctaaaattctctttttttgttgtgtctctgcctggctttggtatcagaatgatgctggcctcatcaaatgagttagggaggattccctctttttctattgattggaatagtttcagaaggaatggtaccagctcctccttgtacctctggtagaattcggctgtgaatccatctggtgctggactctttttggttggtaagctattgattattgccacagtttcagctcctgttattggtctattaagagattcaacttcttcctggtttagtcttgggagagtgtatgtgtcgaggagtttatccatttcttctagattttctagtttatttgcgtagaggtgtttgtattattctctgatggtagtttgtatttctgtgggatctgtggtgatatcccctttatcattttttattgcgtctatttgatccttctctctttttttctttattagtcttgctagcggtctatcaattttgttgatcctttcaaaaaaccagctcttggattcattaattttttgaagggttttttgtgtctctatttccttcagttctgctctgattttagttatttcttgccttctgctagcttttgaatgtgtttgctcttgcttttctagttcttttaattgtgatgttaggctgtcaattttggatctttcctgctttctcttgtgggcatttagtgctataaatttccctctacacactgctttgaatgcatcccagagattctggtatgttgtgtctttgttctcgttggtttcaaagaacatctttatttctgccttcatttcgttatgtacccagtagtcattcaggagcaggttgttcagtttccatgtagttgagcggctttgagtgagattcttaatcctgagttctagtttgattgcactgtggtctgagagatagtttgttataatttctgttcttttacatttgctgaggagagctttacttccaagtatgtggtcaattttggaataggtgtggtgtggtgctgaaaaaaatgtatattctgttgatttggggtggagagttctgtagatgtctattaggtccacttggtgcagagctgagttcaattcctgggtatccttgttgactttctgtctcgttgatctgtccaatgttgacagtggggtgttaaagtctccctttattaatgcgtgggagtctaagtctctttgtaggtcactcaggacttgctttatgaatctgggtgctcctgtattgggtgcatatatatttaggatagttagctcttctagttgaattgatccctttaccattatgtaatggccttctttgtctcttttgatctttgttggtttaaagtctgttttatcagagactaggattgcaacccctgcctttttttgttttccatttgcttggtagatcttcctccatccttttattttgagcctatgtgtgtctctgcacatgagatgggtttcctgaatacagcacactgatgggtcttgactctttatccaatttgccagtctgtgtcttttaattggagcattttgtccatttacatttaaagttaatagtgttatgtgtgaatttgatcctgtcattatgatgttagctggtgattttgctcgttagttgatgcagtttcttcctagtgttgatggtctttacattttgtcatgattttgcagcaactggtaccggttgttcctttccatgtttagtgcttccttcaggagctcttgtaaggcaggcctggtggtgacaaaatctctcagcatttgcttgtctgtaaagtattttatttctccttcacttatgaagcttagtttggctggatatgaaattctgggttgaaaattcttttctttaagaatgttgaatattggtccccactgtcttctggcttgtggggtttctgccgagagatccgctgttagtctgatgggcttccctttgaggggaacccgacctttctctctggctgcccttaacattttttccttcatttcaactttggtgaatctgacaattatgtgtcttacagttgcccttctcgaggagtatctttgtggcgttctctgtatttcctgaatctgaacgttggcctgccttgctagattggggaagttctcctggataatatcctgcagcatgttttccaacttggttccattctccccatcactttcaggtacaccaatgagacgtagatttggtcttttcacatagtcccatatttcttggaggctttgctcatttctttttattcttttttctctaaacttcccttctcgcttcatttcattcatttcatcttccattgctgataccctttcttccagttgatcgcatcagctcctgaggcttctgcattcttcacgtagctctcgagccttggttttcagctccatcagctcctttaagcacttctctgtattggttattctagttatacattcttctaaatttttttcaaagttttcaacttctttgcctttggttagaatgtcctcccgtagctcagagtaatttgatcgactgaagccttcttctctcagctcgtcagagtcattctccatccagctttgttccgttgctggtgaggaactgcattcctttggaggaggagaggcgctctgctttttagagtttccagttttcctgttctgttttttccccatctttgtggttttatctactttgtttgatgatggtgatgtacagatgggtttttggtgtggatgtcctttctgtttgttagttttccgtctaacagagaggaccctcagctgcaggtctgttggagtaccctgccctgtgaggtgtgagtgtgcccctgctggggggtgcctcccagttaggctgctcgggggtcaggggtcagggacccacttgaggaggcagtctgcccgttctcagatctccagctgcatgctgggagaactactgctctcttcaaagctgtcagacagggacatttaagtctgcagaggttactgctgtctttttgtttgtctgtgccttgcccccagaggtggagcctacagaggcaggcaggcctccttgagctgtggtgggctccacccagttccagcttcctggcagctttgtttacctaatcaagcctgggcaatggtgggcgcccctcccccagcctcgctgccgccttgcagtttgatctcagactgctgtgctagcaatcagcaagactccgtgggcgtaggaccctctgagccaggtgcaggatataatctcatggtgcgccattttttaagcccgtcagaaaagcacagtattcgggtgggagtgacccgattttccaggtgctgtccgtcacccctttctttgactcagaaagggaactccctgaccccttgcgcttcccaagtgaggcaatgcctcgccctgcttcggctcgcgcatggtgcgcgcgaccactgacctgcgcccactgtctggcactccctagtgagatgaacccggtacctcagatggaaatgcagaaatcacccgtcttctgcgtcgttcatgctgggagctgtagacccgagctgttcctattcggccatcttggctcctcccccrtgaattatctttttgatgtgatgttgaatttgctttgctattatttggtagaggatttttacacccatattcatcagggatattggcctgtagtttgttgttgttttgtgtctgtgtttcgttttgttatcagggtgatgctgtacttataaagtgaattaagaagtatggtctatttttttgtttttggagtaatttaaaaataattggtttcgtttgtctttaaaagtttggttgaattcagcagtaaaactctctgtcctgggacttgttgttgttgttgttgttgttgttttctttttgggagactttttatttctgattcagtcttgttacttgtaattggtctgttcagattttctatttcttcttggttcaattttggcaggttgtaagttttccaggaatttatatgtttcctctagattacccagtgtggtagtgtatagttgttcataacagtttctaatgatcctttgtatttatgtggtatcagttgtaatgtctccttttttgtttctggttttatttattgaggttttctttattatttcttagtctaattgtcgttttagtttatcttttcagaaaactaacttttcattttgttgactttttgtaattttttagtctctattttgtttagttctgctttgatctttattatttttttcttccataaattttgaatttagtttgttcttgcttttctagtttcttgaggtgtattgttaggttgtttattttaaatattttaattttttatataggtgtttattggtgtaatcttccctcttagcacttcttttgctctatcccataggtatttctattttcatgtcttcaagaatttttttttactttcttcttaatttccttattgacctgtttgtcattcaggagcatgttgtttaatttccatgtatttgtacaatttccaaagttcttcttaatattgattctgattttattttattgtgttcygagaagatgcttgagagaattttgatgttttaaaatgtttgagatttatattgaggcctaagatacagtctatccttgcaaatgtcccatgtcctgaggagaataatgtgtgttctgcagctattggatgaaatactctgtaaatatctattgggttcatttggtctatagtgcagtgtaagtccaatattttacaatttattatccttttagattatctgtctaatactcaatgtggggcattgaagttcctagctattattgtattatggtctccaatgttgagtgtgtatatatatgtttatttacttttctataattgttatatcctcttactgaattgaccacttaatttttatctaatgaccttctttgtctgtttttatgttttttgacttaaagtctactttgtctgatacaaatatagataatcctgcctacttttcgtttcagtttgcattggaatatctttttctattcctttgctttcagtctatgagtgtctttgcaagtgaagtgagatttttgtaggcagcatatagttggatcttgttgttttttaatccattcagccaaatctctatcttttaattggtgaattaaacctcttcatagttgttgataggtgaagactaactacccattggtatttgttttctgattgttttgtatttgttttgtttctctctttctctcttaagttattttttgcagtttgcttgttttctgtagaaataacatttcattccttgtctttctcatttgttatcataatggcagatatcatccttttgccttcagatgttgaactcccttatttcttgtatatccagtctggtgatgatgaattccctcagtttttgcttgtctgagaaaactttactctttatttctttaagatagctttgctgggtattgtattcttggctgacaggtttttttttttcttttagcattttgaatatatcatctcatgctcttctgaccatatggtttcttctgagaagtgtgttgttagtctaatgggractcccttgtatgtgacttgattcttttctcttgttatcattgactgttgactgtttgactataatgtgcctcagatagtgttgtggctttttcgcttccacagttcagtgagtgagagaaagggcacccagtggctctttgctgccattgttcagcaagcaggagaaggtggcacccagtgggtttttctgtcctgttgttcggcgagcggcagagaatattaccactcttttattctcaccacctatagctcagcaagcaggaacattacagctcttttgctcctgcagttcaaggatttccagtttctyrtccgtgaccaaaaggatcaaggtatgtgcacaccagaaagtgagtaagatatagtagaattgtattgagtcactgaagraaagctctcggcaatgagagaggacccctaaacaggtagccatttgtgagtctgagtctggggtttttatgggcttagaatcggggaatgcatgctgatgggtccatggttggtcttgaaaaaaayatcatttgattagttaaaaggcatcattcagaaggaaccaatcaagactgagtgggtgagatggagatagaagttctcatgccagttgtggagtctatctggaactsgcagcttggttttcaggctttaaactgtcctttgctggaaggttgggtttcactggagacccatccctgtctgcctaggaatttgtctgtcccctgtcgccatcgataggacctttttaatttaagtctatttgaggattattgagtgtcctgtatctggatgtctatttatctcccaagacataggatattttcaagtattattttattcaataggtttccatgtctttccccatcttttctttttggaactcccagaatttaaaaatgtgtttgcttaaagttctcctgtatgtacatagagtttcttcactctttttaaaaattctttttctcttttttttgtgtgtgactaggatacttcaaaagatctgtctttaagctcggaaattatttcttctgtaattgttgaagctctcaactgtactttttatattttcattgaattcttcagttctatgatttctgttggacatctttgttgaatttctcattcagatcatgaattcttttcttgatatcayggtattgcctatctgtgttctcttgtatttcactgaatttttgaaagataattattttgaattccctttcaagtagtttatagattttcttttatttgtggtctgttactgcagaataattattttcctttagaggtgttatgttttattggtttgtcatgtttcctgcatccctacactgatatctacatctctgatatagctgtcacttctttsaattttctgaagtagctttcatagggtaacactttttttcctgtagatgtatctatagagtcagttaggtagagtgctttggttttagttctaggtaggtacagtaatgtattctccatatgattttttttttttttgcctgtaatcaaatcagtagcatatgtgattttctcagtagtttaggctgtagttgtttgtggaggctctgtcataactttctttgggaaagcccaggtaggccagtcttcaggatcctgggggatatttgtaggcatgggtgttggtggcagtagaccctggttggtccactcctctggctcctaaatggtgtgcaaaggtgcgcagcagccccactattggagaggtcagttttttgggcttgaagtggtagcaattcctgaggaggatggcctcgggctcctggatggcacacattggggcactggcagtggaccccagttaaactggtttgcaggttattgacattgcacatggacatgtggtggccccactgctagagggggagaggtcactgttggtgacggcagataagacaggtggctctcaagctttggtgtgcacatgcttcagctacctgtgtcctggaggcagacttcytaagggtttagatcacctattttctggagtacagggagctacatgggctcagatgctgggaacacagttgtaccaccagttccagttggtttcatgagactgtagccttctcagtggatgtaggggaatatcagtggaatactatggatgtggagatacaggggctatttggcccaagtcagaatgtattctggtgatggttcttccctcaaaataatgccatgatgcatcagctttggtcccaggagtgtagggcacccagtttgattttcctctctggaacaatacagtcatgtgaactccaggaaactctctgcactaggctcggggtctgtgagggcagaggggcttttctctccctaggattccagacatctctgatgggaatgtagatggctggggaatctcccacctacctttttcctgcaatggagagtctctcctgcctctatgctgatcctggctagctgctttgcttttatttttattgtgccatcaggagtttccatgtcttagaagggcttcatcattttcttgctgaatttgtgttctcccktagatgctccatttgatttgtggttatttatttgctgttgtggcccttctttgtttaagagatgagtgctaggttcctctagtcagccatcttgatggtgtcgggaaatcttaaacatatagccatacatgagcattatccaaagagagattacaatgtattaaaagctaaattttaaaaatagacttaaaacaaagagtattatatatgtctgattctaaagtgaggatgggaaattatgtattcatgaatgatttaaattattctacaagttattgctaacagtattcaaaacagcttatgtaatataccatatgcagcaaaataaaatgtagtaagtttgtgccaaaattaagttaaaactcaaatttatttcacaataccattcaaagttaacagaggtaatttttcagaatttccctgagtttcttggtagccttagcaaaaataaatattataggcttgattgtattcaattagagaaaatattttttattattttgtggttactgagaccttagattaatttttctgtgtgaagttgtttctgtattggacagtacctaaacaatattgcaataatcggtgtagttgtatttgtttcctttgacttttctatcaactgccaatgcagactgatggtttatgacccaagtgccttttggtattaaagagtctacctgttgccaaataaaatactaatagttatgcaactcaaaaataaagaaaaaggatggcagataaaagttagatgaatgccatacataaagttttattgcatcaaacagaagaagacatcaatagcaatagttttagatggtcaagaatactaaagaaaacatttactttataatgcactgacttgaaagaaacaaaagaattaagaaagagtatagaaaaaaataatgttttagcagaaactaactatatctgtattagaataaggcaaaaatcaacactgaggacaacaaaataagtaatctggagaagaggattacgaaaatctccttttactactgtagagaatggcaacaaattgaaaagagatcatgctatccctaagcaaaacagacagacaaacaaacaaaaaactaaattgttctcttaagtgtaaagaaaattaaactgaatgaaaaagaacctacgtcacttcaaattaatttatctacttggtgcaatttgcatgcaattttttggctggacaaaatgatttctaattttgtctggaagaataaatgtacataaacattataaaatcttaaaaacgaagagtaataaaaaaatgcttattctaacaaaaagtcttaaaaatatgtttgttaaattttcagtgatcaaaataatatggctctaaaagttgtaaagatgtgatagaaagtctaaagacatattgaactatatgtaattatatagtctataataaaagtcacaaatgaaatctggtggagcatcaaaggygtcaggattattgtataaccacgtgaaaataaagtaaggtaaattctacattacatctattacaaaaaaatcaaacatgaattcagggtttaatttttgcctaggcacagcctttttttttttccaaaatgagaaagataaaatgttaactgccttgagcaatgaaaatttattttaaagaaaatgctaaatcccaaaacttacaaatcaagttaaagataaggatcataataacagtaacaacagcaacaacaaatctttgtattgtaaaatgcaatccctatattgtaaaccaaatccctatattgtaaaaagtaatgaagaaatataaattaaaacaatgagatttaatttttctatccattttggaaaatatttttaaaatgataatacccagtgttggcaagaatgtgcaaaatttgctattctcattaaacactggtgaaactaaattgccacaaactayggcataaaagctcccaaatatgtgaacttctatgttgatatttctgctttcacctttcaaagaaatttggggttggggcaaggcatatatctagagctaatagcattagagtagagacaaatgctttatatcatttttatcttttaatttttacattttgaatgcagtcaaaaccagacattcttaaccaccactagacattaagggataaattccaccttgcaaaggtaatctgtagttttaatgattcctgctgaaacagtggtgatcagaaagtatttatgtacatgactttctctgttttactattaaatatggcttgtttattctcaacttttacttgaaacctggtgaagaattaagtcacatataacttttggtccacacatcaattttgtaaatactaccatgatctctgtctcattgcctgtctttgttccctagttcaacccatgttcccctttatgtggaataaggatagttctcgagctttccatgaccactccttgctgtccagtccagttgataaaaatctatcagttgaaattctgttgctaatactctaaagagctttgacttattcaacctcatttgcccaaggaaacccaaaccctggaagattacggctctgtacctagtgatctattcttcattacattactctcattttatcttgaccacaaatatttttaaattacttcctttgattatcatttcttcaacatccttgagccacccaatgcgtatattctttcagatttctttcattctagtattctctgccttaattctcctggaattccacatttttctcctttcatggcatttgtcacagatctttaataaaatatcaatttcctaatttacaataggaaaaacccagacaaggtataatccagcacacttatgtaatttagtactaaacagcatcatgatttgagtccagtaggtgaatattgtttttactattagtgtgttgtagaactcattccagtgaaagggctgtttgtccttctcctgtgcaattctatttcctgtatttgcatgctgactcttgtctggctcttcacataaccataagtatgtttgtgcaggtgtgtagataacacccactgtgtcacattcctctcttccttctcaacccactttagtgtaacttctgactgtaacatggatatgaaattgttcttgctatccttactaaatcgaattgcactcttttaggtgggttcctaaggagtagagcattaagccaagatttggcttygtgtgatttatggagggagaaaaagttctttagaaaaaaacaaaaacaaaaacaaaacaacctataatgaagggagggaggcagaaaaaggaagaggcaagctctaagcaagaatgttgatcatagtgatagtttagccttggcccgtacctttagggctttgcagcaaaaatccaatcataggattgttcctaacttaaggcaagaaggctggcctttcctcacctatgtgtcagtcattatctagggcctcctggcacagcctatttctgtggataaaggttaattcttagggacggctgcaagctttcagaagttaacactcatagcagctggtgatagttgctctggcaaggtagcaaaggatctgctttgagctaccaacagcatctactggaaaccctttccaagtataatctgttttgaatgctctrcagtgtttgacactgagatgcttacctttgatagcctctaacactcatccagtgcatttccactaggttttcttttaccttttaagccacactttgtcaatattactaaatccctagtcttcctttcattctttaatatgtgtaaaacttcagttttttcttcaattctcatcttattacacccacactttataaattatgttatccagttccagagctacagctaccatgtttgcatgtgtctgtatgagcccattctccccacatacatctagatcgaaatgctcacttcgtgttttttttaatttaataaataaacttatttatttatttttgagatggagtttcactcttgttgcccaggctgcagtgcagtggcgtgatctcagctcactgcaacctccacctcccgggttcaagcgattctcctgggtcagcctcctgagtagccatgattacaagagcaagccaccatgccgggataatttttgtatttttttagtagagatgggtttcaccatattggccaggctggtctcaaactcctcagatgatccacttgcctcagcctcccaaagtgccaggattacaggcatgagccactgcacccggccctcacttcatgttttaagtttcctctcagatatatcccacagaagcttaaagtcaacatagcaggaattgaacttgaaacatttcttgtgaaactgtcccttatgctcattgactagcacccccattattcttatcactcccagcaaaagggtgtatctctttatgtctagtgcctaatttgatttggtcatagactagatgcttaacaaatatttgctgagtgaatgaatagcattcagtcagcttttgaaaattcccatcatttatcactcttttccctgagtcaagaaaaaatatatcagacagtaacatatatatcaagtaaaaattaaaacaaatatataacaaggaggcttggttttaaaaaatcattggtaactcataattaaatcattttgttagaagctaataaaattgagtttaaagtgtgtgatgatgaggaaatgttagtggataccaaagtagcattgtatttagtttccggaatggctcttgcagcttcttatagttactactaaatttcgaaaagctggtgagttttatgtgttgtagttatataaaatatccaatagatggtactgtaaaatgcctcacatgtaaaatgaggagttacagcaggtagagaatataaagggaacattttcagaattctgaggagaattgagatgtttttctctggatattaaattgtatttaaaaatctgatttttaaatataatttaagcaatatagttttccatgtaaaatataataaataatcattcttctttgtgttcagaaaatgaaaattgatgtttattatagaatggaacttcaaaaatattcacattctcttgtttagaaattgtggctttttggtagtaattactcttagttaatgtggcattttagtgaatgttactccaatagaatattttcagcaggcaactgtagctacatgtatttattactgaaattctaaaaaaattttaggttaagaataaagcaaacctttgtgagacaatcttcatttgcttagcagagtggaaccattatttctctcacttttggtctccaccaagatgagtttagtgtctgaatagaatattataccagaatgtgattacaacatgcatatatatatatgtatatatgtgtatatacacatatataggtatataaaacatatttttgaatgttgtaatcacaagtatatacatgtatacacacatgtatatatatatacacacatatatatataatcttatagagttaaacattcttgtaaaaaagactaataatttaaaactgcttgaagtttgctcctaaagagcatataaaaagtatacatttgtagatagcctagtttatcttaatactcatgcagaatttccattacaaagtggtgcatgtctacttataaaagtgaatgccaaatttttattaccagaactatgttttataaaacctttttctgtatctaaaattttctgaggaatatataataacactgaaagcttgaaaatatgtatatatcttagtttattacatgcagctctgaaatttttatgttaacagttcatggcattgtttctgactaatgctgagtattcctttgtacacgggttatttatttagcaaagttttattgaatataactatacacctggagaaataaagatgaatagctcttaggtagaatgttactgtttgaatccgcagcttcttgtgcgctatgtatcatgtgtccctcagcttctttgtgcatttactatttttaaatgtgttttatataatcagaatgtgtggtatgatgtattatttattctcttaaaaagaagctattcttagctgtatttgaatgtgctgcttaaagaaaatatgctactgtaataacttgagctagcttaaggaattcaggttattttataaagacaaaaataattagtgttttcacaaatctgggcttttcgaattgttgtctcctaagcaattttgggacaaatattttcagatttgtaatataaggttgtgggttaaaccaataattgcttaggtagtttgagttaaaatgatttttgcccgccaggtagattctatctgatgatgacatatttatggaataatggggctcttagattcctacccaattcttaaagattctatagttatcgtatcttgtactcttttcaaaaatgatgacacacaccgatgtatgtactcagatttcctagtacactggatgtatataacattacatagcaaagtttctatttcggctaaaaggatttaaatataaactgtgcatgcagatctctagtgatagactcttaatagatgtcagatactctttatcgctaccctcttttatttcagtaacattttaattaattcacactgattgaataagtgtacattgagacttgtttcctaatgagggcgcatttagaggaaaggttctgcatcattctgatatcctgtgggtaattatattctaattatatggtcgggggaaaagagtctataactcagaactgatattgttcgttggacccaattaattacatgcacataatgaaagttcatgataaggttgactggcagtcagtgtaaaattttaactcaattgaatcttagcctaacgtgagtacagaattggactttaacctggttagaaaatactttggcatgagatcaatggatatttaaaggagcaaaagacaagaacaaattccattataacctctttgttttttaattcaagatctttttcaaggatggtgaaaaggagacctaggctttaattctaaatattattatcaatatactttcattacctatagtgctatatttgtattctggaaagcagcaatacgctaactatacaatgatatatttctagaactggctcwcgtttttatagggagataaaataggcataacaggaaatattatagattaattttatgaacataaaatttgtatgtatcagtctattatactgagttctttgaagggggtgattttttcaagttaccaacttccctcagatccctgtcccaaacatacayaaacataatcacatatacatatacacattcataaataggtatctattaatgaattatatgtaaattaagagttctgaagaataatctgaaaaaatagtcaataggatgtgcatgtttcattttgaaatgtgttttgaagatgggtgctctaaatatcagctcccctctttctcctcctcgatttcatagttttctttgctcagtctttggaaagaacagtttctataattgaggaaaacaacagagagagaattttgttctttctttcttctaagagcttcctctgtctccatttttctccattgctttctatctttgatatgttttctaccctcctccataatttcttctgtgtctctaatagcccccaaatacatgtttttattttttaaaattctgttggttcccttcttgtcaatagcctccagacaaaactctacaaatagacataaacaatcatatttactaagtaagaatggaatattttgtgagcaattacagttgaagggtagtgaagtaaccacagttaaaaatatattttaccattaaatttctgttaatgcaaactttaaaatttgagtcaggtgagaagtagtcaagggaccctggataagattacaatatgtgtagcttttaaaatgttttatttttatagttacatcttaattagacatatcagaatttttgtggaaaagaaaaataatttatgtttcttttcagtgtcttgcttgtattatgactgaaataatctcttactaaaggttttaataaagacaacaatagtattaaaatcatttttatctcacgtcctttttaaaacttgcattgtattcatatgtgtgagtgtacacaattaaggacctcaagaattataaagtttaaacaaattatatgaaactgaaatataaaaaaaacatggaagccaaaaatatatgtaatttttatatcctagagataatacactttattatcttgtttgagagaacaactttacctgtccagctaagacaaagtgtcattttatgaagacaatttttctttatcttaccctagttttttttctctgtctcttactacttttttgatgccagagatatccaattgtatatttggaacactttaactactacactggaagttattgtgttaaattaattcacattattcaagccagtytytcaggcaaaacaagtgtgtgtgtgtgtgtgtgtgtgtgtgtgtgtgtgkatcactttgtagatatagtgatttctaaatatttttcattcttcatcaatattttaaaataattttatttccaaaccacttaaaaaatgaaggcaaggctaaaaatagtaattttaaaaagtctcctcttgcaactactgttatttgaataaatagagcctgggttagggaagcaatattctgtcactaactttgttttcctgggttaggcatctaagctctctgattttcagcttcctaacctgaaagataaagtatcttgtttcagtgggagtattaaatgaggcaagatagcaaacatgaaaaatatataaatgtaaaatatatatataaaaatataaatgttcttatgtaggtataaggtatcatttttaaagttttcctttagcctgaaataactaatgacccttttaatgtgagtactgtgctctcattatatcttaactaagtcaaacctccaataatctccaccaaagatttttctttgtcctatgacaatttggattaaattgtcaatttaaaatgattacacattagaaaatatgaagacaagagatatcctaatacttaagaataatagaattttaaaaaattctttgatattaaattgaacttaatgagtgccctgaaggcaaatgcatcttttaaactaattatctgtactgtgtattctatttaatattaaaaagatactgatcaaataaaatcaatcacattcctctgtagtcacacctcacattggattaaataaaaatatacagtttctgtattaattctgattaaaaatatattacatttagaatcatgcactcatgatgattttcaaaaaaaccaaaacatttactctgctcatctttgatatttaaaaattaagtacaggagagtaaaaaaagaagtgatacgatagctaaatttattttctaataagtttctacttttcttttagatctaagtaccatggtttgctcattgtaacaggaataaactactgatgggcatgtacatttaatatataactctttacacattttgattgtaaatgaggttagatatatgttggttttgtcactcttattcttggagtaaatttctagtgttgctctcagaaggctgagtgttgcataagaaaattcttagggctggtggctttctctcttacatatttaaaacttctagctccagctgggtcatcagttttggttgatcctgctactcatccttagcaaactgcttttttattttcagaaaagaagtgacaaacctctgtttcattacctttttcattgtaccacctctctgccaacctcacttgctctctatcagtagatatctcatacccctgctgctctgagaaagaggaagacttcaagtatgttatccatgaattgccaattaattgcaaagtggtagctaggtttcaatttcataccacagtgtcttttctttttcttttttggataacttcaaatgggaggattattatccagcatggcacagtctttacctttgcaacatcggacctgttttacctatttgtattatcttttggccgctgtgggtttctgcatttgagacccaaaaggaacacatttggaaaagtgcgatgcctgtcaataagggcttctgctctaattgaaatattgcttttttctaaaaagccttgtttttcatttatctttaacagttccccctctttctctgttcctctttcccagcagcctagaaacttacctytatttactcatcttaaatgagaactctgtttccatgaaaatagtgctccttatttctctcccacccactcctatgacttctctcccaaccttctagcaacttcatagttttcactgagataatgtacatatttttatttcattgtagaaacatttttacacacttttaggcgttaaaggatataatgaagaggtagaaagaactttcttctctcaaattttattagaaaatattcactaacaataaaaaaatccaatatattttccacatatattcaataattgctattgtgttgccataatttctttatatatacttctttacatataaatatatatgtatgtgtatatatatatataaagctgaagcttttgaaagtaagctgcacatagcctaacaccacatcactaaatatttcagcaagcaccttctaagactaaggacaattttctacctaatgacattattatactctcacctaagaaaattaacaatgattccataatatcagtcattatcttgtccatattcaaatgtctacagttatccccaaaatgccttctgttgcttttatttatttactttttgggcatggtaaaagtgaaagtggaccaggatctatctgaagctcttgaattgcatttggttgttattctgaaccatttagacagccataatcttttcacttggctttccagtgcctgctctctgcaaatgtatgcatrgtaagcatacactcttctaaggtaaaaggcatctctgactcaggctctggaggctgattgaagtctcttattttggttgcttgagagtctctgagagtttcctgggtccatggcacagaatgggataaggatccataggattacattcctgacctgaatttgaagaacaaacttgtatatattatgataaagatggaaggactatatccatgtcttgcaattttattcagaccttaagcttcaacccgaagctaagaaagaatgataataaggttggcaaatatctttgaactgacccagagagaaactagcacaaatattcrttgtccctggtgttatgtagactgatttggactcagaagtcaagaatgttactgaaatcagkaagttttcagtaaaggctctaccaaacctactgtcaattcatcttcaaaacaacaataattacttccattagattctcctgtggaatggatagttggccagagctcatactcttccacttcrtggcttcttttgactagaaatctgcagctacagtactttctacttatattatggaaatatcttccaaatagagctgtattcctgaacaccttaattttctgtggggctgtgctagacctcttcttctccttctgtgtcacttttgagtgcactgaatgcttttagtccatctctattctgcacagctgtgagggtgtcaggttttacctatctcagattcagctatttttttcytttttttttttttttttggttcttgctgcctttctaaagttctcctgggtaagggactataataatatctggactatcagatttttcatacccatcttggtgatctagcactgcccagaccctccctcagatagctcgtatctagggaggaaaagggaattctgactacctccttcttttcagggacacaaatatctaagaactggcatcccatccaacttttcttctcccgttccagcatggggaaactttatctagtattgtgtgtgtgatttgtcaactaattatccaaatttgtattttatgttctcatttccatagaatgcaggcttttggaattcagtgaccttttatcatttcttgtcaaaaaaaaaaaggctttccaatatgaactacaaagtgggtagtagtggtagataatggaaaacacagttgtgaagactaatgtcaatgtatttaaccccatcttaaaaaaattactctcaagtaaaattcttgctacttatttaattatagtttttattcttttactggtattaatggaatatgttttcttatttccagagtatcacaaaacaaaatgaacatcataagctatgtctgtgttcaaaagacacagtatttttaggaaagaatgagagttggacttcaaaatgaaaattgggatgggtaaaggggcaaattaaaaaaacttagtggaaattatttattaaagagaatggaacttggagctaaagctgaccaaagatgttgatcagcatgctttgggtagatgaagttgtgttttggataaataatttcacaacctaacccactctgtgttagataatttcttattcaatgaaaagatatttaattatttaattcaaggaagcagtaaaattataccaaggaaatgtatttttaatttactcatttatttcacaggcatgtaatgatatgagaaacttcactgatttgttttgagtttgactctttttcagctttcatatgaacttctctttttcagcagactctgcccacttcaggagtttcagttcctgaggtgcgtaagcaaaaacaggttttcacacttaaaattataggtcattatacatcttgtattgctgtaaagaacattttstgctggctcagtgacattcgaataccagcatgttatattttatttttttcatattctgctaattggaagtggtggttttcatattttcagtgatgggatagacttgaagaattttccatctatatttgtgataagcattaagaaaacaagaagttatgtgacctagacttcacagagaaaaataaaggttactttacaaagagtttttactacatagaaaaatagtgccactcccattttttcacgttaaaatgtagatacattgctggaaatccaaaagaatttattctttgagccatcaaaatataagtttcaatggcagtatgttgagagactcttgcttactttgaagtgcccatcactttcaaatgaatgcagcattaatcacctagcccatgccattgtatagagaaacatcagaataaaatatagtcagaataaatggcttttgttttgaaaacaaatgtaagcattgccacaacattattttcagtaacatttttgctttacctttgcattgatgatgcaaagcctccacattgttctgtgacagtatccaattcaattgttattatctctataggaaatgcccaaatggtattgtttccctaaaattgtaattaaaatctgcttattttagaaagtattgcttatatgaatgctacataagattatgaatttatttagaggataacatgtttgtaaaaaagtgtcataactgctcttttctccccaccaaaaatggctttttaatcagtgtagacctcttcgttaaattaaaaaaaaagttctcatttttaaccagagacatactcaaaaatacttggacatacacttaaatataatgtttctaatctaagaaaatgttaaactgattttatattctttaagtgagttggtgacattattatcacaattattattataaaatagagatgctaaattacacactcaagtgacaaaagtattaggacagtttattatttcattgggttatttaagtgtgagagaattaattttgcatcctcaggttcttgagtttgtttctgccccgattaccagcccaatcaagcaaatataggcattgcatttgagatctaaacttttctctttagatctgttaatctccaaagcatccccatgcattcagttatataatttgtgtcatatagattgagtaaatagatccaaatttttgtttttatatatttttttaattttcaggaaaaaagtctttattttgatatgaagtttttaaaagtcttcctatagttatttttttctggcactatatattggtttacattaacttaaactttccagtatccctcaaagtcattatataagatttttcaactttgttgttccaaaaatttccttaagcccatgcatggatatatgcatggctgagtgtgtgaatacacatatatacacacagaaagacaagaaaccttatgttctgccatcaggaacagttgctccttggttaacggaaaatgtggttaaagtatatgtgggagaacatatagaaagatatatacatacattaaatgtttaacttaaaatatgtacatttatattcattggctatatttttgaagattaagggcttttctatgaggacagatcttctaattggaaatggtatcttgcctttcttgtatatatcacaatcttatcacttataatagtttcaattcttttaaagtatagcaaaaactcaagaacatctgtgaagaaatctgagtgtaaaaatactatttttattattaatacccaaagcttgcacagttgttctctctaaacttaacttgaccactcctcatacacaccacacacacacacacacataacttgtgttattttgtctttctaaagcttgcaggttattttttataaagatgactctttcattttgtattcaaaattcaatgatttgagtaataattaaattacacagttacaattacaaggtaagttttacttagaactggcataaacagattgagggctaataagtcactgtgttgagcatttagcttaggtggtagaaagagacaatgagtgtgagcataagagagctgcctcctggtacttactttcagtttactgtggatgacagtcagtatggtttacaaagggattggagaaagaggaatgttgaggttggttacaaagtctggttttttttgttgttttttttttgtttgtttttttgagacaaggtctcactctgtctcccaggctggagtacagtggcaygatctcggctcactgcagcctctgcctcacgggttcaagcgattctcctgcttcagccgccaaagtagctgggatcataggcgcacgtgaccacgcccggctaattttttgtatttttagtagagatgaggtttcaccatgttggccaggctggtctcgaactcctgacctcgtgatctgccctcctcagcctcccaaagtgctgagattacaggtgtgagccaccgcgcctagcccaaagtcttcttttgtatataaagtatacacatacatatatgtgtatgtatactacacacacacacacacacacagacacagacatacacacattattttataatggtgctgccatgtactagcacatagccaaaattgaattattttggcatagaccctcttattcctaaatttcattccctccaataagaatttccttaacagaaatcttgtaagtggtttatacccaggataaaatcatcctaggagaaaatatgaacttcatgtgtaatgtgtgaaaaccgggacttatggatcaagtcaccaagtgtaccttcaagtgtaggaagtgactaacacccccaggtactttaagaccagttgtcattttgtctgttttgttgtcccccgtctcccaaaaagacaccacccaaatcaccacagcaattattctcagctatggtgacttagtgggcaaataaagtacaggatgttaaataaatcatacttcttacaacacttaccttttactgctatgaccaagcagtatacctgtgattaacttaataataaaataaataaaattttttatctatactttaaaatcattgccatttactgagtgcctgttttatgtcagtacttttrtctaaattttcttacttttttctaacataagctttccaatttatagttaaaataagtggtaacatagcaatggtaaataacttgcccaagcttacacagaaataaaagacaaagctgcaatttggcttctaaactcatacttttgcctttacaaaaagttgtttttgccttttttaaaagtacttacttaactaagtttaaaagaaataaaaatctttagaccttatatcgtttattatatttatctttaaaactttataattaaaaacaatcaaaactgttttttctagtcagcaaatagttttgctgcaatttccaaagattactaatagatttagagccttcatcatttttgaaatgaatttgtttccttcaaccattaaaatgttcaaatcccacattcagtccatattgattaaaggtgcagctttgcagtttgttagtaagttggtgtctcagaccgaaccttcgtaagccctgctgaatgtggtaacatttctgcatcagagagatcttaactgctgtgaatctrtatgataccttgggttaaaaactctagggtttctggaaaattcatgtggcctagctccagtggcagaaaggactaaatctccattcaggcaagttgtgcagtagtagcagggaaagtaagttctacgatacaagtgatggatgctgttggcaggaaagcactcgcctttgtagctttgtaccagtggaggtgctttgctgctgccagtttctcatgctgagattggacaaaaagaagaaaaccctgttcttgaggtaatcatcacttgctgcttgcagtttgccagcgatcgataacagcaggcttaagtattgtggtaaacaacccttttgtgaaagcagttttcaccagtgtacaaatactctacctctgagaatcagcatgatgtagacaaagattttttttttagagcacatatttaaagtgaggtctttttattttattcatttcayctttctattttctgtgaatggtctttttggcttttcttctctgtttatgatgatgattattcttttggaattctaatacaatatattccccagttaagatctgttgtgctacttgtggagtctacggatcacaaaacactgaattctatatttaaaatgtctacatagcaaacacaaatggttgatatttgaaaatgctcaaatatcaataactgtattttatattttgtagttatatgttctattttctttcatgacttttttttagttagagtagctcttttcagtgtttgaataatttctattgattaaagcaacaattttccaactctttgtatatctaggatgatttatctggcagaaggaaatttgccttaattacaacaatgtaatttattttgtggtttagagccccaaaacttaaagaaagaaactraaggttaaatggcaaactttgtcccctattatcagagagcaattttatcctgaatgattgtgcaacctaagattggtgagctctttctgaaactttcaataacttcaacattggtaattaactctcataaatatcataatagaggtctgccagtcagggtcaatttaccttcccaaaaaagctagtgaaacctggtggacaggaaattttttgaggatacagttgcctcccccttcctgtccctcatataaaaaggagagacaattttctcaatggaaatagaagaaaaattaaatagtgatgaggctctcctgtttttaagattttagactggattaattgcacaaattccacacatttgcatttttccccaaagaaatcacttggttttcttgatgcgtgtgtctgtgtgtttgtgtttaaatgaatgcttaccattttagtattagatactataataaaatacacagacagatggatacactgaggatttaaaaattaacttgttatatacctctttctcataattctggatttcataaatgaaatctcataagttgaaaactcaacttagggttttaaaatttgtttttatttatatatttatttatttattgagacagagtctcactctgtctctcaggatggagttcagtggtacaatcttggctcactgcaacctccatccccagactccagtgatcctcccacttcagcttccagagtaactgggaccacaggtgtccaccaccatgcccgactatatttttgcgtttttagtagcgacaggggctcaccatgttgcccaagctggtcttgaactcctgggctccagcgatctgcctgcttcagcctcccaaaatgctgggattacaggtgtgagccaccacatgcagcctgtttgtattatttctgattgtttacactaaagcaattgtttagtctcctgcccaacttacttaggggggtgactacttggagggacatgatgccatttaatcaactgctatctctgccatttggaggttcttagaacacaagaacttccctagctatacgtgtggccaaaagtaaagtcatattaatagatggtttcatagctctttaaaaacatatacttgcatgtcttaaatttccattaaaacataaatatataatctggtgcaaattcccagttccattgtaactaatcaaattgaattttatttaattcttcaagtgtaagcattttataaattgaatgccaaacaacaattgttggataattaggaagaataactgtattaaggtatatctttcacattgcagatttttacaaaatattgatgccatgttttatatatatgcatgcaagaatgctggagtaaattatttccacactcaccaacagcattaagtttttgaacagctaacacaagctatgcattttcaaatataagcgttgaacttttaaattttaaatatgttcctgacgtaaccactgaatgttttttcatacacacacacatttggaaatataaaaacaatgttgatgagtacccaaaaaggcaaccacaactattttacatcattcatagtaactgttatattgaatacatactttaatgtagtgacartattacagactatacattttatattaaaccttacacaactctgagaaataggtatcactatctccattttgccaaagcataaaccctctaggttacataatacttaggtagtagagatgagattcaactcaggcattctgattcgagacctcatctaataattcactcctatatacattatgccatttaactatctatgaataaaattataatttgcaaacttaaaaagaaggaactttcttttaaaaatcaatatttttgccagaaattatgcttatatgaaagcacatcactttccaaacgacttgaatttcaggaatcctattatggcatccattttcagccacacacaaaatatattcagtgtttttgcaccatggaattgcaaggtaaatggactatattgattagcattattttagtcagagacgatttctgatccatctagccctaatatatttaaaaacagctttactttcaaagctatttaaaaatgtctttctaggaataaattcaatgcttgatagcagagaagggtgattatacttaataaatgtattgtacttgggcaatgatcactctaaataccctttacatgtaaaacatttctcagttaccccatacatttgcacaaataaaatccgatctttctaaattatagaaattgaaatggtactctaacaagcaaatataggaactaggaaatatatatagctgagtaagtgataggaaatgtgtggcactaaagcacttaagcacccatggcatgcattgccaatcaattaggacaatttttcacatcaagcctaaaatccctaagaatccttctcaacagttgcttcaagaacttagaaaacttttcaaaaaagttttcatttatttcttgatttatcctgacttttgttagtcactgatttaggatctgatatagaccagtgacacaaagaaagttcttttgcttatggaactttgattaagatgaaagaatgcagacaattaaacaaatcagataaataatactttaggttgtaataattgatgttttaaaaggaggctcaagggactagagaaacttctctgacatttgaccacatcctgaagtcaggaccaaggcccacaaatgtgcagtggcaagttttccagcagactgcagaatgattgcaagagctctgaatttaaagcatgattgttatgatcaaggaacaatgaggaagccagtgcagctggagtagggtaaaaaaaagggatgagtttggcttttgtgtagagaactgagtgtagggagacaaaaatggaagtagaatgattcattaggtgatagttacaataatccaagcacaaaaagataatggatgtttaagccatgtaatgaggcaggtggtgagttgtcatccagtttgagatttattttctagggacagagtaggcaggaaattttaaaactaatcttggacattttacaatgttgtgctttaggccttcatgtggacatacagaaacagcatctgcatgtggaaattaaggctcaggtagaaatcagaacaagaattatacatttagaaatcttcataaaaatgaaattgaaagttgtgggaatgaatgaagttacctagggagtgagggtagatagagatgatgagaggtccaaggaagaggctgagtcttacaggtggcaaagctggagaagcaatgggcaaaagagactatgagggcgaagttgtgaaggaagaagagagctcagagaaagaagtgtcctggaagccacgtgaggcaagttttcaaagagtaagaagagatcaattctgtcagatgctgctgaaagatttgagaagatgaagactgatcattagatgtgaaactgagacggtcattggtgattttagtaaaagatagtttggtggagtaatggtgatacaagttgattgggttgtgttaagagagagtgaaaagagaggaaatagaaacagggagcaggcaactcctaaaagaaatttttttactatgaggaacaaagtaattagctgggatggaatgtcagttttaagatatatgctatttttgatataaatagtagcttaaaagtccatcatgcaattaaaaataattttcaatattgcatgtatttataagcttttcttagtactcaataccacattctttaaattataatcctgtaccctttatctgtatcattacatatgaaaataatcaacttcagtaatcgttagtaacttttgataaagagtcataattgggcacatagggataatacaatttggtattctttctcattatttctttaaatggtggttcgatcatgaagctatcatatatattgagccagttgaaaacaacagctttcatattattcactaggaacttcaaattagaaagttgagcctgtgtttgtaaccatgaaactcttctattagtaaaaacaacttaacattttattatgttattttcctaatttttatttttatcaaaattttcttttttacaggaaagacaatcaacagtgaaaaaggaaaagagtggttcccagcagccaaacaaagtgattgacaagaataaaatgcaaagagccaactctgttactgtagatggacaaggcctgcaggtatgattttttaaatcaaaattttagtaggtttcatatttgatacttctaggctctaaaggggcatatgttcagctrtcaacacatttgtttaatctgcatattagcttagtagactctttcagaaagatctttattaatttatcaagatgtcagtcttacggttgattgacagagtaacattctggttaaattaatcatttatgattttatctccatttaaactcaaattggcaagagatcttttgaaagatttgaaaattattgctaaatatacacacttattaaatacatatrtgttatttatttacaggtatactttatatctctctatatatttatatttagtatgggtatgatatgaagagtcactctgatagcaaaaaagactttaggaaagaagaaaatgaactctgaatgcatttttttctaaataaatatttttaataataaagaatgtattgtaatatatttctagctttcaaatttttaagtcaaaattttaagtcaaaatttaaacctcaaatatatatctaggttaaataaacacaggtagtcattttttaatactattatataaaaacgtgtaagttatctttaccgcctgtggcatcaagaatagcattttaagacattgtatggggtgaatgtataacatttacttacctctattttttacctgtgtttcttacttcaacagaaaaatggtcaataacgttggcttaatttatgaaattgtggatttaagtatgtttttctacttatgtttttgtgttccaactgcctatacttcaagtttcacattctctgggaatatttaccaacaatttaacatacaaacagtatgtcacacacttgcattcattatatttgattttctatcatctttttttatttcttattttatttctgatactatagattatgtcttttgtattttttcaatatgagagcacagttcagggcacagagaagatgcctaaatgcttgcttctttatcatcttgaatgtcattaaaatttaataataatttattaaatattgataactaagttactgtttgttttttatctaaaaatccattgtgaatagaaaatttttcataaattattaaactcaaatataaaaggagggaattctgaataataaaattattatatattagagaacagaaaatttaattttaaaaaagtaaatcaagatgtacattttggaactcatatccatatgtttagaaatttcataggagctgtcaaatataaaatctatccacaattttattagcaaaaaaattaattaaattatcctataaaatttttattgaaaaaaatcaacattttaattcaatacgtggatgcctaatattgataagtttaaatcttcagctactctgggttcctggaatgaaattaatgaaagggaagcctaattctgaaatctaaytgtatttcacatgactaggcacatacttctcatcacagatgggaagcatatatcatttgttaaataggatagcttaagcattatgatggtattttatacatattagcttgtttaattctctcaataaacatatgagatcaataccattattatcatcattttcaaaatcatgttgatgttcagaagtgagataacttccccaagggcacagtcagtggtaaaaccaaggtttgaatgaagaccatctgactagagtttatgtgtttcactcccaagacaccctgtctctttgcttaaaattttttaacatgtatgtaactgctaaacttctgaacatcttgttcttctgtgtgcttttatattgctgcaggctttgagatacaatttatgtatgcaacagaattttaactcctctaatctcagttttccaagattttcataatcatacctcaatttgcccggacatcaaaaccaaaattaaatagtacatgcagtgttttaaaggttttaaacctacatagtaatatgtttgattttattttctattttaaaataatctgaaatattcgaccttattacagctaaattagtcacattaaaaatcttagatgattaacattctttgtggaagtgtttcatctctctaaccagataataactttttataactttctttgacatataaaagtgtcagctaaaattgtgagtgggacaagtatagaaatcagccctaaaaaaacaccagttaaaaaaataccatatgtgtagtaataattttttgaattaaaaaaagttggtatataatcatgtgcaaaagcctgttgtacctcagcagaaaggaccaaaatagaatacacatatatagccacatagttttggagaaaaaaaataaaagaataaagttctggatagctattatatgcaaaatgaaaaaatagtaattttgtgttgtatttatcaattttaaaataccaaaatgtttgtttattatcaagaaaggtaaaaagatctaccataaagttaattttttccatgagctttaaaaagtatgtatcattaaaaagcattgagttgcagcccagtttgcatataacttcagtgacagaagagatctacactgcttaaagaagactattaatcatagttaagcacattcatcttatttctttccagctaaccagcataatgatcaggattattatttctaattagaggaagtaatagatcatgtataaccttaggatgagtctcattaattaacccaagtcctaggggacttcaaatagaggtggttaggcactctgtctttgtcatcgctcacaccataggtttacacttaatacatatgatcaaatgtaattgaaactgcgacttcttaccatgcaagagatataaaattacagatggctctcccacatgtgaagaaataaggagaaaaacagaacaattgttttaaactgtgtttatgttgaagttaccttgttcctaaatattctttgagaaacatttccaaataaaagggtcatttaagaagtaacgaatctagtttgtaacacttttagcacgagaaagaaagggggacctttatgattaaatatctaaaactgaaccagtgtctttcctcacaaaactgcctctttattttatcttccttatttgtaatatcttattcttgtaatcaccaagactgtaaaccatgcacccatgcactaaatgtaagtgtatagtatatatgtatattaaattaattatctctatataatcaattcactttctttgatgtatgtgtgtgtacgtgtgtgtgtgtgtgtgtgtatgtcctttgctcattttagaattcttaaccctgttgactgtttcatacttagcacttcattgacattctaactctcaatgtaaacccagaattgttactctatagttttgagcattatagcaacctttaaactgagtatctccatatacataaaatggtagataataaatgatgtaaaaatagagctgagtaagataagaaagatcagggctaagagtcagaattgtctataattttaagaacaatggctagtttaggccccattaataaagtgatatttgggtaaagacttaaaagagatgaagcagttggtcatttggatatatggggaatggacaaccctaaggtaagtatatgcctagggtcagtaagaactgtagttggagtagggtgggcaagatggaaagtggtagcaagtaattcagagaagtaacaggggctagaatttttaaaggcttgaaggcttcaataaagactgacttttgatctgagtgtgatgagaagatattggtgggaaagataagcagaggagtgacatgattgaatggtattttaaaaggcttactcttataaagattagattgttggggagccaagagtccagtagattactgttgaagttattcaggggttataagacgtaggcttrttaggatggagcagtggaagtagagagatgtgatgggattctacatatattttgaggaatgagcaaaagatatgctgatgaattgactacagggtttatgagaaaagtgaggaatcaggaacttctccaagatattaatagtttggaccatgcaactgaaatgatgaaattgccattgactgagataggggagcatctgtatgaatgtttagagggaaatttctgctgctgttagatatccaaataaaaatatcaagtaggtagaccaatatgtgaacctagaaattagaagaaaaggcagacatgaatttgggagtgaaaggcattgatggcagccatcagataagatgagatcattaaaggacagagtgtgtatatagagagaagtgattgaactgggatccaaaaccagtctaactctaaaatcatgctctttaaatgtactgtttttaactgcccctttatgtgattaagtaagattttacatgatgaattctattcagtatggtggagaatccagtgtgaacagtctcctggaatrccctgcacatcaaatttataaccattcttcaagatttcaactaccacagatgctataaaatctttcctagacactttctctcttcatcagtatttttgtgtgtgtgaaaccgtattactgtatctcaagtattgtttaactgttttgaaaagacacagggctctgtagagagagcctcaagcacaatggaagagtcatgggagattgagagcaggttgagggttctttcatcctttaaacaaatcaactaggaagtcatctgttctatatgctgttctacttcagatgatctcaaatgctgtataaatatatgtacttcaaagaatgaatagttttcagctgacagaatttttgacatagttgtgtttttatctttcacctcctactccaccaaaatctataacaaaaaggacacaatattttaggattgcagcaaatgtattttcagaataattgaattttacatatyatttcacaattgttttgtgaaagtaaaaattctaaattcatagacagattggatacaatccaaaagagaattagtaagcttgaatataacgttggtacctaactacattkgtacctcatatcccatttaggtttcatcagttgtcccaataatagtttttttccacaaaactagtccaaaatcatattasttttctgttattgatggttgtattgtgtgtatatatatatatgtatatatgtatattatatatatgtatatatatgtatatacgagagaatgtttttatatgtaggaaatactaatgtaaatgggagtggtagtgatggagtagaattttggcaacttactctcaagtggttgagggaaaaagttaattgagagtcattgcaacttttctgtaaatttgagagtttttcaaaaaaataaaaatattactgtaaaatttaaaaaatattaatgtaagatatttccataaaactttattcaccaaaatcagatatactgagtttcagaaactaagaaaactatttatattcattttgtcagtagacatgttttgcattgcaatacaatgcaaagatagttcttatttgatggacctctctgaaaaccagaatctggaatcaaacagatcaaattaactaattgaaagactacatgtgataatatccacaattttacttatctcatactttatatgttaggactgtctgaaaatgaactcatactcaataatgagagaagtattatgtaaaataatggttgctaattgattgatattattcctgtatatccatattggatattcaacttttgccacttgtggaatatcatcattgctctaaattctttaaattctctgatttttctaatacatttaatctgtttctccatttaactacccctaaaaattacatcaagattttgtattttattttgaaattccttacagactataatctattccagtgggatatttatttgttcataacagtatataacttaaaatacaattttaattcccctttacttgacaatttatagtgatgtctataaatattctcacaattaaatatctctgagagacatttcaaaacatagtttgaaaataattccatatattggactcagcatgaatttttgtataatctcatatagttataaaatgaatgttgactttagggagaaaaggaaaactcatcctaatgagtatttgggttcagagttaatactttgctcatgcttaaaaatctgtttactttgagattcccatttctacttaaaaaccagtagaaacagttcaaattgactaaaaagtcaactaaaatctacatctatttattattgctatttgcttatgaaaacgttaggagtttcaatttgtaataggatgagaaataaagaaaatcgaacacaggtttttagatatagttgtttgtttgattttagtttttaatgggaggaaggggtacccattgcaatccgcagccaccatggcttaaagataatagacactttatgtacattaattgattgcacacatttggttcaggggagacctgggaagttagtgcataagtttttcctgctcatccttctcccagctgaattggagacaaattaggaagaaagaaactttgtcctctttgcaatggaaagtaaaatagaaacagacacagtaaattataatgagagctagttggatatgaatagaaaaattacgagtatctcagtcaatcttcccacttcggtaatgtggagattttaacatttccccattgcctattctcattagaaaaatgccattttactaaagaagtggaggaaaatatgttagtagaatattttaacttatattgttaaacaggaaggaagggcatgatatggtaaaatgagtgtttttaattgtctcattaaacatttaagactactttctaggggagaaataacactgcagtaaagataatttgaatgtactttcaaaaaagcagattgatccaaaactgttcaacttagtatttagaggacacaattagctgaatacttttgttattaaatttttttcatcaaactgtatttagatgggagttacatagggttacattgaataggaatacttttattttaaaaagtctgttatttaacattggaatcaggtaagagacaacacttgtcctttcccacactacgtaaaacaactctacccacaaaaatacgtgctatcaccttacctgctttatttcccatcgtggcatgtttcattgctaaatatgtatttgtttattgtatatttctccactataatataagctccattaggacagaaactttgtctttcttgttcaactgagagctgagttgtgatgaaagcagtagcacatgacgtatagtcgagtcaattcgtgttacctgaaagagagatcaatagttaatggactctacttagcaaatatacttgattaactagcaacctattcagcaaggaggaaaagaaagcactgaacaaattgtgtagataaggactcttaggccaaaagggacctcaaaggatcttattgagtttctttccagttcacaggtggttgggaagatggattccacacatgcctcgaaactctcaattaggactcctgcgtaaaaggaggcctctctataagttgatctctttctttgcttctcatccctttttcctcaaattctgctgtattctggcttgttcacttactgtctgaaaatcgtaatttttttttttatcttacaggaattacaaatgttattccctcttcctgactgccttcccctcggccctctatctagataggcatgcctttctttgtggaggaggttttcctgttgaacacaccacacacacayacacacgcacacacacgcacacactcacacacacatgcacacacacacattgtggaaagtaatattattgaaattgcgtattggtattttataatttagaaataacaaggagtcttcttcatatataatgggcctaataatttttccatgtatrtaacttttcttataggtcactcctgtgcctggtactcacccacttttagtttttgtgaaccccaaaagtggtggaaaacaaggagaacggtatgttttttgattgattttagtgtctatgtcatgtatatgtaaaaaaatagacaaaactatgatgtaaaaatgcttaaaaacaattattcctctctgctaattttaatgcaaaataaatgatgctagcatttaatatgtttatatgatcttgtttttaggattgaaattttaatacaatggccttttgtaactatttttactattatagctcaggtgtttgaattctctctaccccacctatcacccctatcccctaacaaagagtctggcttcataaatactgttgaatgaaaattggttctctaaatggttaacaagatgaatccacataaatcataattcagtactgaggaaccgaatttatacccaacatctaggcaaaatatattataatgattttctgcatgtgcattttggagaacatgatgccatatttcctggagaagtacaatatatttaatctgaataataatgagctgcattatcaggtatttcagcattctggctgataacattttattttgtaatgaatgaatgattaaatcatattatttaatacaaatatgaaaatcactacattgaagagtaaatcttatgtcttcctaaagatgacagtcataaacaaaaatgcatttatacctgccttaatgctttttagataactctcctaatctcaaccaaaaataagcaagcagatgaaagcactcataacaaacatgataacagtataacaaatttcctttgtggctcaccaaatagcaaagttgaaatgtttccatgaataaagtaatttttttctaccatttaactttccagctttctttccatgaaatgaagaatgcttttcattattgaatcaacaaaacatttttgctttaaagagtgtaagattattatcctagcactttgggaggctgaggtgggcagaccatgaggtcaggaatttgagaccagcttggccaacatagtgaaaccccgtctctactaaaatacgaaaaaattagcgaggcatggtcgtgggcacctgtaatcccagctacttgggaggctgaggcaaggagaatcacttgaacctgggaggttgcagtaagccaagatcgtgccactgcactccagcccaggtgaccgtgtgagactctgtctcaaataaataaaataaaataaaataaaataaaataaaatgagtataagattttttcttttcatcagtatatagttatgttttactcctctaaacatgatagaaattattttaaataatgttttaataattaaaaatattcctaatgctttattaaagggaatagttttactcataaaataatcattaaataataatgctgaaattactttcttctttactatttacagtcagttagctgtatatgttattgatagtttaacaaaaaaagaaaactttccacaaaggattagatgagacttaaatccacattggaaattacagaatattgaagtttgaagagaaaaaaaatagtattttcaaaggaaaataatttttctccaattaagataatatgaatcatgtagaatgacccttagttgaatatttgccttccctttctaccagtacatataaataattttccctaaattaaaaatatacatatatatatatatagttacactaaaatgttaagtaaattaaatttactgggggcttcaacttcgagctcttctatatacacatccacgtgtgttttgttctttattcattgactgggaccacgcgaagtcaaatgaaatgtaaatatgttttaaaggkgatctgttttcaatgcaaacataatttttctgcctgcataagaggcacctttcacaaggtgatcccgttcagtgttttcctttccaaattttttggcttttttgactttgatatgttagataagttgcaaaaggtcacagaatcataaatccacataaacttttccatatcaatcaataagtctgaaaatgttcacatatgtgttcagacagcaatgcctagttgaatccaaactctactagtgactgggaataagaggcataatacacagtcgtgcagagaggcagggacataaatagatctgttgcaataccatatattacaggttgaagtagaaatgtttaagataaaagtgctatcaaagttcagagaaggagataactatctctgaagaccaagaagtctttagagaagaaggagcttctttataggttattatatggtagatgtttgcccaatgaaagaaggagaaaggcagacttgtgaaatggcagggtgtcaaccaagaggaatttaccgggatgacaatgtaaggaaaaagaggggaaagatgagagagaaactgtggctgaattgtgaagatgtcttaattttatattgtgaataactggacactggcataaactttgcatcatggataaggcatggctgtacttagacaacagtatagaggaaggctggattgccaagaaatttataaagctggtgaaagaacttgaagaccttaagtaaggcagtgggatagaatagccaggtttgataggcattttttttaagtttgttgccaaggacaacgtcagatagggtatttcctaggttttcttttaggaaggcacagagttgtccactagtaggttcaggtgccagggaaaagagggtattgagaacaactctaggtgatatgagcagatattacatactgaatttggagagttttatcagtaaatatcataagaayttgtttataaaataatcatattttcacatgtatataaaaccaatttaggtttaaatatatcccttaactttaaaaaaatctttttaatttcaacttttactttagatacaggaggtacatgtgcaggtttgttacatgagtatattatgctcaggtagcaagcgtagtacccaacaggtagtttttttcatatcttcctccacttcttccttccccactctggtagtcccccatgtctactgttcccatgtttaagtgtgtgtgttctcaatgtttagctgctgcttaacatttcgtgcagtacatgcagtatttggttttctgtttctgtgttaattctcttagggaaatggcctccatctccatccatattgctgcaaaggacatgatttcattcttttgtaatggctgtgtagtattccatgctatatatgtaccgcattttctttatccagcccagcattgatggatacctaggttgattccatgtctttgctcttgtgaatacagcagggatgcaaataaaagtgcatgtatctttttggtatatggtatgttttccttcgagtttacacccactaatgggattgctgggttgaatggtagatctgtttgaagttcttaaaaaaatattcaagccattttctacaatggctgaactaatttacattcacaacaacagcatagaggcatttccttttctttgcagccttgccagcatccactggtttttgactttttaataatagccattctgattggcgtgagatggtgttttattgtggttttaatttgcatttccatgattattagtgatgataagcatgttttcatatgtttgtttcctgcttgtatgactttcaagaagtgtctgttcatgtattttgctcatgtttaatggggttatttgttgttgtttttttcccattgatttaagttcttatagattctggatattacacctttgttggatgaatagtttgcaaatattttctcccattctgcagattgtcactttactctgttgatggtttcttttgctgtgcagaagctctgtagcttaattgtcaatttctgtttttgttgcaatttgaggacttaataaaaaatgtgttgccaaagccattgtcacgtggggtatttcctaggttttcttttagaaatatagcttgggatcttacatttaaatttttaatccatgttgagttaatttttgtatgtggtgaaagaaaagagtccagtttcatttttctgcatatggctagccagctattccagtaacatgtattgaataggaagtcctttcgctattgttttgtatttgttggccttgttgaagatcagatgaaggtttgcagctttatttctgagttttctactctgttccattggcctgagtgtctggttttataccagtaccatgcagtttttgttactgtagccttatggtgtgattcttccatctttgttctttttagcttaggcttgctttggctatccaggctgttttttggttaaacatgaattttagaagagttttcttctaagtctttgaagaacgacattggtagtttcatagaaatagtgttaaatctataaattgctttgggcagaatagccatttaacgatagtgattcttccatgagcatggattttttttcatttgtttgtgtcacctctgatttctttcagcagtgctttgtggttctccttgtagagcactttcacctccttccttagttgtattccgaggtatttcattttttgtgtgtgactcttgtaaatgatattgtattcttgacttgactctggctggatgttattgaactgctattgatttttatacatttattttgtgtcctgaaaccttgctaaaattcttcagttctaacagccttttggtggaattttgacagttttctgagtatagaatcattatcaatgaagagagagagcttgatttattttcttgtttggataccttttatttctttctcttgtctaattgctctgattagaacttccagaactatgttgaataggagtggtgagagtgggcatgttttgttccagttttgaaggggaattcttccagcttttgctcattcagtgtgctgttggctgtgggtttgtcatagatggcttttattattttgagttatgttcctttgatgtctagtctgttgaagattttttttcatgacaggattttgtattttattaaatgctttttctgcatctattgagataattatatggatttggcttttaattctatttatgtggtgaatcacatttattgatttgtgtatgttgaaccaactttttatcccaggaataatgcctaactgattgtggtaaattaactttttgatgtactatttatctctttacttttagtatttgtctaagaattaaaacagtgtgagatatgtgcatgcatagaaacatttctattgcatttatttataaagattgttttctttcagaaaaaaagaattatttgtcatatgctgctaagacagtttagcaattttgtgagatgactggtcaagatcttgtttatgtgaaatgattaggccagatgaggctacattctttgcttacatgtacacatatacaatgtacagtcccgtttcatataggggatagataattttcagatctatcagagatctatagaggacaaattattcacaaggatttactgagagaagatatttaggcaattttatactgaaatattaaaaaaatacatttatttgaaatctagttagctaaataatgttcaaaagcgggttagagaatatcctaaatgtatgtgcatattaaggatccaagcaatatttctaacttatgaactatattgccttaatagtggctactaagccttttaaaaaaccattaattcctattgagctgttggacttctgatattgattcaaaatttattaaattgatagaaattttttattaaattatataattaattgcaactatatatattttataacactgagagacattacttattttaaaagtattgaatattattaaattttttccccacattttcacctttatagaatttacagaaaattccagtatctattaaatcctcgtcaggtttacagtctttctggaaatggaccaatgccagggtaagtccaaggataatattattaccattaactcagttaatgttaattaattaaataagctgcctgacatatgtagaaataatgttatttgaacacagcagcatattagtacataaaaatgaaatatcaactacgtaagagaaatgagtgcaaatactggttttccaaaatagtccatttctagcagatttttcttctttctaaatattgtgaagtaatgctccttattgtactaatgatgatattaatctcacacacacacacacacacacacacacacacgacaaactagctgaatgccagtttgaacactgccaaaccatgtatttgaagaacgattctcttttattgtacttcttatatttaaaatatctgctaaaagtaaagagaaagctagttagtccatttatgcctagtgttccattattggaacactaagcatgtaggagttatttatattctacagcttaaggtcattgccaaggtcttatttttaaattcaagttaaattttaaaaattgcaacctccagcataaatgggttaatgaaaaaaatcatacgatttcatttactacttaccaaatctaatcaatatcactctcttatacttcattgttaacaggtaagatctagtaaaataaatttttaacataaactgtatacttttgaagttactgatatgcacctaaacaaatcaccattaatttggcttagttaaataattaatgtcattttatttcattgacctcttttctttctgtcaacatgagggtaaacattagaccacatgaagtggacagaagctctataagctttatgcatgcttcattttttttttttaaaaaaaaggcagttgatttaaaattagtcttacttctcattctcaggaaccagaaaccaagtatttaaatagtactcttttaaaaactcagaataaaatttgtaccatagtgtcttacccaaaaaatacattcataaagtataattaattagcatagtctttcagcattatattcagctctttcttctactgccttgctgcctgctgtctgggatcagtttcccaatgctgagcagtgatctgcagaacctccttcctgtggaagacaggctcaccacaggaatttagttcagaacaatgtctttgtcaagcttcacaatccagaatctagaggatcatgatcagactgttggctaagtgagctagctacatgcaggaagtccccaagtagataaagccaagcaaaagtaaagtattgtaaactcaagctcagtcaggatggctctttttcttgtcctttaatattctctggacttcaaaaaagtagctcttctttgaattaggatattgtgcattcaaaactgttgccattctaagacccctgtaagttgaatcaaaccaagttaatccaggattttcctgtatttcatagttaaacaagaggtcaattggctctgctaattacaagccttacagtttcacctctgtgtggcttcattatcttatctgtaaaatgaggatttctgcctgccttataggatagttgtgaagttaaatgggataatgcctatgaagcaaataacaatgtacttactgcatagcatgtcctcagtgaatgtggtttattatccgtattatttgtacaaatatgaattaataattaataaaaacatgactgttttgtagcactatgtaaatatattggaataaatttgattttagccctgttctctcatctcacttttttcctactacactttaaatatgtactacatgtttccttctactctttcagttctaggcatcctgttatcctctgctctatcttaacatgtttaaaaaatgaaagtaatgtatgtaactgtaaaaagtctacactacaatgaatattatttagaaaaaaatttaaaggtcccactttgagcactactactcctcagaaattattattgtggttgtttgctgtagcttcccaatctaatacacacatataaatgagcatattcccctctatctataacgtattcatacacacacacacacacacacatatataggtgtatatatatatagtatatatatatgaaatatatatatgaaatataggtagatagttttttacgtaacagaatatagattttatattatcttgcaacttgctttctgcactctaaagcaggtgatacacattgttccgtttcagtagacattgatcagtttcatttttctaactgctgcatgatattccataatcatgtgagccatcccattactgatgaatatttatattgcctgtgttttacaattattaccaaatatgctacgtcaatatctatcaatttatctgcatattcttgaaagtgtgttcaaatatttttatggtatcagtggctatgagtagaattgcctggctgaaaatattcaatgtcaaaagtttgttttaaaaaatgattaaatataattgtgttgaacttttagcttcatcttgatcaacatgagaatgtcctgtttgcctctgatactgatgcccacactgcatccctagtgtcagactcagacttctgttagagagctagtctttgtttatcctaaaggcaaatgccacaggtagttgctcagaacggggactctggccaggctatgatgttgccctttctctgaactcaatgactgatctgctcacttgtgaatcctcccagccctgttttctagctgtattgcccctgatcatgctaagagtgtcctattgcagtgattcccttttaatgtatggcgttagaagttgctctgtttcataaggtctccctattactctgatacccttggtgatttatacattttagttttatcaccatttctagtttattacttttccaatgctaacaataggtttttgaatgcatactcttgaaagtatagtatgcattttttctgctactttaaacctgtggttatgcattcttccaaattcttttttaaaaatattttcctctttaccacaccagattgatgtattcttttggtatacaactcttcttttatcccaactttattttttttcaaaaactatgtttataagaggaaataactttcttgaactaaaactattcctaatctaaattatctggcaaatactaaaactcactgggcatttcattttttatctttaattgtttttaaaacagaaatgggtgtgtattatgtgtttccattctatctctttatataaatcatctctccctgatcctgattattctgtttcaaggtgtctgaaacaatagtctctttcaaataagttgtttctttcctaatggaacatgttgtgatataattgaataaattatttggaggtataggttagttagaagagatgaaatataaaatataaattactcttgggctttatataacaatatgttttccttcactacattaaaataagtatgtatagctctagctgtacaccaacttcacatgttaatgtgacttatgaaaagttcatatcaagttttttgtatacttgtgacattacttttccccttctgaatctaatcttcatgaaaatacagatggtttattctcacattatttctaaaattttaagtgagaaataggaagcacttaatgaattgaaataaaatacaagataactttaaaatatgtaaattatttttcagattgatcaggataattaagaataattaattgtgtgtgagaaagctgctcttagaaatctttgcttccatctacctgaactaaatgcaaacgacacataattttaaaaatataatgcaacagtcaacctacagatttacatatttcaaatatgcatatttcatagtgaaactttggaatatattctcctattaaaataaatgtataatttagaaaatgcataacagatttcacagatttcattatcttcttaatttaaaatatcattttatataaccaaatttctaccatattttatttaaggaaaatcagmgcttatgaccttttacatatgcctcttgttatgaaattatgacacagaaatgaacagaatcctcaaaaggctaaggaaatgttcatcaaaatttaattgagctctgttgcaaatttcaaaaataaaaaawtttctttactaatataaaagtgaagcactcaactctatccttctcatgattaatcataaaataaaatgcagatgattcggcaagctctcccccaattaaatgtgtaagcataattctgattctgccttggtcactggagtgatggagtrtgaaaattgattcatgcttctaaaattaaagatctatggattaataaaagtaacaaaaatatgttaccacaatgaataaggtcacataattgcttgcctttcacacaaatttccccctttgagtcattgtaggcctttagtcaccttttacatgcatccacaaatgcactatgattttaaagatgttgaaaagtctagcttttattatctatctcaccaacaaaggccaaatagcaattagactagagatctgtgtgtcactgtttaaagattgttgcctatcaaaattgctgaaacactctaaagaaacaaacatgttctgaattggccatttgaaatgaccgtttcgtatttgtgtgtgtgctttaacttgtgttttattctgttctggctgctataacaaaatcccttagactggctaattacaaacaacataaatttatttctcacagttctagaagctgagaagtccaaggtccaggggccaggagatttggtatctgctgatggctcactttttgtttccaaggtggtgtcttcttgctgtatcctctggagagaatgaatgctgagtctccacatggcagaagagcagaaaaacagctggctggtttcctcaagcccctttacaaattcactaatcccattcgtaagcgtagagtcctcatgacctaatcacatcctcagtaccccacctcccaatactattgctttgggcactaattttaagcattaattttggagacacatgaaagttcaaaccatagcattctggattgggtcccccaaaattcgtgttcttcttacatrcagatacattacattcattccatcccaatagtctcaaagtcttaatttgttttaataccaastcaaaaatctaaaacccagagtctcatctaaatatcttctaaatcagatatggatgagactcaaggtatgatccaycctgrgctaaattgctcttctgctgtacccctgtgatatcaaaacatttctgttgtttataaattaccctttatagacttttagactttacagactaaagtagtttgttatagctgctagaatggactaagacagaattggtactaaggagtgaggtgctaatgtaacaaattcctaaaaacgtagaaggtgctatgtggactggggagaggctgcaatatggaggatgaggaggaggagaaagaggaggaggaagaggaggtagaggaggaggaggagaggtgggggatagaagaagaaagaaagaagaccatagagagaggttcagtcttagagattatctacatggttgcgaacaaaatgttgctagaaatatggataagaaaggccattgtaatgaggtttcatacgaaaatggggaacaagttatttgcaaccagaggaaaggcaatccttgttatgaagtggcaaagaactttgtcgaattgtatccatgtcctactattttgtgggaggttgaattttagagtgatgaaataccatggagtgatacttggtaaaagaaatctctaagcaaagtgttgagggtgtggcatggcttcccttgactgcttatagtaagatgtaataagagagaaatgaattagtgacagaatttgtcatcaaaagggaagcaaaaattaaggatttgacaaattctcagactggccaattggtaaagaaagagaaatgtgtttatgataaaacaccaagggtgttaccaatgaaagtttgggtagattagtatgtctagaaggaatctagaatgctattcatcaagacaatggaagagtggccctgaaaacgtttcagagatcttcaaggctgccactcccatcacaggcccacagtgtcagggccttgaggacagaaagacttcaaagagggattcagagcacctgtgggatctcagggctcacttcccagagctgcctcaagtttctgctcaatgcattctagtgcagcactcctgggccactccatctgtggctccagtgagcctcagtgcaaccagagccacccttcaggagacagaggtggcaaaggtttgcagcatccagctggtgctaactctgcaggcacagagtgcaaaagctgtgaaggcatgcctacctctgcctagatttcaaaggatggagaggtcctkgagatccccagaccccagacagagaactgctacatggttcaggcccctgcagagagcctccactaggacaatgcctagtggagctatgggggctgggccacctctgagactccaggctagtaaagccagcctgagagagctgttggcattcaactctaacaagtgagaaatgcagtgtgggctgcacacagcacagccatggaaggaatgggggtttcggagccttaggggcttaaactctgcacagtgtgttcagaaggcaggacacatcgtcaaagagggttttttggtttttgttattcccagcttcaagagttaatgttgtttgccttgttgggtgttggacttacttgggacttgttactcctttcttctttcctatttatcccttttcaatggtattgtccattctatcgtacaccattgtactttggaaggacctaacttgcttgatttcacaggcccacagctggtggggaattttcctcaaaataaattgtacctggagtggtaactctgtattatttagatgacggttagaggagactctggactttagactttttagttgatgctggaaattgttaaaacttttggggctcctgggatagaatggatgtattttacttatcagaagaacataaattttgggagagcagaggcagaatgctatggtttgaatacttgtgtctctccaaaatttatattgaaccttaatcaccaatgcaatcatattaagaggtggagcaatgagcaaatgattaggttatgagggctctaccctcatgagttggatcaatgcccttataaaatggctcaagggaactagctctcrcctttccccttctactgccatgtgaagatacagcattcatccctctgccatgagtggatgcatcaagaacgtgccatccttgaagcagataataagccttaccagacaacaaatctgttgatgtcttgaycttggacttcccagcctccagaaatgtgagaaataaatacctgtcatttataaattatccagtttcagttattttcatatagcagcacaaatgaactaaagtaatctgtttctgattttttttctataggagttaagtttttaataaataacatattttacttaaatatcctcccatttactgttatgtaagtgtacatagtaaaattactggctcaaattyacctccagccccaggcagttaactgatgatarcttaccaataagtaaaaataagaaaacccatagcagatgaattggttcaaaacatttattcaatggctaccagatgccaggaacaatctcatcactgccaatccactctgaacaaaacggataataactcttgccctcacagccttatattttagygatggaaaacatatattaaactaataaacaggtgaaatatacatatattagcagggaatgtaaacaaggagtgtgcattgttggtgagggtttcgtggttgttcttttaaatgaggtggagaagaactggctgagtatagatgtgaagatgaggaggtagctcattgtcatcttgtacaagagcttttaaggcagagagagcagcaagcataaaagcataatgattggaaaatattgtgtaagtttgggaaacattagcaagaaggccagggagactagaacagagtgaagggcagtcggatgtcagaaagctactaagggctagttcacagagggttttaggattattgtgaccataataattaggtttacctaagattcttcaggttgtttctggtgtcctagcatctggcccaatttagcatttgcccaggactgtattgtattttaagtattgctattaataagtgcattgcaatgaagaatgatgatgatgtgtttggcagccctccaatttctaaatccagcttttgctgtgttatcctcttgtaatgtgtaagacacacgtccaaggaagagagatctgactttaatagtaatcattatacctaaaacgtgaccaaaaataaactattttccaatgttctttaaacacaaaaacaagtgacaacttttgaagaattggtatcccttttatgccagcccattatgctgtggcctggacctcacagctccctgagagttgcaaagggtcacaaatataccaatcagaaatgcctgtggagatattgacaaatcataggttagatgttcatgaaatgtatgtgagaaaaagagcatgagcagttttaccaagaatgtatagtgaatggcttgaatatacttcctcaatgttttatttttcattaaatatatagtttataaatatttactttataatagatttttattttgcaataacacttttcagcaaaagatagcttaaaaataaaatgtcttttaaataaaaataatctgaatttcaaaacaaaaaatagttctgaatttctgtttcttaaagagttgatgaatacataatctgtgtgaaatatttatgaacatttaccatctgcaatgagagctccagtgatatcattgactatgcagaamtcagtaaacacaactatgctgaagaaacatgagcatctgctttaaaattaatagttaattctctgccccaaagcaatcatttartatgcagaaagtccctttgcatatcactctttgaagcatgacttttcgtttagatcaaatgacttttcaaaattagtgttaattttcaattccaagtttctttatgtgtattattaatgaagttatagctgttaatatcttgactccattagcagaataacttttccaaaagatcaagtaatgccatttttatatcagagtgatcagaatgttttaaatgaaacatctgtttgttgcaaagatgatttgaattcattcaattcatgcactctaaataaagttttttggaagttcatttggatgaaggtgagacattagatattagtgataatgctatcataaaatcagtataaacgtttagcactactgatacaataatttccttctgtgggaataatttgaatgtagattctggtgaagcatgccatcatggcaaaaacgtgatttctaatacagtaatgaattgattgataaaaaagattgtgctttaaattgattgctcacataaattataatcacatcccaagaaattttaatattctaataattaaaataaaagccataattatattgcttgtacacatgcatgcacacacacacacatgtaaattattcagttattctcctactgattcagtagtcacccaggaaccttctggaccaaaataataataatartaagactcaagtcttaggtgactcaagtaataaaaccctgtaaaaatctctctggacaacagtccttcagccagtcttttcctgattatacataccctcctcttctatttaaaatctgcaactcaaggagcatgaaaatttaaggtaatttaatatagaggttatcagcatatagaaatctacaacttgaattatattattgggtaacagtgttcttcgtaatcaagacaagtttagcctaataaacacactccgaaaagcagataattggatttggaatataatacatttgataaaattgatacaaattatatttacaactattaaaatcataaatatcttggtgtctaagatactaatcttcaattatgtacatatcatttcctgaaaatggcagatgtttgttgaattcataatgttttattctccaattacattatttacttttayttatctcttcttgatgagtcatgtatttttcatttagttacctttatgcctatagttagaattctgtgtaattaaattattcatggttttttttgagacggagtcttgctctgtcgcccaggctggaatgcagtggcaggatctcggctcactgcaagctccgcctcctgggttcacgccattctcctgcctcagcctcccgagtagctgtcatattttaaattatggtctctgaccagtattatgctatagtaagatgtgtgcccagaagcagatgctcttgaaggcaatgaatcttcaacttcagtgtctctcacttgcaaggactcctttcaagactataggaaggatcttagcaatgtggttgtattgcctttctcatttgagtttttgatattttaaaaagagggtattttaactacaagaatttttatgaacaatgttagttaagccagctcagtagtaatgcatagagaggcaaatatatcaatggaagataattaagagccctcccccatgccctgtatatgtattggtattaaccagaaaaattgggcatctatatggaaaaataaaacagtaaaaaacaaaaaagacttttgtctccattccaactcctttttcatcacactttacctagtgactagtagcattggaatgagcatgagcattttagkatctgactaaaagaggatgaggtccaattacatgattgaaccctgagacttataatatgtggttcatggatatttttgtgtatggttgttattgctagttctcctggtgtaaaaatgacttccaggcatatccccattgctcagtgtgactttacactggttttctgacataaatttaaagagccagaagacatgtcttgataaaaatggtccagagcctgcctggtaacagaatatgtgtatagtaggggagaaatgaggtttgaaatgtacaaagttcaaagcttatccttggaaaattcttctaatcatcccattcagttctctttaatgtgtcatcaaaacagaagcgttattcttccaggaatacagttaacaatgcagtataaacaattttaaatttttattattgatgaaagttacatgatattraatgtatcattattcctgtgcttgtagagcacagcctatatcagctctacaacaagcaggcatgtttatgtgtaaagtacatgttttataaatctctatgaaatatcgccatcaatgaagatacctaaaactcacaatatgtcatgttattaacgtaacaatggttaatgtatatcatgaattcaaacagtacttaaggttagtcattgaacaaaaaattgaaatgcctgcaagtcttacagcttggctatgaccaaaaacccaatattgattttcacgtatttaacaataatactaaaaatttactttatcaatgatgacttgtgaagctaagtggaacattcctaataaatcatcaatttaaacatatcttaataaatcattctagaggaaaagaaaattatcttttaacctcagtacaaatattattttaaattaccatataaaaatgtaaaaacgaagcattaagcagtttactaatttataaaactatgttatttgaaatcctatgatgtaatgtttgtaagctatcttaaatttacaatctaatgtgattttttattatagataagtatttatttatatatatttatatatatacatcacttttataaaagtttgtacacatttattttgcatattttttcttaaagggggcctcaatttttataaacatcaggccctacataatcaggattcactctcctgctccttatttatcaaagagagatcataaggaggaaattaacttattatgttcaatagtccatgaacacaagttccatgagtatctcaaattctacatgtctattactaaactagttttctccctttttcccgaatttacacactgtttttattctctaacttgatgaataaaaagaccattcactaaagaaccgctttctcattcccagtgacagtatgtcacttcaggctttcaagatttgtcatctaaccactctcctaggatctatatttaccctccttcttacataacaacccttcactcaatttctcctcacttctgtcccccaattcatcagctaattaactttacctaagcttcgagattcaactcatatgtctccaagtttattaagccacccctcatccctacctagtccacattaactgccctcaaagagcatcttatagtgacctgaactgtgtgttttcttgtctgccttctcagttaagccagtgagatactcaaaggcaagaattctaccttgttttgaatctctggaatctatctcagttcctagtacatagttgcagttactacatttaaattaaataagtggatagatacaggtgccatttcatttataaagtatttagagctattcttttgtatttgaccctaagcaaagtcttttttccctatagaagtctagatttatttcctttcaaaatacattcttacttcacactctaagctaactccatggaatgatctgatgtgtacagaataaaacctcattctaattattaatattaaaatcattcacacgacagaatggatttcagtaaatttgtcaaacagtcttcagcaacctaatcacttgtgctgctacattttaggggttaattttatagatgatgaatttggaccataaaatatatgtgctttccaattagaagtaataagaatgaattattccattttaacttctttcaaatatcaggaagactgtgtaacttctgttttaattgacactctttatcgtatttttcccttcattttcaacttactacatcagaattgtctgtcaattctctatgtttagtcatgtaacttacaagaaatattttaacctgcatttccaaacatatatatatgcatatcagtacacacataacttatgcatattcattaataccttaagagatggactttcatgtagcatgaccataaattttactgcatatttgtagcagtaaatacagtatgaaaatactaagttcaattaaatccctccctttctaatgtaaaaaacacacttacagatgagagaaaatggcgttttaaaaggtgttttgtgttcttcagtgttaaaaaacaaaattacaacaaagttagtttaaagatctcattggcttatatttgcaattctagaattgggtaacacctaattctatagaatagtatgagtgttccaatgaactgagcacaggagtttggctttataagcagaagagggctgaagaaagcagaaataaggcatgaaaggcagattggtcatttcaaagttacttttcttacagggtcaaaaccgaaaggacttccttatcatgctagctctggtgaactgggccccttctgattggttgctgcaaatctcctgtgttgtttttttttttttttaactggaccattttaaagttcaatttgattacatggcacttagcacaagtgactccattctggtttgttctggtctgttggggcctagtgcagaagctcagtctaaaataatgaccactcataatttttgtttaacatcggttacttggtttttgaatattaatttatgtactttaaaaatatccttcaagggttataattttccatgcaatagaaaaaatttatattttaacaaatatatttacaaaagtgttttacttatactaataaaattataaatattttctatatgatggcaaggatatttcaactaaatattagtgtttctattcactcagaaatgacattaaaaatttgatgtttctgccaatattaatttttaaagaaacatgtacattagtgaagaaaggaaaaatatttaggctacatcatagaacctgtcatttactgacctttcatttctaactcactttatattagaaggaatattaaagttatttaatgagataacattataggttccccaggaataaatattctctcattttctgtgtctcatgctctcttttgtcatttcagtctgtgtttttccctttctctgtccctctctccttcacttttaacacacataagcataaaagatttgtttsagatttccagaaataatsaaataaatgtttcagttattaatggcccactggaatatgtatatttttcaaatactctaaaacttatttctggttattatggtaacataattatttacactgggtttataaagattaattcaaattaattttttataactatcccacttagccacatggaatgtcttcccaaaacagtgtaaattcagcttccacacaatatctcaaaactctaaacgaatttgttgaaacaggtgcatttcctagtttaactaaattttataatgtattgttgaactaaagtacataagatattagattggaggatattattataattaattttactttaaattaaaatgttgagagagtcacattaaattcatgaaacatcgaaacccacagagaaaaacatgaaataacctttcccccattttgtaatatatataatagaatgaaactttagggagcataaataattcatgcatggatttttaaaagatattacaccagcaataataataatatcaatgataccaaggtatgtacagatacagtttgggtattaataaataagctgaaagttattaaaaattggttttctagaccataaatattgtttcaaaaacaacggtaacatcacaaatcagaaaattcagccagattttactaaggcaattttgaatccatctaatcttgtaactttaagaataatatagtatgtaactgtgtacatgcaagtataaatatgaattgaatagaataatcagagataagtatgcttctttctgtctctaaatgcttaaatcaaaatgcagacctttcgtaaggaaagctcttgaaattattttttctaaacaagaacgaggaaaaagaattgatgacatatggtaaagtcattttggatccttcagccttgtgtttctttaatacaaagagatgtaaatatgtataattaaagcragcattcaccatgtatagatatgctgaaaatatttatgactctcacactgatttcctctaagtatcaaaaatattattttatgatttataatatatatactacttagagccatatatttatttattttrtatacttaatctatttctaacccatacagccacattgtatgtaagcgatagtattttttaataataaaatataagattggaataaaaagtaatatttacgtattgatgttaagaattctgatttatgacactttccaagattctggaatcagtactacaattttcttttcttttaaaaaaggttttcctggtgtgctttgtacctaataacaattaggtacaagtgaaaatttactgccttttctgtatcaattttatcttaacacaaagtaagcctctgaatcttagatgaaattttctggatttgtttttagtaatattaagcatcacaatttcaccacctgctcttttgttgtggttgtggtaagaacaattaacattagatctacattcttaaaaactttttaaatgtacaaaaaagtgtcgttaactataggaacagtgttgtgcagtggatcttagaatttattcatcttgcataactgaaactttatggaatgttatagtggtgattatagagcaaatatgataaaaaaagamrtgtctgacagagggctgctaaacccaaataataggcttgctttcaaatatagctattggagatacataggaaactctctaggtgaatcaatgctataaaggccaacattggaaactcatcatcattcattttcttcatamatcatttgaatttttaatttcaaaaaaattaataaaatggtgcaaataaattcaggacccaagcatgatttcattgcaaaatgttcatgcttattcattcttcacatggaacactgtggaactgataggtaaaaagtacaatacgcagtacaaaagtttccccagagtgaaatccttcctgacactccccattttctcacttctccccattggaaggatgacctgtaatgtggaagcctcacagctgctcctcatcacagccttcctgggtgaaaagtcagtgccatgcaggaccctgcattttggctcttgctgagactcttcagtttacttgtcttctatcacagctgttttcctctgtaccttgtgtctccagtgctgtaggcaggtctcccaattgtccgctagctacagtttcagattgcatgcagaaaaactctccttactgcttgttagaaaattgtgactattctgccagaacagtgcaggcggaggaggtggggaaatagaggagtggcactctgacctaaaacatacctatactacttttaataaagaaaaaaatataattaaatcagtaataacatgtgaatagtaaggtgtatttacatacacattttctttatgtgtatataaagagcccaacaaaccacgtggtgttaattctattctaaagttatggaaactgagggtcagaatcactaaataaatcccaaggatattaatgaatgaatgtagtaaggaatgaatgagtttctagggaaaactgcatggattgaatggatcaagaaattgagataaagagaggtcaaattttccgattagcaatcaatttacagagagtaagctggtctgacagtcacatggggtttatgtttgggggtaggatgctgctgaagaaccaatgatgacaatttttaaagaaaacaagaatgaataacagatgaaacatcatcatggaatagaagaacaatggtgagtcaactggatggttaggctttcaccagaaacagttagctcggtgggaaatgttgcagctactgccgtgttttacaaagttttcttaagcttcagtgccaatgtttgaaaatctaggagggagaatcaaattgctacagaagtatagctggaaaaaagctgacttaaggagaatttaaaatcataaattttaagaatagttactaaagtaatttaaacaatgatgtaagacttttctctttaatttttttttttttattatactttaagttttagggtacatgtgcacattgtgcaggttagtkacatatgtatacatgtgccatgctggtgcgctgcacccactaacgtgtcatctagcattaggtatatctcccartgctatccctccccsctcccccgacccgacatttaggttttatatgcaagtgctaccagttttcaaagaacttcaataattatacaaattcttccacaaaaaatcgtaaaatggggaatactctgcaacatattttatgaggcggtataattttaattttaaaaagtagacaaaagtggtatgaggaagaaaaataggtcaatttgttcataaagattgatgcaaaatttctaaacaaaatattagcaaagaaactcaattatcttaaaaatattaatacacaagaatcaatttgggtgcctgaaaggattkcaagaatgattaataatgcagaaatatataaatgtttattctcacactaaccgattaaaggacagagaccttgtcaaatctcaaaaatgcagaaaaacttaatatttttatatagtaaaaattcttatgataggagtagaagagaaacttgttaacctcataaaaratctccatcaaaaagaaggaaagtaaaaagaaagaaaaataaaatctcaataacagatatcctaaatgggcagattccaaaagtaattcttatcttcaggaacaagatatggatattcactatgaatactcctattcaacaatatgttggaattctgtcaaggaaaaagactcagggaaagaaataacaattataaagactagagattactaataataccattgctagtagcaaatgccacaattacatacatagaaatccaaatgtatccacaaacaaaatgtaagcaatagaaaaacagtgataatatgattatttataaaatcaatgtataacactcaaatatgtttatatatgccagcaacaaaaatattaatattaataaacataatttttaaatgtttaaaataccaacaaaaaccacaaaacaacsaagaataaatctaacaaaatatatgcaagacctgttagtagaaaatttatatctttgttgaaggatattaaagaatatgtaaataaatcgagcaatactacattcatgaataaggaaacttaattcatattatacgtgtgttatttctcccaaaattaatatatagttttaatgcaacttcagtcaaaatcatgattggtttttcttactattattttagttttggtgaaatatgatgagtttaaatgtacatgaaaaaaagaagaaataattggtaagattcttcatgccctgagatatggacttactggaaagctgtagtaattgcgagagtatggtactagtgcagagatggacaaagtcgtgagtaaaacacaatagagaatagaaatagaaatgtacccatatgtggaaataatacttatcatggactttgcatagtagaaagttgaattattcaataaatgaaaagatggataaaaaataaatagaaaaaaagtgctccactacagccaaaaggaaggatgaaagggagtaagaaaggaagagagggagggccggaggccaggataaaggggagatgggagaaagtggggagagaagaaaagaaagtacttcacaccacaacaaactaagaatttctatgtcaaaagtaaaactgacattttaagagagtgtatgtgaattctgagctctgagtaaggaagcttgtcttacagaagactagttaaggtactractacttatcaaagggatgatgaaattgaatattaaaactaggttcttattcattaaaatacacattaatgaaagtaaaagaaaaaactttaaatttgtagaagatatttgaaaaaaaagttattcaaaaaggactaaaatcaaagacgtgtaaaatttttttgcaaaccaacaaggtgaaaaggaatagataatggaaaccaaaaggataaataggcatttcacaaaaataagaaataaaatgaaaaagcgtgacaagtgttaaagagaatggattcaatagagcacatccattgtacattggtgcamcttctttgcgaaaaacattgatgttatctggtaaagttgcatattaatatgcattactctaaagtggccactacccttaagcactaggaagtacgtacaggcataccttggagacattgtggatttggttccacaccaccacaataaagtgaatatcacaataaagtgaatcacacaaattttttcgtttcccagtacatataaaagttatgtttatactgttgtctattaaatgtgcaatagcattgtggtttaaaaaatgtatataccttaatttaaaaataattcattgcgaaaaattagtaacaatcatgtgagcctccagggagtcataatgttttttctggtagagagtttagccttgattttaatgggaaccaaatgatcagagtggtggttgctgaaggtggaggtggctctagtagtttcttaaaataagacaacaatgaagtttgacccattgatggacacttacttttatgaaagatttctctctagcatgtgatgctgtttgctagcatcttatacacagtagaacttccctcagaatttgagtcagtcttctcaaatcctgctgctgccttgtcaattaaatttatgtaataatctaaatcctttgttaccatttcgacagtgttcacagcatctttactaggagtagattccatttcaagaaaccctctttttttgcttatctctaaaagtcaattcctcatcctttcaaattcaattctcatcaaatatgatgagattgcggcaattcagtcacatgcagcctccacttacaattctactttttgctgtttttatgacatctgcagcgacttcctccactgaagtcttgaaccctttaaagtcatccatgagacttggcatcaacttcttccaaactcttgttaatgctgatattttgacctctgtccatgaattatgaatgttcttaatgacacctagattattaaatcctttacagaggttgtcaattaactttgcccagatccccaaaatgaatcactgtctgtggcacctatagccatatgaaatgtattttttaaataagacttgaaagttgaattactccttgatcgacgagctgcagaatgtatgctgtgtttgcaggcatgaaaacaacattcatctttctgcacatctccatcagaatattgggtgaccaggtacattgtcaatgaaaataatattttgaaaggaatcttttttttttttttgagaaatatgtctcagtcgtggacttaaaatactcagtaaaccatgctgtaaagaaatgcgatatccctcacgctttgttccaccatttatagtgcacaggtagagtaagtttggcataattcttaggggccctaggattttcataatggcaaatgagcattggcttcaacttaaagtcatcagcctcattagcccctaacaggagagtcagcctgttctttgaagctttgaggccaggcattgacttctcctttgtagctatcaaagtgctagatggcatcttcttccattagaaggctatgttgtctacattgaaaaattgttgtttagcgtaccacctttatcaataattgtagctagatcttctggataatttgctgccacttcttcctcagcacttgctgtttatacagcttctttccttaagcttcawgaaccaacatctgcttgcatcaaactatttttcagcttcctcacatctctcagcttcatacaattgaatagagttagsggcttgctctggacttggctttagcttaagggaatgttgtggctcctttgatcttctgtctagaccactaaaacattctccctatcagcaataaggctgtttcgccttcttgttgtttgtgtgttcgctggagtaacacttttaatttccttcaataactttgccttcgcttttacagcttggcttactggcacaaaatggctagcttttggcctgcctgtgcttttgacatgctttactcactcagcttaataatttctagcttttgattgaaagagaaatgcaactcttcctttcacttgaacacttagaggacattgtagggttgttaatttccctaatttcaatactgttgtgtctaagggaattaagaggcctgaggacacaaagagagacaggagaaccgctggtgggtggagcagtcagaacacacacaacattcacaattatgttctctgtcttacatgggcgtggttcatggcacctcaaagcaattactataataactgatcagagatcaccataacagatataataataatgaaaaagcttgaaatattgcgataattacaaaaatgtgacacagacaccaagtgagcatgtgctgttggaaaacatggcactgatagacttgctagaagcagagttgycacagacattcaagttgtaaaaaatgcagtatctgctaaactcaataaagagtaatacaatgaggtatgcctgtacaagaatgcactttttgcaagaatgtaaagcaaaccagttgaaatgcccattgacatggattttaaaagacatgtaagtggtatttaacacagcagtagaagtagaaagaacttcagctacacgtgggaaaagcttcagctacaacatgaatgaatctgagtaccaatgtaagtgggaaaagtagaaagacacatgttgattatgtcagacacgtggtaactcagtattcagagtagtgctcacctttgtaaattagaaagggcagtgctatagggaaagaaaacagagaaatatgtaagttattagaaatgttctacttcctggaatgggcaactggtacatatgtgtttattatattgtatatatattagtataagcaaaacaatgagtattagaaccgaataaaatatttgcaacatgtctcacaaaggttaaatatccacaatataataaatgagaaaatgcatgaaagtttcctgttctaaatatccatggatattataatcagatgatgggttttagtaatttttatacatattttattatatttatgcagtgttggtattaccttgacaaaatttttttaaatgatgcaaatttaaatgcgaagattgctgtaatatgcaaagagttttaaagtattattaaaagacatctcgcccggcaaggtggctcacacctgtaatcccagcactttgggaggccaaggagaatggatcacctgaggtcaacagtatgagaccagcctggccaacatggtgaaaccctgtctctactaaaaatacaaaaattagccaggcgtggtggcaggcacctgtaatcccagcttacttgggaggctgaggcaggagaatcccttgaacccaggaggaggaggttgcagtgagtcgagattgcaccattgcactccatattgggcgacaaaagtgaaactccatctcaaaaaaaaaataaaaataaaaaataaaaagrcaattcaatagaaagaaaggcacatctttgagtgttcttttcataggacaggttacgcatctccaggaaatgtataaaaatatgctgaactcactagtaaacagggaagtgtgattttacaacaaataaaaagacattggctttcacttattattaaagacatatcataaagttgttcatatgtagtgttttgtggttgcaaggaaatgaatccttgcatatttgacagtgggagccattcagagggatataatgatgtaatggaatatttttctctagagtagccttcaaaacacatgcgcacatttacacaaatgttcttcaactaatgttaaatacaatacttttttgtagtaatgagacacaggaaatagcttaaaaattcataaaaagagatcattcattttatcttgtagtacatgaacttattataaaacatgatgcagtgcttaaaaataataatctgacagaatgcaacacatgacatatgcatatgttatatactgatacacaaagttctcttagacatatttgaagttaaaataawaccacacaagttaatgaacagtatgtatagcacagttttattcgtgttgaaaatatgtgtgtaataaagatttatgtacgaaaatttgtatacgtaagtacgtagaaaaattccttggatagttgcatattatatcactatcagttgttatgtttgggacaagggaggtgaagagacacataacataccaaaatttctgtcctgtttcaatttttttattgcaataaaataggctatgactgtatagctggctgcattacctgcctttgtgacttttcccaaggtaggttgcattattaagcaccctgcatgcagtaacagcagaagcagtgggtatttatggcagctgacccagcaattaggctagagtgttcctgggtggaaaacactgtcaaccaggtcaaaatacaaggtgaagcctgcctcctatttgcagattctcagtcaaaaggaaagttggctagaaccccagttgcagtctgatcaatttctcccagtaatggagaaagtagaacattgttaaagacatatttactgacataactgtcacatttatatattcactcaaaagataattttggattgatgaaatttattaaatgaaataatgtagtatatgtcattctgggttatgcgaactgcaaatcacatctgggagaatatcaatgaaaattattataatttactaattttatccttaaaattttagagtttattaaagaaaaagagtatattcattatggaatctagaatatgtaattacaaaatatttttaaattatagaatcttgaatatataattataaaayaggattaaaggatatgtaagttatcactgagatattttacagttwttataaaataaaaacgtatttcatcgggtaaaatgttaatgatacaaaactgaaaacatcttatttttaaactattaatcatgtgccataacatgcttatttttcaggttaaactttttccgtgatgttcctgacttcagagtgttagcctgtggtggagatggaaccgtgggctgggttttggattgcataggtaatgcagacacatacttaatatggctggggagagagcaatagctttaaatcctgtttcatctatgtgtctattgcttgtatcattatctttggaagcagtgatataattggacatctggaaggttgcacactggtttaacttattattctgtagttcaaaaattcaactggcaaaatagtttagaagtacatagaagtccttcctttctaatccacttcttacagtgtttaccaaattttcagagttgttttcaggggctctaggaaatcagattgtttgtgtgccccagacaaggaactgaaggagcagtcttagtatttgtgataaagtctgtgcgaaattgatgtgcttacgtttttaaaacatggaccctcaaaaccttaccctctgtatacatttgtatcgttatcatccatcatcatcatcatcatcatagctaatttttattcatcatgttatcttgtttattcctcacaactctatgatacagatagtattaataatcccatgtagagatagggaacctaaaacttggaaaaaagtaaataactacaacaaagtcttatagctgtgaactgagagagctgagattagaatgcacagttaagccttattctatattgcctctctatttaaactgaaaacgctcgatttttatgagcaaataatacaggaacatcactgaggatataaggtaagtatgcagcacaagaaaaagtataaattcaggaaaattatttgctttttcagatctagtcagttgttggaactggttactagttagaaaaagagaccatgaattggcctttatgaggaaataaatccaaaacaaatattgactctttttggtctcatttcagttaccgcattgatcaattctttgtttaaaacaggccctttcataaaacgaattgattcaaaagaagttttaccttctgtataaattgaaacagacacctatttagtcaatgcagaaaacattctgtctatgcatacactaaaaatattcaaaataagaaaaatacatgttggcaacacttttgataaggatctaacagctttaatctactaatatttgatttaaaaagaaacagtgaaaattctgatctggccttccattaaacaatgtaaatcatatttatatgttttatctgagaagacaaccagaattcaagaattacaaaagttaatgagttagctggaaaagtatctgaggacttgtaaggattttagaggaaaaacagcaggaattcttagcttgttttagccctcaaaaatcttattgtcggctatttcattgtgacatttccctacattatctatcccctctatccctacacacatatgtacactgattttgaggggctaaggaggaagaaacaaataaaagaaagtgatatacatttgtgagattaattcaaggcatgcaatgattcaaaccaaagcatatgggatgtcagcggcagagatctttactgctctgaacccaaagcattatgtgatgtaaagattaatctcatggaaaacctgctgatctcgttgtattccagctgttaacgttgtgttccatttgctctgacacaaagcagcaccatgggtgggaaaaagtcaaggacattgttagcaatttactcacttttataattcaacagttttcaaatattttattcctttaagtaaaatgtacctagaattgatgttgcaaaaggactttatgtaggaacctacccatccatcctagttgtgtctctgtattgtaatcttatgctgtatataataatatccctgaggattgtagtggagataagacacaccacaatttttagctgagttaagatatttaaaaagctttcctcttgcctgagttttgaaaattccatcattccgtgaataatagtatttgtgtcttatcaattgctacaaatgtatacaaattatccataattcattattgtgtatatctaaaactacaattatgttttgtttatgagtacctattggaattccttcatttaatgtcatcaggctatctttttatttccgtcgttttatctgaacttaaaattttctttatttgtatttttttttattctgcagaaaaggccaatgtaggcaagcatcctccagttgcgattctgcctcttgggactggcaatgatctagcaagatgcctgcgatggggaggaggtaaagcagctgcaacaacaaaagcagaaacagtacacaacacccctttcccttgcaaaacaaaaagaaaagaaaagaaacaaaaacgatatgatttcagtgaagataactgatgtggtatatataatatatgattttgaacaatagtcttggatagaagaacaaatagtggaaaaaagagaccatgggtattgggttttaatgtgatattaaatagagacttaaactaaaggaggtcaagtttccaaacatctctggttttggtttttgatttttttgtttagaaaataaggtacacatggatgcacttcaaggtaatttttatacttttcatttataagttgggaggtaaaatcacaaacaaaggaaagatgaaaggctaatgaattagtttcccaggagtgaatacgttaaataatactcagttttgagactcactctatgctagccagctgtgctctgcactttggatacagagttgacaaaagaaaaacaaaagtaccttgatttctagtggcacataaaatcatatgtgagaccttacactaacaagtaaacagatgatcattatagggaaagacctcactgaggatatgacatagaagaaaaaactgctagctagataatgacacagccatgtaaagctgggtgtgaacttcataggcggagggaacattgagttcaaaggcccagaggtggcaaggcacttgacatattcaaggaactgaaactgaaatagtgtcgatggagtagggtaagcaaagagagaatatttggagatgaggtcttaaaacattttgcagagtcactaataggctatatttatctgaagatcactgaacaccactaggtaagatcactaaacaccatcagactttggtaaagaagcaggacttgaatgctaaatatttttagcatcaaagctcacttagagaagtttgaaaagtgtctactaagacaaggtgaacagagtccctggggcacttgttaaaaatacagtggcctgaccccaccccagacatgctgaatggaaatatctggaattgggacctgagcagatgatttttttttttaaacaaactccctaagtaactctgatttacggcaaagttggagaataattccatgaatatctgaccaactagctctaagctgtatacgtgcttgactaagtcaagagcttagtatgtagtctatttgggatgttcagtaagaatatacttcaggagtattttcatgagttgcattagagttcatgcaatctaaagaaatgaataaagacatcaccatttctgataagatacttgtatttgccagtgttcatacaagtgcatagattaaaaagaaggaaaatatgtgagtcttcttgccatgttctcctggaacatatatttgatgtatatgaaaattaataattttatttttgcttccagattaacaaatggcctaaatctcaaatttgttaaagaagtccatatttggcatactctaataattcttgtgaaaccacatacaaagcactaacaatggacaaaggcaaggactgtagcatgtgtcaaagaatctattagtgatgaattccctttgagtgtctgatatgtgttggcactgttctaggtgctaaatatacagtgaggaaataaacaaatggcttctatccttctggagattacattttcgttgagtataattgaaaataaattgaacaataatgaaatatataattataaaatatcaaagaatcagaagaatgaataatagagatgaactatctagctagatggccaagaaggtctctctgaggaggtaacattaaaactggacctaaaatataagaaggaggagaaatagctccctgtgtttcaaggactgaaggaaggaatgcaggtggggttgctgaagcagcagtgcatggtgggcaattagggatagtgagtactatgactttggaaagacaattgggagccagataatgcaggaamctatttgtcattgtgagagttttacttgattgaatttgtcatgcaaagtgaagcttcgaaagtctcagaagcagagtaacacactgacacattttcaaaaacagattaatttgggggtagaaaataaactggtcagaaaatgtgaaaacatgcagaactatagttctccaaatgagaacttctattatagttgtcccaattgcataataaagtgagcagactagagcttacatgatttaaatcaggcaagtagccaaactggaggtacattttcaggcttagcttaattgtacttaccagtggattggttaggaattttagggaaagcaaggtatcaagatgcccaagttgagcaattagggaaatggagaagccatttgctagagattattaacaaagaaatatgctttacggtgggattatttcttgacaggtgtgtaactttgagcaagttacttaacaattgtgtgctgtagattcctcatcagaatttgaagaaaataacagtgccttgtaggttcttgtgctaaaccgataacttgtttgcacagtgtttgtattagtttgttctcacactgctataaagacatacccaagactgggtaatttataaagaaaggtttaattgactcccacttccaaatggctggggaggcctcaggaaacttacaatcatgaaggtgaaggagaagcaaaggcattttttacatggcagcaggtgagagaagcaaatgagcaaaggggaaatagtccctgataaaaccatcagatctcatgagaactcactcaccaccaccagaactgcatggaggaaacaaccctcatgatctaatcacctcccaccaggtccctcccttgacacgtggggattatggggattacaactaaaaatgagatttgagtggggacacagagccaaaccatatcaatgtttgtgttaagtactttatgcagttgcagtaattattattatgcttaatatttgtagaagaaagtacttcattcaaccaataatcatttggttcacttaagattcagggaatctattgacttgaagcctcttttttataggaatatattttcatattttggaaaagttgacactgtaagaatgtaggatattctagcttaattagcattctttttgtaaatttctggcaatcattagtctctcttaacaaaaatttaattgcaaggaaaatcttgtttgtgtagaataaggaggcaagtaatagttgtaaattggacacactttttttttttgagacggagtctcactctttggcccaggctggagtgcagtggcgcaatctcagctcactgcaggctccgccccccgggttcacgccattctcctgcctcagcctcccgagtagctggtactacgggcgcccgccaccttgccaggctaattttttgtacttttagtagagacagggtttcaccgtgttagccagaatggtcttgatctcctgacctcgtgatccacccgccttgacctcccaaagtgctgggattatagacatgagccaccrcacctggcctgaacacacttttatacagatttgttgttgcatttctttatgtgattttcatttgcaaaaatttctatgactttttagattcagtcattataacataatatcattaaatataaaataaatattaatcatgttttcattttgtttcttagcctggattgattacaggctttaaaccaaaataatgaaagtaaaatagcattattcttttctgtaaaaatcttttgctggcatatttagtggatttgatttgtcttttttaaaatcatgatcttcttgggtacaggaaccctattaatagttacttatcattatttaacaatcttgggcatagatacatacaagaagtagggaaaagatatttgttaaatgggggactacagttcagagtttatctatgtgaatcacttctgaattgcagatgttgtaattctcaagatttatttattgcctctttctacttttgcttggctagaagacagatttaaaccagcctttttcatgtttagtcataaaaatccctacacacatatccagtggtaaagattttaagctgcgtgaccctgctacaatctagatgtggtaattgattttcactacattcattcctatcatgttctctcccggttaggttgctgttcctacattgttccagtgttatgttggacggtgctgctattaacctgagacatgactgagaaaaaattcaacctttttgaaagcattattatttactagtatttctgctaattgtatatatgtatacacatacacacacacgatactcctatattataatatataattatatgcaaattaatttatgcctagagactatcaagcttattctgacatgaaagcagaatttggaaaatagatgaatatatttaagtgttttttacttaattcagtaggtaaaataatatatatatgtatataatttatttggggagctattacttatacttcttaaaagaaattaacaattagaaattaattaaacatttaaaataaggtagcactattaagaaacatgaaatgttagtaaatataattattgtaatcttgcagtttaagccattcagtgttttgccactgagtacagttatatgcatattattaatacttaacagcttcaaattatactgtaaaatatatgatagctttttaaatagtatttagtctatggccataccaccctgaatasacccaatctcttctgaaataatatttaatattttcaatgtttatgtaatcgttacttattgtaccctttactgtatgtattaagtagcgagtaattactttttaaacctgtgtaaggtaaraagtgatgatgagctccagaagaggtatttctagtttctggtggctttcaccttctaatagttaattgaacagatacaccttaagtgtaacgtattcctctttagggaattttggtatatgagagtgcctgttttcttttaacccaatgagtttattcaatgatatgtatgctaatagctctaatgaggactcatagcctctggcatttccttgttcaacaattaaataatgaacagaaaaaaataaaaactgaaaatgttgttccgactcaaaataatcattttaggactatgtgtgtgcttttgtgtgggtgaaaagagagatgatttaacttagtacaatatttcaaattctgatggtatcatcatcagtagtaaaatattactgagaactttttattctctgttttaggactcatgtactgagaactttttaggcattatcttgcttaatcttcacaagaaccctaaggtttttacagggaaggaaactaatgttgaggaagattcagaaacaaaaacagtaactctgtcagggttaggctgcagtgataactataatgttatctacctacaaataaattgaatattgagaatgtaatattgacaagacttttattttcaggtcatgttgaccgtctatcatatattcattaaaaaattgatttgttgagcatttactctattgcaggctgggttaagagggacctgtagtgagaaaaacacaagtaatgacaatgtggtgtactagttctaagatagggctagttttgagaactgcgtatagcggactgtgagaggggcatctgagccattattttgaaagggtgctttccagaaagaagtgttagcaaatttattagttttatttaattttattgttttaaacagggaatattactctgtcacccaggctgggatacagtggtgcaatcatagctcactgcagcctggaactcctggcctcaagtagtcctcccgcctcagcctcctgagtagctgagactacaggcataagcagcagcactgggaagtagtattagcaaatataaaacaatgccaaagaaatagatgcaaaccagccaaaaagaaaagggacaccctgagtagacagaataagaaacgaaattttaaagcttacaaaaagtaggaccttttacttaaattgaaagttttatatcactagacgggaaaaggtgagggtaagagagtgatggaaagggaaaagtctaaaatgtcatccacgtttctgactttagcagctgggtagaggatggtgtctttgtgaagtcagctgcccaggaggaagatatggaagcagagaattcattcagttttgaatctattggtataaagttttgtggggaatacagtagaaatgttcacttggcagttgtatatgctgagaatttgcaccacaaaaagagaaatacagtacatgttaccaattaaagttaagaattaaatgtgggtatgagtataatcttataattaattcttcatttggtggcagaatgtgcttcaaaatcattatttacctttagaatattacatatgcataagcacactgaaacataaaaatacagcttttttatttggttagagttcttttctcaargtatttttttttcccactaggttacgaaggtgagaatctgatgaaaattctaaaagacattgaaaacagcacagaaatcatgttggacaggtggaagtttgaagtcatacctaatgacaaagatgagaaaggagacccagtgccttacagtatcatcaataattacttttccattggcgtggtaagattctccactaaattttacctttgtacctgtactgtataatcacagtgagaaaacttttaaactatgaaaatttactgattataaataacttattttaccttttgtgccatcaaaacatctcttctaataggcaattattattgctctaatgactatcattattatcatcgcttaccaatttgaagtcagagtatcagcaattgacatatttttcatgtcttaagcaaaggaaaaaaactatattctttgtaattggtttatttgtgttactaaaatgaagcttagaatgatttaatatacttacaagttttagagtataagctaaaactccatattattgaaaatgtgaaaatattgcrttaaattttatcttactttgagatgcattttataaaatcattataacttactaaaaatctatgaaaagtctacaaaaaatcctgctactattctcaagtgattaataagtcagaaggctgrcttttcatttcatttcttttagaatcttacacagagtaaaatattatatggcagttgaaatagttattaaaattttaatcctaaaggaataattttaatagtgattttatatatatttttagccaatgattatgaaatctaaaaatatagaaaataaagcattacattaaatttaatgtatgtcatcccatgctaattttatgtcatgtcacatctcatacacacacacacacacacacacacacacacacacmcagagatagattataaaaaggctagtagaatatagaaagcattggttgagtccatgaacttaagaggtaagctacctgggtaaaagtctttaagcaaattatttaatctcagtatctatttatttatctgtgccatgctggttattatttcctctctcatagagttacaaatatgattgtacatttaaagaatctcatagagtggtacatgatgaaggctaaatatacaatggttactaatactgtaatgactattattatttgaaagaaaaatgcaatgtgtcttgatccagagaagccctcctattcacgttggtataaaaacagtatttttaacagctttcttagtgtatcacttacacacaacctaattcattcattgtaagtgtactttttaatgattttagtaaattaatccaattttagaacatttttattaygcaaatcagaaccctcatgcccatttttattcaatcttggctctttttcccagtttcaggaaggaattgattggctttctgcctctaagatttgtcttttatggacattctatatttaaaaatatctaaaatctcacaaaggacttactcatgtaaccaaataccactgtaccccaaaaacttatgggaaaataatttttaaaatcacacaatataggagttttgcatctggagtccttcacctagcatgaagtttttgagttcactcatatgaactgtataaatattgtttccctttttgctgttgaataggattctgtggcatggaggtatcaaatattggttatcccttcaccaattggtggacatattgattgtttccaatctttagatattaatgatgcctgtctcttaagtctcttaggattttttgtttgttttggttaccagactttttaactccagaatttctacttggttcttttgtttataattttgtatctttaattaacgttttctatttggagagtcattgttactatactttatactttattcttttttttttctttttttttgagatggtgtctcgctctgtcacccaggctggagtgcagtggcacgatctcggctcactgcaaactccacctcctgggttcacgacattctcctgcctcagcctcccgagtagctgggactacaggcacccgccaccatgcccggctaattttttttttttttgtatttttagtagatacggggttagccaggatggtctggatctcctgacctcatgatccgcccacctcggcctcccaaagtgctgggattacaggcatgagctaccgcgcccggcctatactttattctttaaatggtgtttcttttcattcttttgacatatttataatatctgtttggaagtatttgtctgtgaagtcaaatatctgtgccccatcagagaccttgtttgtttgcttgttatttccctaaatgtgtgacacactttcctattcctttgcatatctcctcgttttttgttgaatactgaaaattgtttatatctttaattctctggatttttatctgcccacagtggttatcattgttcctatgtttgtctatttagtgacttacctgtggagcctttctttcttatggtgtatactgctttcctagagatcacccctgtgtcaaaatggttgtctagagattgcgctcaaacactttgagccagtaagtcttcttttctttgtcatcgcatccatatggtcactgaagaatacattcaaagttcaggcaattagaaatcacttcggcttttaatataatctggcctttctttcgtctcttccgctcatgtacaaaacctctcatttaaccaaggatgtgtagataactaggatcctcttttgtctcttctgagcatttgtgtagccttgcaaatccatacagattttcagacagccaggaatatatagaagtttatcacagcccatatgaaagtttgattccgagatctcttgttaaatctctggccaatctgctggttagctgctggccctaaagtcagtttcacaaactcaggctagctatgacactggctctccctgttcatttgccacagatatcactactgtaagtgtaagttgtaaaacaatgttctaggccatagagattttctggcttccatttcaaataaagtcagttccactgacaatgaatctacttgttttcttarcttattccactctgatagaactacagcacccagggagctgaaggctaatgaagcaacccaaatctgaaatatcactaattagagagttcttatctgaggctcagtagtttttcctaaataaacatttctcattttttttatatgctttggtcaatttccagtggttctcaacagaggagaattttgcctcttcctggaagacatttggcaatgtctgcttgattgtcatgactaaagcagggtttttttgctaactagtaggtaaagttaggaatgctgctaaatacgcttactgcatrggacaacacctcaaatacaaagtaaagaattatacagctatacagctcaaaatgtcaatagtgtcgaggttgtaaaacccttatattaggaaacagaaatacacttgacctttgaacaacacaggtttgaacggcactggtcaacttatcgatttttttttcaataaaagttatacccagtgtaatttgcctccccttttaccttctccacctattttgcctctgccacctctgggagagcaagatcaaccccttctcttcttcctcccctttaacttactcaatctgaagatgatgaagataaagacctttatgatgatcaacttccasttaatgaatagtatatatattttctctttcttataattttcttaacattttcttttctttagctgactttctggtaagaatacagtatataatatgcataacatacaaaatatatattaattggctttatgttattggtaaggcttccagtcaacagtagagtattagttgttaagtttctgggtagtcaaatgttatgctccaatttttttgtctgcaagagtggtcagcacccctaactcccatgttgttcaggggtcaattgtatttaaatacaaaaagtcaaggtgtttgaaaaagagaaatgatacaaaaccaaaaaacttgaaaaggaaagctataatagaaatgagacagaaaatggcagagagtaacaacaacaacaaaaattcgtaatgttagcaaaactgaaagctgcattattgagaaaagttaatcagacctattgaaaaattgactttgcaaaaatactctawagagaattataagtaaacaacatatggtgaaaaacaaaaaatttaaaaaagtaataaaaataatgataaatatatatttatatatattccaattgaaaaaatatatacctaattgaaaatatattatgactagtatgagattatagcaaatttgccaaatataaaatcaacttaaatattcactagtatatgcttatattagcaataatcaatgactttccagaaacaataacaaaaaaattgaaagtatctaagaattaataaaaaatacacatgacctatataaagaaaatgttaaaactctctgcaaagacacacaagatcagaataaatggagacattttctattcttatatgagatttcttgatataatattcaattaatttatacatttaatatataactgcaagattggagctggattttataacaaacttatttaaaatatgtatgacaaaatagctaagtcaattttaacaataaggagagaaataaatttgttttactaaattatacatgctacaattgaattggataattataacagaatggtcctatgaaataatagatgaatgaaccaatgaggaagtacagagacacatattggaacttagtatagggatggcacaaaaattcactgagggaaatggcagattacttagttgataatgttcaaacctagcttcctagaaagaaaaaacttttgttagaactctacctcatattatataagtacacgccagacttattaaagatctaaatttaaaagatgacatttagaaactaataaaaactatgtgatagaatgtttatgattttaaggcagatcagaactaattaaacaaataaggtggctttgactgagttttcttttaaagggtcttgtttcctttgacttgggcctcctttacctgagcataatatggggattagggggataaagagaggaggcattcctccctgaaagatttattcctgccccagggacacaaaatctcaatgctcagggacataatcagagcaatagatcttctaccttgaatgtcattcaacaaagtcatctactcagcagcttacattcctcttcctcaatcaatgaatctagaatataatgaaataaaataaattgtctcaaatcattcctgaatatataacaaatagtggagttgaaggatttaaagcatatgggatgcatctcaactttatgctataacagcatgaaaaagcttcagatgagcacgtagtttgtacttgaaattgtctttaggaacccttctgctgtctagttacaaagtgatttccaagtttgattctaatctcagtattgttttcattatttcaactatcgtcccttatttactgacagctagcgctgtacaatatacaaagaaccttgcctccaatttttagaaagcccgaggtcagaaatatgtagctatatcaccttcatattcattgttatagaccctttgtattattcagaatgggttgactgctggtacaaattatccgtggtctgacaatgaataaaaatcagtttttcctcacgtgacaggtcaggataggttaaaaattggggagaggctctgctctatgttgtcaatcggtgacccaggctccttccatcttgacagataaccttctctattcaacaactgaatggctaaagaaagtggattttttttagtgggcccatacctggaagatgtagcatcatttccactcataactcactggccagatctcaatcacttgcctgcacataattgtaagaaagctgaggaaataaattttgtctgcctaggtagaaagggaaattgatcaataactagacactatggcaattccttctttttaatgcttttccaatttagccagaactatcggaaatgatcctgaaatcataattaactctaaaaatagatattcttccacagtgatggtccatcaataaaagcatatttatttagtaccttctatgtaccaggtactgtttgaggattagcaatgaaaatgatagaagtctgtatagtcactaagcttacatggcagtgaggtgaaagaagattgtcatgagatgctagacagatggacattagaagcaaaagccaactacagatatctttaaatatcccaggaataaaactttctaccccattagtttaatttccatagttgtttcttcattcacttgtttaattaaacaaaaaaactaagcacttatttttttcaggctctagggttatgggagtaaattaaagacacaggtcatctggctgggtgctgtggctcacgcctttaatcccagcactttgggaggccaaggaaggcagatcacctgaagtcaggagttcaaggccagcctggtcaacatggtaaaaccgcacctctactaaaaatacaaaaattagctgggcatggaggcacatgcctgtagtcccagctacttgggaggctgaggcaggacaagtgcttgaacctgagaggcagaggttgcagtgagccgagatcgcaccactgcactgcagcctgcacaacggagtgagactccatctcaataaaaaagatatatatatatatatatawctttatttataattggataattatatataattatccaatatataattatatataattatatataattataatatataaatatataattatataattatatataatatataaatatatataatatataaatatataattatatataatatataatataattatatatataatatataaatatataatatatataatataattatatatataatatataaatatataatatatataatataattatatawaatatataaatatatwatatatataatataattatatatataatatataaatatataatatatataatataattatatatataatatataaatatatwatatatataatatataaatatataattatatataatatatataaatataattgtatattatatatataaacatataattatatatttatataatatatataaacatatatataaatggataattttttatatatatatatacaggtcatctcattattagaacttggagtttaatgatgcaaggagatatttttaaaaagcaaaaaaccaatgcacaaatacaacatttttgaaaattatgataaatgctgtgaaagaaaacaaaagctaccatgaaggacatcaaccgtagatctgagagtcaggaaaggcttatataaagaggatgcatttaagaagagatctgaagaatatacataagtgagctggacaccaaagagatgtcatgagcataccaggcaagtataactgtatgtgaaagacttgaggtaagaaagagcttagtgccttcaaagctctgctaggtcaatgtgcctggagcatggagagggatagggggagtgagtaacatgaaaggctgctgttaacacagctgccaccatgtctcgaagtctcctgtaggactatggtgtgatatttgccttttaagtggtaggtcactgaataattaaataattatcattagggaatgaggtaacccgatccatttgcagcagaaattcttctactaaaggtgatagttggatattaattgaaaaataaaacaattgtcataaaaatgacacaaacaactttaaatgttttctttctacctaaaatctataaatataattgaattggccatcttccctcataaacccagccaatgtcttatttttgaatgtcagtcactgagattctataaactctgccttgtgtaaaccacagtccataataaaccatctattattttcagtttcagtttatttagagtaaaaactcagaagacacttgtgaagccatatgagtaaaatccttctagatacttaaaattgtttttaaaaatcttttataattattacccttacatataattatacagcaaagtttcagcattacatttatattacatcttcctaaagcatttgatttagtttctataaaatgattctttttaaaattatactttccaattatatgtgattaaattatataagtataatggaaagtaaaacaggcataaacaggtttggaaacaacacaagcgactcttggtcatcataaacctcaaaaactaaaaagaaaaatgtgcagatttgctagacaatagtctgttaacaatattcagattcaatataatttatgaagaaaaaatattaatctggctgctcacttaaaggaagctcagtttttaaaaaaattactatattaaaaatcattctggtggtcacatggcgaatgacatggaagttttcaagaatggaagcaaagagaccatcctagaatatcttctagtaaaataagagacagatgagtacactaagagccatggatactgaaaaaaactggaaagacttaasaaatattttgaaaataaaatcgacagtgtccaggggatggaaggaaataaaatatcctgaggttttaagtttaacaactaggtggtctcatttactgagatgggcttaattatttatgattcaggtttagtggaggatataaagacatgctcagtttgaggtgcatgtcatagtggaaatttcagggctatggttggatatttaagttggaagcttagaagactatctcacttagggagaatttggagtcattgacatatttatttctatatggctttatgaatcaccttcctaaaattcagtggcttaatatgctaaccattttattattcacaagtctgtgtgtcaactgggtggttgtgcctttagtggaagattacctggagctattctatgctggtctccctcatatatctggcagttggttctagctgtyagtaggctgatgatgataatgggccatatgactcccagcatccaacaggttaagccagactttgttacataatggtggaaaaattttcagtagaaaaagagggtaaagcccaatgcaaacctcttgatgcaaacctctgtttgcatccagcttgctaatgtgtcattagccaaagaatatcacataactaagcttatattcaaggagagaagatatagaatctacctcttgacggaagacagttacattgcaaggggacattcaggaatgggagaaagtttatccattattttccatctacctaaacatatacttaaatcagtgtggactgacgagattaatagggagagctcaaaaagagaagaaatggaactttaggataaagccttgaggtttactaatacctagagtctactagaagaagatggcatgggaaatgccctggaaaacaatggccaatgaagcaggaggaaaacaaaaagtatataatgttcaggtaagcaaaaaagaaaaaaaaagattaagaaaagaatggccgactaaatagaaagctgctaagaagtctggtaaaaacaggacaaaactgaagaaattgggccagtgaagatgcatctataaagactatatagtaacagagataagaaattttcaasaggaatttttaaattccatttaatattaaaatacaaataaccagagtgatatcagcaacatggcagactaggaagacctacatcttcttcccctgacaaacatatagcttcagaaatcttttacagactaattccctttgtgagaaatctgaaaatctttgaaatgctactgtaccctgggataatgcaaaaccagactcatttaagttggtagggagaattgggttaccctctcactgaagaccaggcccaggcacagcatcacatgatcagtaagaaaaccctcaacccccagctttacttagaggaaggaagaggttagtttgaatgtccagcacttccacttttccaaggtatctccctggaagactagtttctgtctttccaggtggaacactaatggcttcagcaaaaccagccacctaggggagaatacaggcagtggcttaactaatggataccattgatccttccccttgctcagcacagagcaagcagacaaaaattttcagctctcagcttctgcctgcttaaataaaaagtagctccatgagttcatcacacaaatttctccagggctgcccaaagagctagcatttgtcttaccagtcttgaaactctgatgggtctaacacagagctgcctttaggagaacagaaatggtggcttgtgctagcagaaaccatagctttttcattcccctggctgagcacagagtgagcaggaaaactacagcagcttgcttttctctgaggaaggaaaacttggtgaagaccccagaatatttcacctggctagttgttgggggtcttttccatacaaggctagtctgtgaagacagggagaggtgaatgttttgtctaatgtgcagattacataaacatagagaatcaagaaaaatgaaaaagtagacaaggatattcccaacagtggaccaattaaaccaccaagaaccaacttaaaaaaaaaaaaaaacagagttgtatgatttatctgacagataatttaaaataactcttataaagatactcattgaggtcaagaaaataacgcataaacaaagtgagaatttcaacaaaaagatagaaaatattaaaaggtaccaaatagaaatcatggaatggaagaaaacaataattgaactaaaaaattcactcaattctgtcaactcattaacagacaaaatggcacttaccactttgaagatttcaagaattttagaagttttttgtcaagaaacagggaaaaccaaatatatatttcattacaagagttaatctccaaagtataagtaatttccacaartaaatagtaaaaaaatgaataacctagtgaattactctgttctcatgccgctaataaagacagacccaagactacgtaatttataaagaaaaataggtttagtggactcacagtttcacatggctggggaggcctcccaatcatggcagaaggcagaagaggaacaaaggcgtgccttacatggtggcaggcaagagagcgtgtacagcagaattccccttcataaaaccatcagctctcctgacacttattcactatcacaagaacagcatgggaaagacctgcccctgtgattcagttacctctcactgggtccctcccacaacacatggccattattacaatttaaggtgagatttgggtggggacacagccaaaccatatcttcccactattggtccctcccaaatctcctatcctcacatttcaaaacacaatcatgccttttcaacagtcccccaaagtattaacccatttcagcattaactcaaaagtccatagtccaaagtctaatctaaaacaaggcaagtcccttctgcctatgagcctgtaaaatcaaaggcaagttaattgcttcctagatacaatgggggtacagacattgggtaaatacactcattccaaatgggagaaatcgtccaaaacaaaagggaagtccaaaatcaaatagggcagtcattaaaccttcgagttccaaaatgatctccttttactccatgtctcacatccaggtcacactgatgcaaaagataggcttccatggccttggacagctccacctctgtgtctttgcagggtacatcttccctcctggctgctttcacaggctggcattgagtgtctgcaacttttccagtgcaaggtgcaagctgccagtggatctgccattctggggtgtggaggatggtggccctcttctcacagctccactaggcagtgtcccagtggggactctgtgtaggggctccaaccccacatttcccttatgcacttctgcatgctagcagaggttctacatgaggtccccacccctgtagcaaacttcttcctggatatccagatgtttccatacatcctctgaaatctaggtggaggtttccaaacctcaattcttgacttctatgtacctgcaggctcaacaccatgtggaagctgccaaggcttagagcttgctgccaaggcttggggcttgcaccctctggaaccacattctgagctgtaccttggtcccttttaaccacagctggagtagctgagacatggggtaccaagtctataggctgcacacatgaggggggccctgggcccagcccataaaaccattttttcctccaaggcccccaggcctgtgatgaggggggctgccacaatgtctctcgcatgctctggagacagtttccccatttcttggtgaataacattgggctccttgttacttatgcagatttctgcagcaggcttgaatttctcccccgaaaatggatttttattttctattgcattgtcaggctgcaaattttccaaacttttatgctctgcttcctcttgaatgctttrccacttagaaatttctttcctcagatatcctaaatcatctctctcaagttcaaagccccacagatctctagggcaggggcaaaatgccaccaatctctttgtatagcaagagttaccattgctccagttcccaagtttctcatctccatctgagactacctcagcctggatcttattgtccatatcactatcttctgagccctccaagtctctaggaagttccaaactttgcaacatttttctgtctttttctgagccctccaaactgttccatcttctgcctgtcactctattccaaagtcacgtctccattttggggtatctttaaaacagcacgccactcttggtaccaatttactgtattcatctgtttccatgatgctaataaagacatacctgagactgtgtaatttataaagaaaaatagggttaataaactcacagattcacatggctggagaggcctcactatcatggcagaaagaaaaggaggaacaaagccacatcttacatggtgtcaggcaagagagtgtgtgcaggggaactctccattatacaaccatcagctttcctgagacttattcactatcatgagaagaggacgggaaagacctgctcccataattcagttaccttccactgggtccctccaatgacatgtggggattattaaaattcaaggtgagatttggatggggacacagccataccgtatcacctagctacaaaatgggtagaaaattgaacaaacttttctccaaagaagacattcaaataatgaaccagtatatatttctaaatgctcaatattattaatcatcagggaaattcacatcaaaagcacaaygagatatcatctcatacctgctagaatggctattgtcagaaacaacaggtgattgtgaagatttggagaaattgggactcctgcataatgttgggatgcaaaatggtatagccactatgcaatacaatgtggaggtttctcaaaaaatgaaaaatagaactgttgtataattcakcaattccactcctgactatctaaaaggaytgaaatcaggatcttgaagagagatgttcacactgtcatgtatattgcagcacactttgctatagccaagatatagaagcaatataactgctcaaccacagatgaatggataaagaagatgtggtctatacatacaactgaatgttattcagttttttaaaaaagaaagttttgcaatatgcaactaaaaggatgaaccttgaggacattatcctagatgaaataaacccaccacagaaagacaactacttcataattgcatttatatgaggtatataaaatggtcaaattcataaaactgaagagtggaattgtggctaccagggctaggaagagggggaaatggaaaattattaatcaacggacataaataaagtttcagtaaagctagagggataaactctagtgatatgttgtaaaacattgtacctatactcaacaataatgtattttatactttgttaagaaggtagatctcatgttaagtcctaagttctgatgttgtgttcttacaacaataaaaaaagagaggagaaagtaaaaaagaaaaagaggagaaagactaaatataaatatttcactacatcacaagggttaatcgccaaaatatgtaattagcacaattaaacagtaaaaaaaaatctaataacctagttacaaaatgggcagaagattgaataaatgtttctccacacttaaatgaaagaaaaagagaggaaggcaaaaaggaagggagggagaaagggagggaagaagagaggaagagaggaagggaggaaggaaggaaggagaaacaaaagaaaagagaagagaaaagaaaagtaaaaaaaagaaaagaaaagaaaaaagaaataatttgaagatgcttaagttagaaatagcccagtgcccagaggggccaagtgacatcctggagtttcactaaatagctgctatcacaactctgttcacaaatgtttcagatccaaggctttgacatctcagtgactttagtattgtgattaggcaactgctaaatattttattttcaatgcatcaagtttttgaaataatttaataaattcatgatgtaacaaaaaattcaattgacaatagtagttgagttttctaaaaataaattgtatagtataaaccccattacctctaaggggcatatgctgtaggtaatagaaggttgcataagattattgcttttaccccagaactaaggcccaacctgaatgcatactaaagagactgcctgtattttaggtcagctacctttacagagggttttttgagggatttcagttcagaatgagcagaccattaccctctacgctgtgcccccttcctccaaaatgatgtaggaggactgcagagcaaaaagtaactgggactttagagacataacatgatatagtgcatagggagagattcttcaataaacttggtatatgtaattgataaaactgcaaggaaaaataattgattttataggttattctagcctaaagtactacagaaatttagagatagaaaaagtctatatgctaagaaaattgatgtaattacagagtatttctacatttttgaaaaaagtcaccattatgttggacatggtgttaggtcatgttggtcacagggaacacatcctagcacatttcacacacacctgtgggctttcccaggggaatatttggaggcttctaagaaaatagggacatgcaggtgatctgctttgttcaattgcttcaactctcctgattcaaatggatgctggagaccaggggcagctgggagctagtatgttttggctttgttagagccttagctgaggtacttcaggcagggatttctccccaagtgggttgagtaagcaaatggagtcctaggtgtaaggactggaaagcagcagatctgaggmacacaagagccaaacatactgaacctacaggagtgttctggtctccaacagccataaaattgctgagcaggtgagtagagtttctcacttagacatctggatacagcctcttggtttttcttagcggcttggtggattttcaaaagataccaagaaatttacatctttagggaatatgtgtgttttctggaatatccatgaacaatttattaaaatcaattacacatgtggccacaaggaaaatcagttttttttaaaaaagcagaaatcttaaaggcaaattgatctcatataattcagtcatattacaagtacgcaaaaagttggtctaaaaatcttaacatttgaaaattgtaaaacatttctggttaattattggatcaaagttgaaataaaaaggaaaaatggcaaactatacaggaaatatacaattctaatgtaaaattgtgaaaggcatcctcagaagaagatttataaactttcatttctagaacaaaaaaagaatttaatatttatagcagaaatttagatacaaagataatataaactaagagaaaattcattactaacaatgctgtaattatgatatagtcatcctctatacagaaggtatacatatgtatatatatctaaattatttacatattatatagatatttatcataaatatataaatggcaattatatataataaccatatagatatatataaagagacagataaaaatgtggagatgtgtttcccgataagaccaataatggatgcatctagaaagaatttcttgaaaaagagctatgaaaaagaacatcttagaaatttgattacagcaaacaagtaaaagaacaaaatagtaaacattaagaatgataaatgagataaaataatcaaccaatgttgcaggaaaataattttaagaatttttgtataccataataaataataaatatgtaaggagtctaaatgataatttccttgatgacaatgaaataaatttggaaataaaaataaaccaagtaacaccaaaaaattaagaaatttaagaatttccataagcatcatttaaatttttttttaggtaaaatggaaataaaaatggaaaaagtattatttacaagttaacaaatatatgaagattttctatcaaaagccaatatgcatatgggcaaaactgtatatggaggacaaaattatagccatgaagatgttatttttttaaaaagataaaaataagcaatagtcaaattaagaaagaactaggaaaaagctacaagacaaatagaaagttaagatgyaattgacaaaaagaaaacaacttggaaaaaaagagcggaagtataatgacagacaaagcccaaagcttttttctcccctaaaaaaatgacaaatagaatacacatagaccggcacaaatatttttttaacagaaagaaataaatacacagcataataaatttaaagacatagccacagctatggaaaatatttaaataagtatatcatctgtgtttatatggcaataattttttatatagaagaaatggaacattttgcatccaaatataaatagctaaaatttgctgaagagcaagcggtagcacatctaagatagtggttcttaaatttaagcatgaattcgaatcacctaaggggcttgttaaaatgcagattactggtctctacacctgggttttctgtttggtaggtctgagattggggacgggggctgagaatttgcatttccaacaagcttccaggtgatcctaatgttgcttgtccagtatcctattttgagaaccactgctttcagttagccaaagggggaaaatgtagaaaggtagtaagagaactactaaacttggtggcaattccatttactcttaagagcacaagtagtttttatattttaacaaaatttcagaatgcagattaaaagggaragtttytccaattcattttacatagattgaaaacctcaatatcaatacctcataaccatagcttccaaaataaaatttacatgtgaatataaatgcaacaatagcagacaaaaataataggaaataaattcaagtagtatgtctaaggacaaaaatctattgacccaatagggkttatttcaagaaagccaaaacrggtcaatattactacaattatttgttttaaataaaaacaagagttgctgttttttgtgattaaaaactaattgaaaaaaatttaagcttttttaataaatcaaaatacacrtataggggcataggggatgcattccaaataaaatgaggaggaagaccataattcttctctcactatgtcagtcaacaaatttttaaaagtgaactaatttaataatgaaaaattaaatgtttatrtagrgaaatcagctattaatatttgaaggtgattatatatgtaataaatattcatcaactagaaatgaaactagtaaagcaatgtaataaatactaaatatatattttttaaacctctaactttcctttttaatattaccagttattatgttaatatgaataaaattttgttaacaataccagcaaaactaaaaatatgccaaggtttacatttagttaaaaaaccactcagcatatatgaggaaatctaaataattttatgcaaagttataaaataaggcttgaatattaagaatttgtcttgtattcctgttaccggaaaggagtcccaatccagaccccaagagatcattcttgaatctcctgcaagaaataattaattagaaaaattactaatttcactacaaagtgaaagcaagtttattaagaaagcaaaggaatgaaagaatggctactccatagacagagcagccccaagggctgctggttgcccatttttatggttatttgttattgtatgctaaactaggggtggataattcatgcctcccctttttagacccttcaaagtaacttcctgatgttgccatggcatttgtcaactgtaatggtgctggcgggtgtgtagcagtgaggacgaccagagatcactcttgtgaccatcttggttttggtgggttttggccggcttctttactacaacctgtttatcagcaaggtctttatgacctgtatcttgtaccaaccttgtatctcattctgtgacttagaatttcttaactgtctgagaatgcagcccagtaggtttcagccttattttaccttactcctattctagatggagttgctctggttcaaatgcctctgacattccttcatggacagattcagtattattaagagatcaagtctgcccaaattaatttatatattaattccttgattctgagaattctgatagggtcactggggattgtttttgattcaatgtaatttgcagttgaacaaaaatgccattaaaatattctgaaataatgtcctacaatggtcaatttccttgccgtgtactaaatgctaccaaatttctgcaactaaaatacggtggcacaaaaatagattaatagaattgaatataaagttagacaaaaacaaagtgcagagatacagaatatttaatatttgttagatgttgaagtatcaaatcattggagagggataaaatgcacaatacataataaatgaagtgacagaattggktattcatttaaataaaaacaaattcatatttctacttcaaagccatgtgaaatatacatcaaatagattaaaaatacaaatggaagcaatacacttatattrgaagaaaatatagaagtaawttgctatcatccggaacaggaaaacttgtcagagaccagcaagaaatctagaatctaaaaggtaattatggttgtgttttcttgmtctttcattttaaaaatatatattaaaactcattaacttttaaatttcaaaaaatgttttcaacaaaaataataaagatagggtgaataaacttaaatattgaattccagtttaaaaaataagcatgtaatagaaaaatactgaatagccagatgaaaaaaatccctaatatttttagttaacaatgaacgataaaattatgcaataggttaccatattttgcctttcaaattgttcaaaattacaaagactgatgatctctatcagtcaataaatcagtaagtatgatgctgtcatacttattgacatgatgatgtaaatagaaaaatcaccacatccatattgtgtaatggrcttataaattaaaatattttattatgtgatagtatctattaaaatttaaaaatgtgcataccctttgatccatccatctcatttctaaaaatctattccacagggaaaagagtacaaaagtgtaagctgcacaaagcatatttaaagacataatagttgggaaacctaaaaatttatcaatttgaaaataatgtacaactagaaaagaggtccccaaaatttaacattaaattacaaaaacaaattgtccataaataacattatttctcatatcctacttttgtgaaggaagacaatacagaaactatcttaaggagttgttcgggacttttaaagctcttacaacactcaacagtagtgctcaagaaatgttagggaacacagtggtgatcaaacataaatgtctttacctagctgtctcctaaaacatgtaaaggaaggccgggtgtggtggctcacacctgtaatcccagcactttgggaggccgaggtgggcagatcacgaggtcaggagatcgagatcatcctggctaacacagtgaaaccccgtctctactaaaaaatacaaaaattagccgggcgtggtgacggttgcctgtagtcccagctactcgggaggctgaggcaggagaatggcgtgaacccgggaggcggagcttgcagtgagccgagatcccgccactgcactccagcctgggcgacagagcgagactccgtctcaaaaaaaaaaaaaaaaaaaaaaaaagcatgtaaaggagcacacaaatatatatatcaaaatatgtatatgaaaacatataaattaatctgcaaatatatatacctccagcatgtgaggagacagagagaaataaaacttcttaatgtaaatttaaaatgtggtgggactgtgggtaatctttaaagtttcatagcattattcaatgtatttaaacgtttgtaaacccatacataccatgatgctaacattcccattcaaatattcactttcaacctgttctacagtgctgccttttattgaattgttttaataatgatttgcgattggatgtggttttatttgcttagatcacattttaactggatagatataactatagctgctgttctactgattctttttcatttcacacactcttgtgtcttttcctttccttcacttacttatatagcaattttgtttatttatgtgactaatcactatgtgctggatactcttcagagcactagaagataaacggaattagtattggagaacacaagagggaaaaccagttctcatttagtctacattttcttaggaatgggacacaataaacaagtgaatttcaaacagccctcagtattttgaaggaaaagatacagggtactataaaggaaagtgacaaagcatgtgcatatgttatggggtctttatttcactgttagatggaaaataatttttgccttgcaatacattattagattcattttgtagaatgaattcatctgtgctgagctgcttgagctgaccgtggcaaattcttctggttcatgtattgttcttcccatttgcttcttaacatttgactttmtctttgatttcccctttggggattaggccttaagcatcccaaagatctcaaagccgtcactatcagccttaagaccactggctctttaatttgactttctaggtttctggtttattgatagctgtggctttcccggtccataacaacgctgaccctgccttatcatgttcttgtccttgtggctttgagctacaggatcaatttctggttaacatgttggtagaaagtccacacatctgagaactatagaatccatattttgtgatagctccctattggaaaacatttaatttttcctagtgsagagaaaggaaaacagattccttacttaatgtgctaaaagtgtagtcaaattcatggtagctgccccggaaaacaattattttaagtctttttaaacctgatagcttttcgtgtttaaaaacataaaaaacatggtgacatattccttatccaagcaacatgtgcaacaatgaaatagggagagtatcatgagacagggagggaggagggttagcacacaatattattcccagtggataatccagttaaacagatttgcaaaatatactctttatgggtcacttactgggctttacaaatggcattgttgaataaacatttyttaactacttctgacagtgtacttacattagtataaaaatctaaaatattgagttatcatgggcatttarcatttagctccttgatattttaatcacagagaagttcatttattagtttattccacaaatgcgtattgtctaattgctgacatagacattatagtggatacaaagatgaacatgttgccagaaagaagtgtgaattctagtatattggaggtaaaacattacacacaagcatattcccttgcatgtggctagaggtgatacaaataagtaagggctcagggaattgtttattaccttttaaactgttagcatatttatcctgttgtttaatattaaatataatattataaagcatatttagccctccaaaaagagatacaaaagatttttaggtcatatgttagtgaccaccttatggttctgtaattagaacattagggcttaataaaccaaatccacaaacatctgtattatctttcaatttaatttgtgaagaaaaaaaatttaagactcactgtgagacagattgcagtaacaatagtaatatgacttagtgtttcaaccataataaatgttaaaataatgaaagatttaagcaaacccatttcttactgagtataacagtgatcatctttgcaactgagaatatgcayaattatgcacaattaagacctrtgaattatcttccccacctcttatgtctctgaggccaagtctgaaaagctcttgtattatatccatggaaatgcttccaccaagataaattgtatttggcttgctgacatcaacagatattcagccacaaaatagtgctcatgtaagactatcttagcccaattctgttttccctacatagagtattgattttgtagcagctgttaatcatcccagtaagttccaatttggacactcttcaacacagaagtcagcactgcgagaagaaacaagcaaggcaataagaattgtaaaggcttctggaaaggtcctccagtttttgtagaacatatccagaaacaaattagtatcacatgctgtgtaaaaagtgaaagccaacatgaaaatgaaaaccttatccacattagttcttctgaaatcagaattgggtctatgttaactgtagaaatcttctaagtctggaagaaatctgacaaagacaagtggacttttactacacatatatattaccacccaaatgtcctatcaaatagatatttgcatggttgtgatttaatatccttcagccttagtcagtcactaagagcctcttattctgccagtgtaggaaaaatatgactacttaattctcataaccataaatttcaagttagtggaatagttaacagaatttctccagttttcagccctttgtaacacattctyctatatctttactgaaaacacaaaggaaatattttaaccaaagaaatttagcaatgctcacagactgattaaaaaggaagaattttttgtctagtcgtgagatgaatataattgggctttgaaaatgatcaaagtcttttttaaatttcattttcttttatttctacattatctacctctttagtgaaactgtgatataattttagaagctgtcattttttattagtttkatttatatttggtttgataaaattctgttggtctgcagataattccgtcatcatgttcatgacaatcattgttatttggttcttaagtgagattggagtttacatttgagaaattgacaagttatggatgatcatagcaaccaaatgaagactataaagcacatgaaagaaagaaaatgtcctcagttgtattttttattgttttgtgacataaagaaatttttaatgatgttaatgctatactgctgtaatgtttttcttggaaaatcaacttcatatccttttggaagatgctttctaataggacattggcttctgaaacaggttatttatctccagaatgacttagattagttgagtaaattaccaatcacaaaaagattcttaatctcaaatatttgataattttacctcagagcaatttattttactcataaaatttcattgcaaatgtaatttcagctattttctttcaattacattttgtttctgttttattaagtaagtcacactaaactccttagtaaataagtattttagaaaaaaattaacctaatctctaatgaatgataaataagttgtatgttaagcagcaaattgaatataataggattttttcaaaacagatccataatataataaccaataatgaataatttgtttttatctgtaatacttaaaaccccaaactagaattttaaatgacagaataaaacaaaattactgttttagttttattaataaattttcaaaaattgcttgttcattaagcaactaatggctaaagttttttgttttttttttttagacagtctagctctgtcagcaggctagagtgcagtggcgtgatcttggctcactgcaacctccacctcccagggttcaagtgattctcctccctcagcctctcaaccagctgggactacaggcacacgccaccacgcccagctaatttttatattttttagtagagacggggtttcactatgttggccaggatggtctcgatctcttgaccttgtgatccacccaccttggcctcccaaagtgctgggattacaggcgtgagccaccatgtccagccagctagagattttaatcgtctttcctttcaccagataacttttctgtgtttttaaatgttcagacttaaatataattttcagtgttattgttccctgcattctctttatcgctcaacaaagtttaaaatgggttttgaatactgaaccagaatttctgatttctgaagaatagtaaatgttgtatttaatataaagtattctaaaaaatacaaagtattaaatagaatattttaaaataactatataggttatttggtgaaagaagaaaacagaaaatatatatcaattttttwaaaaaaaatatttattcctaggtaatttctgggggtaaaacaacttcttttatgttaccacttcaccatttgcagaaccagtgcaaactggtttctcagacttacttgtacccctatcacatgcctaaaacttctttggctatggtcacccttgatgtcacattaaccagttcaatagtaccatctttctgagtgttttgcagcacttgactcactttctgttttttgaaatgtttttcttacttccttgggcatccatgaccttacactctctcaagtcttataattctctgaccaccttgctggttttatgtcactttcaagagattttctaactttacttttcctttaattgctgatgatcamcaggattgtttttctgttctactctttcctctctgcattgccctgggttatttcactcctcctcattgatttcaaccaccatctgtgcagaagacagcatgccctagatcactcatctagaactgatcttagcatttcacaaatccccactactgaccaagaaatcctgtcattttatcattcaatcttctctaaatcttttctgtttttatttatatagtcccctgggtatctggaactctcattacctcttactgttgcaatcaccgtgcctcctaattgctctctctgcttccagtcttgatttctcaaacccatgctccccatagctagtcatggctccagtggccctgctgttgcatacagatgaattccaagcttcctatcatgttctgggcctgcctcaatctccaatctcatctccagaaactgcctgtagtttctaagatgcttttactttactctattcctttgctcctatcatcaattctgtttggatgaaactgaccattcccatctccttcctccaatttcctctttacatccaccttttcctcattcaggagttacaaggctagctcctgtccatttttgaataattagtggaagcctctcttccctccaaaagccttttctgacctaccaaactgggcttgccactcatttggggcactccgtattaactgttgcatatctttatgtaatcttaatcacattttacacattgtttctcagttgcacctgttggtctattttcccctataatctgagctcctccaggtgaaggaatgtaagttattcaagtgtgcctaatctgcacatacattgacacgtagttctcaaacagatgttaaatgatcactcacatgtaaataaatattctacagtattcaaagctagacagacttctttagctctttctcatgttcacaattaaggacatgaccatcattaggtaaaagcaaatggtataaatttcccatcataatttaaataatactttctaggtatagataaaggtaacgatgttattcttttaaatacttctaacaattatagaaaatgggaatagtaaaaagctgtgtaatgtgtgctgaagaatttagaatgtggcaaacatttttcatacccatatttcaaagcaagggatcttctaaaaaatgctccaggatgtagatgaagcctctgtctgacatgaatgattttaacagaatttttattttctttcagtcatttaatttctaggacatgaactttctcaatgttccatagctaatttaatcttacctgcttttagctgtcatgtgtttttaatgactaaacttgcaaaatgtatcacagctaaggaatttttttaacattaaaaaaaagttctacactcttgctaagagctataatgctccaagtgacaatgataaatgagagtgtattcctgaagatgtaattaatctgcaacagggtcagaacagctccttaggtaaatgaaactaaatcagctgtgtagtctataattaacttacaaaaccatattagcccaagtgtaatattattcattatatatgtaaggtattattttctccatatgaaagttgtaatttgctaagtaatgattaacaattcatcttaatactttagtcatattatcataatataattgtcatacattttcattttattccatttacttactattggaaagacagaagtaactatatcctttatgtggtatgtacagaaattaaaaatttgaaaataaagctgatttcttattattagattagttatccctggcacaggatgtagcaggtttattttgttttctttgaggatgtggaggtgtacgtaatcaatattgagccaaaagcagaggcatagctctgagtaacattaagtataaaaaaactcaaaagaaaaggagaaaaggattttgacctttaaaacacatatcaacaattttaatttcatattgctcattctgtattgagcagtgaatttatggcaagcttaatgattccttttaatatgagttaactaagaaagagcctattttgtgcaaagtatggtggttttaggcatattcaagaatagttttggaaagttgggaaaaatattagactaagtacagaaagaaaatgtgttttgatcaggattgcttgggattcaaatggccagaatcccacttatgtaactttaaactgaaatgagactatattcactcatttcactggtccaggagtgtttctggcatcaggctggatttagaaacttaacaacatcattaatgccatatcacttgttgcatctttcaggtcagttgagtccattcttttctagctgggtcccaacagtatggtctggattcaatttctctttccacttttggatctgcttgcctcagatgctcccgacctagtggaaatttgctgcctgaaattccagatccgtagtggaaagacacaatcttaccttccagttccaccagaaaaacctagggggatgtttaaaatgcagtagttgagcattaaattgtgaggaggccctgctgaaggctaagacctgcactgcaccagttccatgcccatgaagccagccctgcatgtactcaagtctcagttgtttcagaaatggcctgagttacagtcacgcgaaagaagaggagagataatgttgatgaggatatttctacttgagccacagggaatatgttctgcatagtaaagagagttctgtgttgcttgacaggcaaagtcaagaagttcttcactagaacttactcaaaaacttgggcagtcatttgagaaaaaaaaaattaaaaaagaaattcaaatgaaattaaattgggattggttgggttccatatttatgcaaggaattttccttggtgatgtgaatcacataagtatcataataaataatatttcctccaaagatgtttgcaatgtaactgaaaagatttgacaaatcattagaagaaaaaccagattattggagattggagaacatgtctaatgattatcagtcagctcctttgcttagaaaacattcagtttaatctctacacgacagccaatactctcgttcccttaacaagattgttaactttaaagtccctgtgarttctgtgcagactggtcaaagtccagatgctctggcctcatcataattgwctcttcttcaagaggtgataaaagtggtctactttagttcttcatatggcctttctagaggtagagacctagaatcaaaaataacaagtttcctgccctctttctcacccagtatacgatgtcagatcaggaacaagttaacaaaaataaacgttcccagaaagggaagagtgggcattgcccagcagatcccagtgtagcaattcttaaatcctgctgagcagctattgtgaggattccaagtgtgagatttgtggcggaagctgattaagcctttagtctgggctccatggtcacttgttcttcatagttcctttgctctagtctgttttattatcctctttggccacatctgatgtagacatctcgtaatacatgtcatttttgagagatgttttctcagtatgctttctgctcacagactgttgaggtttcatggcttattgcaagtctgaaagagtcccaatctctttgcgtccatgcttttggcaatatatttcacaaacttcattggattcttacctgtttgatttcagtcaggaacatggtcgaacactcatactcatagttaattgtatctgaggttactttcatcatatagacttcagtgggagtctctcacccttaatcatttttcccccgagttgtcttttgcaactgaaaaaatgtactgtgtatcatgttattagcctaacatttttttagggtgccttaatcgttatcacagcatagatgcatagaaatgagtagaaaaagaaaacaaaattttagaaaaaaattgacaaagagataaaacataaaaagggaggctgaagacagtgatagaaaagaggatatggtagcaagtataaagaaaatgggaatgtttaaaatctgttttttaaaaaaaaaaacattttggcatcaaygtgaagaagcatctgacagtaaaaatacaagtgggagtgagtaaaggggaaaattgacatttgggagaaagcctagaaagcagagatagaggaagaactgacttacaggggaaaaacacagtgtgatgggcctggaaagcaaagatggagatctataaaagagaaaaagacactcctaaggaatttaacaccctgtcctagaagacttttcctgtcaaaaaacaacatgtcaagtttttattatcattactattatccagactccaatgtttttgactagccatgtaattataaatgtgactaatataattgagaattttttctttgaaaaataataacctaaattgttttccattagayactgaagtttgacttgtgtatcagcaatgttagaaaccctgtgagaataaaaggagatgtcattgacatttttatatacaaaaatgagtgaatttataaatatgtaacttaataagtaatttaagttaaatgagatttaaatttctatagcacaggtttttcattatttgaatgaaactgtattttacatttattcactttgttctacaagcagtgtgtcctttgattaaaacatcttcaaggctaatacaaaccactacttttctactaagaatctgcaaacaaaatgtcagagaaattcacactgtgtaattcctattagatggcttagtcagttcatatttccaataactgcatctacttcatttttaaaggcctacaaaagcgagaacatttttcttcctttatcttataaacagaacaatgrcaacagctttattgtgatgttctgctgaggttttctaaatatatgcaatttttgcatatcaaatgattgtcttatatctataactcaaggaatattttcagttatctcctgatttggattctcagaaataatcccttaattctacggaaataaaaatcatatactaatagcaatacaatttatktaataagacatgaaaatgaaattttagtgcacctattcatgtgttatcacaaatttattcttaaatgcacattatatacttcattttaaaaatactctacctgtcccttgttatattatattatcattctgctccttttgaaatccctgtggtgtatgcaggtgtctggaaaagatttttggagctttctctgtaagaattataaccaatcagtaccttctgagctagcagtgtcttgatttttaaatttgtggccataacaaaatttctggctattatttattgagtttctatgtgtgagagtaacattgtgctaaattctttacaaatagtttttaatttaattatctgcacactactgtgagcaagttactattattgtctcattccactgaagagaagtgaagttcagggagattttctcaagttcgtgcagctggtattgagagggcactatcaaaatgcaaacagtgttttattttcattctttcagatagaacttctaactctattgtatttaggtctttctttctttttttttgtttttgttttttttgagatggggtgtcactctgtcgtccacgctggagtgcagtggtgcaattatggcttaccacagcctcaacctccctaagttcaggtgatcctcccaccttagcctcctgagtagctgggaccataggcgcatgccaccatgcctggctaatttttctattttttgtagagatggggtcttgccatgttgcccaggctggtctccaactcctggcctcaagcgatcctcccacctccgaaagtgtggggattacaggtgtgagccactatgcctggccatggtctttcttgacaaacatatccttttcatatactgtagtattaataaaatggacacttgcttatcattgtgtatacattatttcaatttctaacagttttcagatagaatgaaaaatgacatggacaagtaatatgttacaacccagagtgtaacactagctcacacactgacatatccatatctttccctttatctcaaaatccttaattggcctaaatgaacccatctccgtttttcaaaatcatcacagcaaagtcagctgaagcaacactccctgggatctccgtaaacacagatttgagagcagtgtggctttagatagagatagggcattttatttgagtaacaacagataaaatctccaaaagtcctctggatgcgattgctaagtgagtggcaatctgccgggacaggagacacatggttaaaaatctcaggcagatattcctwcttgaaacccttagcatcagagacccttgaattctgtgcttggacccctggaaagcagaaatattatacttaacgtttgaatgtctgaatcttttgcctctgctggggagtggcagctacaggatggttcaggtgaccaggcaaagcagtgaaatgcaaaactagtgaaattatatagaaaatcttcttctctaggatcatgtaagggagtgtagggattaaataggaaaatctaatgtgtgagagttttctggacaagaagaatgttgtgagtaaagctttaaagtagagaatacgggtagtacaagtcatgtttagggaaggtgactgttgtggcttaacagaagataagtagatgcagaggagaaggagatgatcctaaaagttaggaaaaagcagcagggagcacctggcttgcaccagcactttggaaagacgagacaggatgatgtgatcacttgaggccaagagtttgagaccagcctgggcaactagcaagactgtgtttctacaaataataataataatgataataaatagatatattaatttatttaaaaagagtgtggaggttaagaatggcccatgaggaaccattgtagaattttgtaaaggcaattgatcacttaaaaggaatggtgttttaagaagagtactctgactgcagacaaaaaatctatttacatttgacaaaaatgaaggcagggaggccaataacaagtatggagtctagcacaatcacaatgctatgagatgatatgtaaggaaattgggtaggataactgggatggaaatactagaaatctaaatgtgctgagaacaaaagagactattratagcatctggtaatgaatttggcattgaaattgaaatctctattaaaatattattacattacaacattgtctgacttactgacgtcaaattgggaatgcaggtctggaacatggaagaaagggtttcagcagtaaaaattaaggagtagattgatgtggatgtgattgctcagaaaagcctatagaaggtacaayggcatagcctaggacatagtgaattagtcacaatatgctttgggaaggttttggattaggttgcttctatgtggttctctaaaaataactatcaatctattgtttctaaatatgacctatgtatgtgatccaatataaacagagaaattaacttttagatgtgctgttctatacaggtgtttgtggtggcatttcagtgatattttatctgtttatgacttgcttattctcaataggctcagttcattcctgttccatttgctgtgctacgtgagagcaggctgtatcaactacaaaaccactttttctttttggttctttcgcattgccaaatattttcatgcagtttagaagcacttcagtgtgctcacaaatgaagtgatattgatagctgacctaatgtttgtaaatgatgtttattttcatttttattagtgtagcatcatttgtataaccataatactacagctgccacttgcttgggctattctctgctcccactagtgaaggaatcccacagatctttggacatggcatcacttgtcatatgaatgtgtctagaaaaaaaaaaaaggagaccaacaatattcttaatgcagtgtttctcaaggtgtcaactacctgctactagtggatcattgtggtctatcaagaaggagtctggtggcttcagatgcagccacaatgaaatagttgcattcatatacattgcatacatttgaaaaggaagattaccattttcatagatatcctaccatactataaatcattgaattcaaaaggttctatcaaggctaaaaagaagacagtgttgatcagtttgtctcagaacatgttcagctaacaggctacatttcccctcagccaatatattcatatcatttgcctgttactgcttatgtgttttaaatatgtagttggcattgttactattacgttgagttctttccacaatttgtagaaaatgaaacaaaacttgaaataaatcactgcaataggaaagtaatgaaaaaataaaaccactcataaatttgtaactcaaatagtaaactaaactatattaccaatgtagaaggtaaatctgtatattctcagataaacgaattagcaactgtgatgactttgcacaagcagtcaaaacagaaaagtatgataggaattatgaagataaaagtcttttaaaatgagatttaattggattgatgatttttttaacttaccccagagctttttaggttagacatccctgccaatttgggccatgaacttttgtttaattttcaaacaaagcacaatcacctctctggtaaaccaattgagttatgtcagaacatacataatacaatgtttacaatataaattattattatttttgccaaaggcaaggaaaagaccagcgcttccaaggcatcattaaaattgcatctttatagtaaatatgtcacatgtttgctgatagtattatagcaacaattgcaaagttaataacaaatattatacctcccraaatgatgtatgggaatgttcctttattaaatgatactattgattctggcataatatcattagcttcttccttggaagactaagtacagggtctgtgcatgttaataaatattttacttaagwgaaatattaaataaatgatgtgataagtccacaaatgagtagtatataaatgagaaaaacatgctcaatgatgtttttctgcatatcacatgaaaattcatgctacacgagattaattaaaattatttttcaaattattatagagaataaaaaaggtatattgtgatcagtaataaaaacctgagtattataccctgaagtggttacccctggaagtcagtccacatactatgaatatttagtttgtgataaaatacacacctctggattttgattaagaattaaagcaaatcaacaatgtgaaggtgagcaaaggtcatatactaagtgtaarcctttayagtgtgctgtctgaggaactgaatagccattctaggactgtgcttttcattactgagttaacatggctatcaagaagactgtatgttatgtaagatttgaaattacaaatgagatttttaaaaacccttgcttaactttcatgtttcagcattaaaacagggttaggaaatataatttgcataccacatgattaacccattctaggggtgaagtttattgatgtttttagtaaatttatgaagttatacaatcacttttatgaatgctattttatttttgccatactgattaagctttattcatctttacaatacttcatgtatcttatttcatgtattagtgcaaggaaaacatgacagtgtgggatttggttcattatttttccccagctttgaggaataattggtatacaaaaatatgaaaccacacataattaatgaaatttggtgagtttagacatatgtatacattctcactactatcaccataatcaaggtaacaaacatatacattacatccaaaagttccctggtgtccctttgttttgtttttgttttggagtaagaacaattaacaggatatctactctgatcaatttttaagtgtgagtaatttattattaactatgagcaccatagtgctcaattttgtaattggtccaattacaaaatgatttactcattttgtataacaaactttacactcactaagcaacagctccccatatcccacctccaccgttgcttggtaactaccattttactatctatttctatacatgagactgtttcagatgcatcatgtaagaggaatcatgcagtgtttgtccttctgtgactggcttatttcacttagtataatgtccaggtccatccgtgttgtcacaaatgctaggatttccatctttttaaagggtgaataaccttccaatgcataaaatgccaaattttctttatccattcatctgctgatgaagatttgggttgttttcatgtcttggctattgtgaataatgctgcaataaacatggtgttaagatatgtctttgacattctgatttccattatttcagatacatattcaaaagtgggatcactagaacatatggtagttcaattttttttttgaggaatctctatactattttatcatagtggctgcaacattttcattcttaccaaaagtatacaagcattccgatttctccataactttaccaacagttattatcttatgtttttgggtgatagccatcctgacaggaataaggcgatatctcattgtggctttgatttgcatttccttgagggttagcaatattgagcatctttttatacaactgttgagcatcattgtatcttttttggaaaaatgtctgttcaagtcctttccccattttgtaactgggttattttgttgttttttgtttattttgttttgttttgctattgaggtgtaggagttccttatatattttggaaattaaccacttttcaaatacatggtttgcaaatgttttctcccactgcatagagtaccatttcattttgttgcttgtttctttgttgtgcagaagctttttggtttgatgtagtcccatttttttttttttttttttttttttttgagacagagatttgctcttgttgcccagactggagcttccagcaaacgcatgatctcagctcaccacaaactccgccttctaggttcaagggattctcctgcctcagcctcctgagtagctggtattacaggcatgcgccgccacgcctggctaattttgtattattagtagagacggggtttctccatgttggtcagcctggtctcaaacttccaacctcaggtgatccacccgccttggcctcccaaagtgctgggattacaggcgtgagccaccgcgcccagcccagtcccacgtatttatttttgtttttgttgcctgtgcttttggtgccacatcgaagtaatcattgtcaagatcaatgttaacaaggtttttacctatgttttcttctgaaagttttgttttgttgttgttgtttcaaattgtgcatttaagtctttaatccgttttgagttaatttttgtctatgggataagtgtctgatttcattcttttggagggggatatctaattttacaaacaccatgtattgaagatactctctttactctgttgtgtattcttggcatcttcatcaaatatcagttgactgtatatttgtggcttcacttctgggctctctattgtgttccattgctctatagatctgtctttatgtcagtactagactatcgtgattactgtaggaagtgtgattccttcagctttgttcaaaattgctctggctatttgtggtcttttgtggttctgtatgaattttagaattatttttctatttctgtataaaaatatctttgatattttgatagggattgcactgaatatatagatgaattttagctagaatgaatattttaataatattaaattttccaatccatactcaaggatcactatccatttgtttgtgtcttgttttatttcttttatgagggttttaaatttttcaacttactagtctttcaccttcttggttatatttattcttgggtgtatttttctttttggtgatattgtaaatgggacggtatttctgatttcattttgggatagttcatagtttgtggatagaaatgcaactgctttttctgtgtttactacctatcttgtaacttgattcattttgatttttaattccctcagttttgaggtttttacagttttcttatataatgccaccagcaaacagatattattttatttcttcttatctaatttggatgccttgttgktktttttttcctttcttaattgctcttgctggcacttccaggactatgctgaatagaagtggtgagaatgagcatccttgccttctttcacatcttagaggaaaagctttcagcatttctctgttgagtatgattttagttgtaggatattcatatgtgaccattattgtgttgagacagcttccttctatatctaatatataactaatttgttgagtggtttagcatgagagagtgttgaattttatcaaatgcttttccaacatcttttgagattgttttgtggttattctccttcttttgtttgctaakgtcatgtatcccattaattgatttgcatgtgttaaattgtccttgcatcccagagataaatatcacttggtcatggtacaaaattgttttaatatgctgttgaacttgatttgctaaatattttattgatgatttttgcatccaggttaattagggatattgcattcatgttcatcagggatatgattttcttttcttgtagtgtcattactttgttatcaaggtgatgctgacctcatatgagtttggaagtattccttatcccttctatatttttggaagacttttaaaaggattggtattaattcttttttaaatgtttggtaaaattcacctgtgaagccatctggtcctgagattttctttattgataggtttttattgctaattggaactctttattcattaccgatctttaaagtgtttctatttcttctttctgtcttagtagcttgtatattcctatggatttattcatttcttgattgtccaatttgttagcatataattgttcataacagtcctttttgttatttttatttctgtggcgttggttgtattcactcctgtttcattatttgggtcttctctctttttttcttagtacgtctatcgataagaattcatcaattttgtttatcttaaaaaaaacaggccaggtgcagtggctcatgcctataatcccagtacgatgggaggctgaggkgggtggatcacgagggcaagagttcgagaccatcctgccaacatggtgaaaccccgtctctactaaaaatattaaaatcagctgggcgtggtggcgggtrcctgtaatcccagttactcaggaggctgaggcaggagaattgcttgaacatgggaggcggaggttgcagtaagctgagatcacaccattgcacgccagcctgggtgacagagcaagactccgtctccaaatgaattttaaaaaataaataaaaagcaactcttagttttgttgatcrttttctattctttatttcatttttttctgttctaatcttcagcattttctttcttctgctaactatggctttagcgtgttctttttgtagttacttgaggtataaagttaggttgttgatttgagatacttcttctttttaatttttctttctttctttctttctttttttttctttttttaagagacagggccttactctgtcacccaggccagagttttatggcacattcatagcttgctactgccttgaactcctaggctcaagcaatcctgctgcctcagcctcctgagtagctggaactacagactcacacgatcatgcctggctaattattttgtttttttgttgagacagttctcactgtgttgacaaggctaatcttgaactccttgtcttaacaatcctgctactttggccttccaaaattttgggattacaagtgtgagccactgtgccttgccatttattctttttaaaagagatatttattgccataaacttccctcttcatactgcttttgctgtatcccataagctttgatatgttgttttcatttttgtctcatgatattctctaatttcctttttgatttcttttctcacccartgacttttcgagagtttattttattcacatgcatttgtgattgttcagttttctttctgcaattgatttctatatttgttcctttatggtcaggaaacatacttgaaataatcaatcttcttaaattttcagatttgtttcgtgactaatatgtgctttatcccagagaatattctgtgtgtgctttaaaagaaaatgtattctactttttgtctcttgtattttttcttttttttactttgtctatttttgtctaagtatagtcatcccaactcttttggtttccatttccaagattatctttcttctattgattcactttcagcctatgtgtgtcttcaaatctaaggtgagtctcttatagagagaatctagttgggtcctgttttgggagaaagcatctagttggttctttgtttttgtccattcatctactctatgtcttttgattaaaccgtttaattcatttacatttaaagtgaatattgttggctaaggttttactgttcccactttgtccattgttttttgtctgttttgtagttatattgttcccctcctcttctcctggctttctttgtggtttggtaattttattgtagtggtatgctttgattttttcctctttgtcttttgcatatctactacctttgtttattttatagttaccataagcctggactaacctcttgtaattataacagtctacttttagctgataacaacttttctttaactgtatatgagccttctatacttttattctcctccacgtgtagtttgttattgttatcagagtttacttattatttttctattgtttatttattaaacaaaatttgtggtgatagttataagtaataattttgtctcttaattttttactagtatttaaaatgatttatataacatttcagtattagaacattgtatatttgcctacatatttacctttacaagtgagatttgtactatcataggctttcatgttgctgaatagcatgtattcatttgaacttgaagaacttccttagtacttcttgcaggatatatctagtgataaggatttcccttagttattgtttatctgggaaattatctatctttgatttttgaaggacagttttgctgagtacttttggttgacaattttttgctttcagtactttgaatgtatcactccacccgctcctggactgaaacatttctgctgagaaatctgctgatagtttataggtgttgccttttttctgtgatgagttattgctttcaaaattctctctttgtctttgccttttcacaatttaattataatgtttctcattgtagacttctttaggtttaaaactatttcggttacttgtggattcatgaatctggatgtccatttccattcccagaattagaaagtttttagctattatttttttaaataataacttttaaaaataataacttttaaataagttttcttcccttttcttatctcttctcattttgaaacttatataatgcatatattgtttcacacggtggtatctcaaaagtcttgtaagctttattcagtctatttattcttgttctttttgcttttatgatcggagaatttcaratgacctgttttcaagttcattcattcacctgattaattgaatctactgttctttgttctgattgaatctactattgactgagtctactatagaggctgtctgttgaaagttttagttgacttattgtcttcttcagctgtaggatttctatattttatggtttatgtttatttgctgaactttctgtttatagtcagttgtttagttgtctatctgtgttctcttttagttcactgagtttattaaagataattagtttgaattctttgacaggtactttgtagactttcatttcgttagagttggttatgggaattttattagtttcctttagtagtgtcatgtaacccttattctttgtgatccttttattcttgcaatggtgtctgcccatttgcagaatagtttacagactgactttgtcaaggaaagactttcacttataattttaattgcctaatatattttatttccttggtaatattctatggacactctaaaacagcatgtagctcctgttggtaggtggggtgttctatgtcagttctagtgtatatgcttgataatgtttaggactccatgtctttaccgattttctaacggtcttatcaaatattaagagaatggcatttatacatctgcatatgtgttaaattgtctatttttcatttcaattttgtcacttttcacttcatgcattttggtgatttattgctatatgtatatacatttattattattatgtatttcttatatattcactgttttatcaatatgaaacataactgtgcatctctaacactatttttacttaaagtttattttctcatatattaataaatccactccagctctcttagttttactatttatgtggaatagctgttttccagtctttcacacttaatccatatatatatttggttctaaagcataattcttgtagacagtatgtatagttagatcttgttttgtatcctagctgacaatctctgacatttgattcatgtgttagtccattcatatttatgaaattattgatatggttggttttccatctaccattttgtcttttttttttttgtaggtctcatgacattttaggtttcttgttgttccttgtgaagtttaatttatttttctgagctattcttttggtgttatatctgggaacattttccctaacccaaaggtcgtgaagaatttctcctatattttattctaaaagtactacagtgttctgagttatgagaacgatatggatatagttctgagaacatgatccatttatttggatgtaggattcattgcaatttttgtatatggtttaaagggaaggcctaacttcattttttttttgcatattgatatctaattatctcactagcatgataaaagttctattattttctctattgaattgtttgatgcccttctcaaaaatctattgaccataaatattgagtattttttctttaatttttcatttatttatatgcctattcttataccaataccacaatcctgatttctatagcttctgtagaaagtttctaaatcagatagtgtaacttttccaattttcttcttccttttcaaaatcttttggcttttctgggttctttctctccacatagaatcatcttgttgatttctcaaaaaaaaatctgctgtcattttgataaggattttattacatttatttttcacaattactatcttggcatttttattttccaatctatgaacataaactgtctcttacttcatttagtccttcttcaatactcgcagcaacgtttcttagttcttataatgcaagtttccattctttggttaaatgcatttctaaatattttagtcttagaaactaccatacgtggaataattttttgactttacygtatgattattacttgctagtatatagaaatagttaatttttctgtattgattttgaatcttgtgcccttgccaaacttatttataaattccagtgatgtttttgttgggctctaaaattggaatattctacacacaagatcatttttgtcttcaaagaaaacattgttttttttcttctctttcaatttagatactttcagtttatttctctttttctttattgctttagttatagcgtccaatgaaatagcctctactgaaagactgattatatgtggtaaaagtcagcattccctttggtgtaccagatttttaaggaatagataagtgtatttggagaaacaagctgcactttatgtgtattttctaatatagaaatgtagaagtaattataacatgtctgtgacaatatttggagatgatattaaatggtctaaagttatcatggtatttcatattttatagatttttttggtttaaatttaagttatttgattacattgtatatattctgaagttattttgtaaagaaaatagcctagataaaatgaaccgggaaataaagtttgtattcattcatgacattttctgctagcatctttgtcttatagaaaatgacattctatacaagaacaacgaattagtgggagaaatgagagacaaaggaaagatttagtctaattgtaagttacatgaattattctttgtgagattggcaagaagtcagtttgaactaccttgctatatcttgtatatggcacatatctcctcaggaattcgatataatgggtagctttatctcatctgtattttcatggaaatcccaatatcgtatggtaaactcaattaaaacattgtttcatgtttaatatatgtgatccaattttcaagcctcacctctttataaaggaggtataaattttaaattgaaggttatataagttaagaagaaatcaagggaggcatgtaaaactatttataggtcaatcatacttccatacagggtttttttctgaaaagggatcaagggagaaggcaatttgagatgagttattgtatatacagaatgacaagccttgttaattacttattaactccttttctcaggatgaccaaaggcataactcagaacatgatagtttttcattattttctctttttgtatgcttcgtaaaacagtgtatataatttttttaaaaaaattaggactgtaaattttattttttgaaaagcaattgtaaataattttaagttattactttaaaaaacacagccttaataaaatggcatttccattttagaagcattattgacattttsatgtaaagcagasacctttaatgagctctcaatcaaaggaaatacttcagtaaygatacatgaattaatcgatcctgatcaaataaatctactccagtccattttgatttcactttatgagtagctgctcaggtcaaaagagtaacaactttataagttactrcttatagcatttcacttgactaagtatttgtatctaactaattggacaagagaatatttgagaagatttcatactttattatagtgtagaattccaaagagaaggaacataccaggcaaacaatgtaaattgacaatccaaaataagccatgcaacaatactcaaaagtgtattttgtttcatggacctgttggagaaagtagaaaatcactaaaaaattatgatattaacactatgtcaaataatcagaatttgaaagtaatcaagtttagttttgagagcattatcatttctttagatgtggtcaaattattcatattccttaggtaagggatttataactattgctccaatacatttttcatgtagagtgatatatttttcatgtagaatccatttttcattttagagttccatacctttattatgtacaaaatattattataattacttcatgatggaatcaacatgatctttatttcagggctcatattaatgtttttaatcatattaccaagaaaaaagtagttatttatttaaatagactttaaagattaaaggttactcatttttagcatcactgctcaacaaaatagttgattttcaacttttataacaaacacatgttaagccatagtttctccaaacccttctcttcttgcccatcttcaaaactccaccatttctgtatttcttcaggaaatttctacattcagcctacatcaaatgaattcttaggggaaacttctttattatytccttttctaatttaaagtagaagcttttaaaatattttaggtaaatatttttagtgtgtttcagaatcattgtaaatacttacccatatacttctcatgttacttcattattttaggaagaaaatgttgagggtttgtaaacgactccaacttgggtcccagtaattgctaatgaagttaaactacccccttgattgggtttagccactgaatcccagtgcaatagaccaaattctgaactccatcttttttgaccttccttttatctgtccgtgcccaagttatttgtcatatcacagcaattttttaaagaaatatgcaacggaattttataagaactattaaaaggcacagtggcacttctgtattttatagagaaaccatagaaattctaatttaaggtaccaattacctgtcttgcgaaagatatatcccattcatatattgctctaatgaatcatgtaatattttggttaacatatttatgctctattagcataatgtcttgatagttttttttctgttttcactccatagaatgtgtattaccatataactacttttcaattactgtccaggagtacgacaatacaaatacattttctacagattacttcataattctgctgcaagttactatgtagttcaatgactaatcaccatgttacttgcaatttttatatcttataagcccacagtttaaaagacagaaataatcagataattagtctttgattacatagtcaccctgttcttaaatgtacttaaatggtcaataattaccatgtaattacagagcaattattgtagacattcacaccaccatatgtaaggcatcgtgggtgatttcgtctctgtgtttagggattcatgactcagttatagaaaggtcactgcagtctgcatcagggcaaaaactccatgagagaatgggctaktttataaaggtgagagcagctgtcagtgcagtggaaagacctgttagatggaggttgtggtgactggcttttaagatttttgacttggcaaatgaatacaaaatatgtataaaaacagaagatccagagcttacattgactgttgaaattttatgwaattcatcaacttgtacttttcagcaagttatttttctctaaggtatttatttcactttacccaaagatgcttttttgggtactaacaaaccatttaaaattacatggtatagggttcacacactaaaaatttccatcttacttccatatagcagaagtttttagtgccagtactcggcacctccacaaaagatcatagttagcgcgttttctttttattgagttgttgcatggcaagaattgatagttttttactctgggagttaaataaaagttgctgctttagaaatcatttttctgtgattctattttcctactaaaatatgtaatttcattctacaatgttgtattttataaacattataattmtatttcattaaaaaattggaagtattcatgttaacagggaaaaatagatcttaaacccgacaaaaattatagctcttcaggataatcttatcctacacttcttttgaaccttccaaaaatgatttatatagagtcaagtatgcataaggatctggagaatattttcagttgaaatccattctaactctaatgttcttggtgtgttcttcagtataataattgcagaattgctattatgccagaaatttggatgtttattctatttttctccttttttcaccagtgaatgagaaraataatacccacagcttttgatagagctaccaaaatgaccacaaaacagaggaaagctcaatataagttttcaaatatttatctaggtttactaaacaaattactaaataaattcccaattctgttctgtatacagtggataatgccaacccatgaactgtttccaataaaagattatctgtcattggactaatgattggatacatatccttggcaaatcatttaagtaacttgctttaatgacttttcaattataggcataacacttaatagtaggcaagacctggtgacccaactggactaactatgcagttgcagagatgaaagaaagcaaccagaaatcgatgctgaaatatgacagtaaattcaaagtagtgttacaccaccattgaatataaatgctgaggatatttagcataaaatagaggttcctgaaagctaaataaatgaattaaacatattactagtaggatttgtaagcatataggtgtaaacccaattagatcttcacacaaccagatttaacatgaagatttgatggaaaatggtggccgaaataggtgaactgctaagttcacacactcacatcaatgtgtgtgtgtctgtgtgtggcgtgtgtgtaattttggtttgtatgtatggaggtttagaattcattctttctctattacgaactgcattagatgcacagatcaaaatcagtctgatgaaaatgcattgtttgatatcctatcatgtccacgattttgtaagcaacttgagtttttaaatatcagttcactatggcactctcttacatatctttacattaaccacatattattttttaaaatatttactcttaaaggtgtttttawttggaaaagctatctcttatcacaatgcctttctcaaaatcttttatttctttttatttgttgactcttcccattgtttgagctgtaatcttttggaaagtaattaaaatttaggcagatgtaatacagaactcattgctttgaaacacaggttctcagtggagttgatttcgcccccagggagatctctggcaatgttcagagacattttttattgtcacaacttgagggtgggagtgctactggtatcttatgagtacagaccagggatattgccaaacatcttgtaatgtgcaatactgtatagccccccacaacaacgaagaatccggctcagactgtccattgcagtgaggttttaaaaaacctgatttaaatgaatgagtgcacactgaattgaccttgatagtatataattaatcacatggaattccagtagaatgttcatttttttccttgaaattatttaaaccacagacaagtgaagaaaatactcttttgggaaaatatttacatgtgattgaatttgaaaaactaatgttacataaaatataatatagaaattagtttgyttagctttttgagaatgtgcacatatttttcagcatatgtaaaatgtcatactaaatcattactgacttaaaaattttaagccttccatttccaatgctatatttcttcaaatattgttccttcacaatttaactttgtgggtccaatgtaatgatgacaacgcattaataagtactggaaaatattttgaatttctagttacccgaacaaataataaaaaagaccaaaacaaaatttttctattacacaaataaaacttttactttttctacttttttttattgtcaatgtaactggcatcatatcttgactacttgtcaagtatttaattgtcagtaactggatcatcatatcttgactactgtcaacagtgttatgtctctaatttaaaggtcattagagcaagttacttaagtgacctgctaaggacatgtacccaatcattagtctaacaagagagaatcccttgttgggcagaatgattctttccttgctgcttagtggggacaacttgataacactcttttcaagatggtataaatatgacaaaagagtataatttccagaacagtcattcttgtttccagaaaagtctaactcaaactaagaatatttcatttttaatctgcaactaaggtcacatatgcatctttcagcttccctgggacaaatgaagatgaagtttgggatcatgcacaaagaagttttcaactggaatagggagagcattgttcagatcagggctacagaatggataaaagagaaaacagtgacttacttatcgtagaaatggttgttccatttgggttcatgacagggttaccaaaccagagatcataattaaaaataatttatcaaaggggttcaaagtaccaatagttcaaaaaaaaatcccaaactttttattatggaagccttcaatgatgccacaagatggagagaaatctaggatgactacatgtactcatcacacagcttcaatcatgatcaacagtgtgtcaattttattcttcccaccccaagtttttatatatattgcagaaattaggccatttttcctacaaatattttagtgtgtatgtatttcagtgatggggctttttattcattatacatgatatatgaccatctttcatcatatctcacaaaattaacagtaattttttagtattttcgtggtcttatcaggaaagagatggcacatttaaattagaatcttttttttttttttttgagacagagtcttcactctgtcatccatgctggagtgcagtggtgcgatctccactcactgcaacttctgcctcccaggctcaagagattctaccgcctcagcctcccgaatggctgggactacaggcacataccaccatgcccagctgacttttctatttttagtagggacagggttttgtcatattgttcaggctggtctcaaactcctgacctcaggtgctccacccgccttggcctcccaaagtcctgggattacaggcatgagccactgcgcctggcctgaattaggattatttaaagaatagtttaaygaacagactatgtctcaaggtgtaagcagggtttgaagatagcccaagagacgggggatagttcagtagcctggcaagtatctaggaaaaggtattcttctaccactctattgatctgaagcaaggaatggtagcagttacctaatcccggagagagaaagaagctgaaaccaattccttatgaatactcttttccaggagcagtagatttttttttcaaatttaaactcttggtatatcatctaagaaatttttagaatatgaaatatgtcttatattctgaatataacacaataaatataaaatacaaacattagacaatgagtttctcagtattcgttaaatatatgttaaacaaacatttctaaaacatcagttggagaagatccaaaattatcagctgatttgatatgcccgtgtgtctcgatccagagctgggaaatgcacagcaatgagcagtattagcactggtctataggtcagattggtgttctctatatagcataaccatttagtcattgcagaaacataacactgtaacccctcaataagatgactagggtttagcaaagagagagtaaataacattaaatcacatagctattaagtaatagagttaggattcaaacactgatatgtctgactctaaaacttaagctctttctactacaacacacaatgttccccatgaaacatattcagcagcaatttgattccatatacctcattattgtttacagataatattatatttataatagaatacattgtattatatacgtttgtattatataacaatttccaaacaagataatatatgactattttattgatattattcagattatgttacaatataaaagcatttatgttttatgtgtggccttgattggagtataattttagcacaaatatcctgagatcctgagcttactgtatggaagactatactgtaggctgttgactgaactataagaaggaaacagttcttcaatgtagagcactgacctatttttcagccarttaagaaggctgcacctgagggagcatgcatggctatggctcataccagctattggaaataatgtagtcatttcattttgaaacagckttcatgaacaaggaaaaggtagtctcttttcakaggtggtctccatgatgccttcttcaaaggagatggtgtcaaaataaagtggtttttagataaattatgactgccgagaaaagttttcacttttaaatatgctttcaaagagaagtcattatttaggaaggaaatctacttaaaaccatagtttaaaaatatatctaacatccatttaatcttggttcacagcttcctgttattaatatttaccttttattttataaccaacagctatgaactgtgaagtatacttttgaatcctctggcctcagaaaatatcaggccatagataatatgggactgttaatcaaaaagttgggtttacattcaacttggtcattaacttttagtgaaaaactaggccaattccgtatgctttcttgtctcagttcttttatctgtataagaataccatatatttctctatctaaacttttgttatttttaaataattttgtataaatcaagcagtcgaaagtcaatggaaggcatgacaaagtgagaagctgacaaattctttccccaaaaaactgtaaagctggacaaacttgtcaaaaacaagtaattctttgctccagaattcaaccaaaggcataaaaccaactaagtgtttatgaataaaatgcatgaacttcagttgtaagaccatggcattttttcctgggcatgctcccatccaccccctttccagttgtgtcaatatggtagttcaaccaggacagggcagggcttgctgccactgccgaaagggctcgtttgatttggagtatcaccagtttaagtggccatctcagttgcaagagaacaggaagkgtggcaatttcgttagtatgagtgtgcacatttatatggtgcattcagtgcatcagtggactagccaaggatttgacagacatttttgggaggttggrcagtcaaagatggcttgataaacgccgcatatatctcaggttgactggagtttatgtgcatgaacaacagagaacacaacaggcccaagctacccacacctcctgggcctttaaagcctatctatgcatgtgcgacaaagatgtcagaaagccttatgtaaagtaaaagcctggaaaaacttcaaatgtaatctaaaatgtaaatgttctgtttaggccacatatatatctatcagcaaaaaatgaaacacttaataaccaaggtggtaagcacaactctgaccaatctttgggtgaacrctaagctatgtgtaacagcaacacactaccacacccttaggaygcaaagcttaaaaataaagaataagaaaaagcaaaagtagaagaggtctgcattgcaggtcatacacagtgaaaaggcagacttcacagatttagtccaggcaaaattacaaaataaataacaagccaaaaaaaatatacatcttaagaagagaaagtaaaaatcaagagttgttatgttgcataaaaagttcaatattcaacagaaaattatgagatatgcaaagaaataagaacgtgtgactcatactgaggaacaaaagcagtcagtataaatagtttctgaattttcccagatgttaaaacatagatgttgttatcaaaacagtcattataaatgtgttttaaaaataaaaattgttcaaagaattaaagggatccatgaaaataactcactgaagagataatttcaaaaaagatataacaattactttaaattaaacaactgggaattatggaaatgaaaaagtacaataacggaaaaatataaaaattcactagagtggctcaacagcaggtctgcggtgtcagaaaaaaagaatataatgtttgaaagtttctcaaacttgatgtaatacattaatctacagcactctaaaatcaaccaaccacaaataagataaatatcaagtgatctgcaccaggatacgctgagtcaaactgtggaaagacaaagagaaagtgaaaatggctagccagttattccagcaccattttttgaatagtgagttgtttctctattgcttgtttttgtcaatttttgtaaaggtcaaatggttgtaggtgtgcagccttacttctgggctctctattctgttccattggtctatgcttctatttttgtaccagtacattgttttaatgtgcatttggcaaatgttgttaaacgaaaatattacatacaacacacagagtttgaaggcagcaacataaaaataactctttacatacaggtaaaggacaatacaaaaaaattcctgacatctaatcagaaacaacaaaggccaaaagatagtggaataacatattcaaagggctgaaagaaaaaacccctctcatataggaatagtatgttcagcaatattatggtctaatgatgatgaaattggatgaacataatagtgtggtcatcaatagaatcatttaataatgaagatctctgaggacagaccttcccagattaaaaaatgacaaatattccattgctggcatttatcgacttctattaaacaccctaccaaatsaatgcagaacgcacattctgttcaagcacttgtggaacattttctattagaaaccatttactgtttcacaaaacaagtctcaatgaatataaaaagattgacatcatactaggtgttgctctgaccatgacaaaattttattaaaaattcacaacagaaaaaaatctgggaaaacaacaaagagtaaaaattaaataaatatactttgaatctctcatggatcaaaaaaaaccacaaagaagaataaaacatatttttacctgaatgaaaatttaactctaacatacaaaactttatgcaaggtagctaaagcagggtttagaggaacatttatagatgtaaatgcctgtagtagaagagaaaaaaaggccttagtaacctaagtttataccttaaaaatcataaaaagaaaagcaaactaaatctaaagcagaaggaagaaaataataaacattagaacacaaatcaatgaaatataaagttgaaaaattgtagagaaaatgaatgaaaccaaagactagtttttttataagataagaaaaccgacaaaatccagttaggctgcctcctgcaaaaaaaaaaaaaaaaaaaaataggaaaaaagataaaagtcaataatactaataagttctaaaactataacacttctggaaaaaatatgtggaaatcttttgtgtctttgggttaggcggggtgtctttagacattatattgaaagacccataaataaaaaataagataaattggaatctgataaaattaaaactatttgttctttaaaagataccattaagaaaatggaaagataagccagagtggaaaaatatttgtaaatcatatatctgataaaggacttgaacccagattatataaatatctctctccaataataataatgagaaacaatccaatttaaaaagtagactaattacttaaayagacatttcacaaaagattttttataaatgctaataagaaaatgaagatgtgatcaacattattaataattaaagaaatgcaaattaaaattacaaagatatatcactacatgcccactgagaaggctgtaatcaaaaaaccatacagtacccagtgttggtgagtatgtccaatacctggaacctccactagtttccagtagataaaatgaaacaactactttagcagtttggaagtttcttaagaagttaattctacacctagaaatatacctcccaaaaatgamaatttatgctcatggaaatagttgtatgtaatattcatatcracattattctttatagccaaaaactgggaaaattcataagcccataaactggtgaatggacaaacaaaatgcrgyttacctgtaaaatttagtttgcagttaaaagaaacaaaatattgctatgtgctataacatggtagaacctcacaagcatcatagtaagtgaaggaagctggatggaaagattgcatgtatgttccatttatgtaaaacaaagcagaacaaacccatttatacagaaaaaaatttatatcagaggttgcctgaggctggtggtcagaggagagattgattgcaaacagatttggaaaaaaaattgtagctctgaattttagctctaaaatggaattttggtatagttacacaactctataaaatatttaccaaaaaatattgaattgtgtattttcaatgagtgaattttatgatacatacattaacatcaataaaattgtttaaaaagttaatagtggctcataatttattccttttatttaaatgaaaaaactccatgtgtagggtttttcaaattatgaccaaagtgggtcagtgattctcaaagtatggcccctggaacagcagcatcacaatcacctgggaacttggaaatggaaattctctgaccctatcccatacctactgaatccaaatgtcaaggaaaggacccaaagaatctgtattttaacaagctctgggtgattgtggtatgtgctaaaattgaagagccacattcctataaattcctatagtaatagaattctctctgttcttgggaacaattcttatctcctgagtccccaggagccaaatgccctgggtgatggaggtatatgctaaaatttaagagccacattcctataaattcctatagtagtagaattctctcttttctggggaacaactcttatctcctgagtcctcagaagccaaaaacttattttttaatgtgagattggcaaatatttttaaatagaagtattatatattacacacaaagttttaaagttcacgtatctcttaaagaatcacaagatgtggcagtactcctctcatcttttttttttaacttttaggttcaggggtacatgggcaggtttgctatataggtaaattatgtgttgtgtgtcatgggggtttgatatacagattattttgctacccaggtaataagcacagtacccaataggtagttttgcgatccttaccctcctcttaatcttcaccctcaaagagwtcccagtgtctgttattcttttctctgtgttcatacgtacttgatgtttagtcccacttataagtgaaaacaagcattattttgttttctggtcatgtgttagtttgctgaggataatggcctctagttccatccatgctgctgcaaaggacataatcccattcttttttatggctgcatagtattccatagtgtatatgtaccacattttgtttacccagactaccactgataggcatttaggttgattccatgtctttgctattgtgaatagtgctgtaatgaacatatgcgtgcatgtgtctttatggcagaattattaatatccctttgggcgtataccccagaatgggattgctgggtcaagtgataattctgctttaagttcttttagaaattgccaaactgctttccacaatggctgaactcatttacattcccacctgcagtgtataagtgttcccttttctccacaacctcgccagcatctgttacttttttttactttttaatgatagccattctgactggtatgggatggtatctcattgtgattttgattttcatttctttaatgattattgattttgggccttttttatatgcttgttggctgtgtgtatgtcttcttttgcagtgtccattcatgttttttgcccactttttaatgaggtgttttgttttttccttgtaaatttgtttaaatttctggtagattctggaaattagacttttttcagatgcatagtttacaaaagctttttccaatctgtaggttgttactctattgatagtttcttttgctgtgcagaagctctttagtttgattaggtcccatttgttaatttttgggttttttttttctttttgcaattgcttgtggtgtcttcgttgtgaaatctttgccaaatcttatgtccagaatggtattccctaggctgtcttccatggtttttatagttttaggttttgcatttaagtctttaatctatcttgagttgatttttgtatgtggtataaggaaagggtccagtttcgatcttctgcatatggctagtcagttattccagcaccatttattgaatggggaattctttccctatcgcttgtttttgtcagctttgttgaagatcagacggttgtaggtgcatggccttatttctgagatctctattttcattccatttctatatgtgttcgtttttgtagcagtaccatgcggattgggttactgtggctttgtagaatagtttaaagttgggtaatgtgacacctccagctttgttccttttgcttaggatcaacttgactattaaggttcttttttggttctgtatgaatttaaaaatttttttttctaattccatgaagaattcatagttagtttgataggaatagtattgaatctgtaagttgctttgggcagtatggccatctgaacaatattgwctcttcctgtccatgagcatggatgtgttatctctgatttctttgagcagtattgtgtgatttccattgcatagtctctgcctaaaagctccttgatctgatatactacttcggctaagtttcaggatacaaaatcaatgtataaaaattagtagcattcccatacaccaacaacgttcaagctgaagccaaatcaagaatgcaatcccattcataatggccacaaaaagaataaaatgcctagaaatataacttccctcacatctttcttgcatggcagtgttgaactgaagcagggcaccagatttcccttgagagaggatgggctcttcttcagtgtgcctctgaaccacacagctttcttcactcatctttactatgtgaatggcttattccagatcagatcttcaacttaattccaaattatgaatgcaaattacagattttggaaagtacattgaacccttcaactaggcaagaaagtattaacagtattgttacaaatggcactgggagagagtggatatttgatttttatagacatattttttgtctttgttcaatgactttgtttaaatatgtacttctttaaagtttacttttttgtttcatttgctgagaattccaacaacatattactcataactagagtaatacattgtttagtttacttgagatatgaaaaattgtttttctttaaaaatatggctgagcacagtggctcatgcctgtaatcctagcactttgggaggccaaggtgggcagattgcttgagctcaggagtatgagaccagcctgggcaacatggcaaaaccccatccccccaaaaataaacaaattagccaggtggtggtggtggtacatacctgtagttccagctactgaagaggctgaggcaggaggatcgcttgagcttaggaggtcaaggctgcagagagtcatgagcttgccactgcactccagcctaggcaacagagcaagacctttctctcaaaaaataaataaaatctaactcttctaaagtagcaatttggaatgagaagtcctcttatagttctgtaataactacattatttacgtataatccaagtagttttaagaaaaatagtcaaggtgattattcaaataatttagtgatgaaggttstatttctagatgacaaagacagaaggttgagtttgtcagattacaacagtgctgaataaatactttggtattgaacacttaaaatgtgaaatttattgattttttcttttccttgatttatacatttttggatgaggtgcctaaatctctttttgaaatctgttgatrtccaactttagtaggcaaatgaaaacgtagtttaatatattttaattattaaacatgttagattgtttgattcagtttctgacttatttgtaacagcagggaaaaagtgtttggtctgccagtcaaggacatcagagttacaatccatctcaatgcaaacaacttttttccttattatgagatctcaaatacagttatcactgatttcatgttttcctggcaaataatcacagaatctgccataatccatttcctcagagatattgtgtaatttttctacaattgctaatttaggaaaaataatgaaataatatattgatgtcataatgtgtttctactttttatttttatttgattttgatatttgttaatcaactctttctaaccctctaaacctaacaattgttagttaagaaatatgcattattcagagaaygtctcagctctgagttggagatcttgaggccactaacccttagtttccttttcttttatttgttatttgtttttgtttttgttttgagacaggttctcactctgtcatgcaggctcactatagccttgacctcctgggttcaagtgatcctcccacctcaggctcctgagtaactaggactgyggactaccactggccaatttctttttttccctagagttgtggtctccctatgttgctcaggctgatcttaaactcctgggctcaagcartcctcctgtctcagcctcccaatgtgttgagattacaggtgtgagccactgtacctggcctcctttttttaaaatgggacactaatggcatctttctcataaggttgttgaaacaattaattgagaacattcattttattactatatttgatacaagataaaaataaaaatatctgtatttgatacaaataagatctcaatatatgtgattctgatgagcatctgtcttaataacagaaatatttaattccatgctggttttataattaagttacccatccatattaaattatatattcaaatctgtcaataaacaattatttgcagttacaataaaattctattgggtgcaagtaaaagtaaaagctgaaaatatctacatattgtccaaataatgcaactgattattctagagttctacttgtaagtagctttgaggaaagtcaagttaatatcctatttttcaaaagattatttcaaggtggaaaaatgatcctcatatatatgctttcattgtcaattctgaactaaatgtttaattttgaagacagcagtctattcaactttttatgtattttggggggaaatgtatcatcatggttcaacaagaaaatcaaatatttttaaaaatttatatcacaatttagaaagagattataaaaataatttcattggatagaactataaaagccttgtgatttaagtggtacccaaaatcaaatcagttctcaagttaattagtagggtttccattggcattttatagatgtttaacatttatcatttatcttatggattttaagattttaatttacattgataaaaaaagtaacatgttaaaaaagaatcagattgcttttgtggtaattaaatgctagaaatgtcagtagaccaaaagcaataccagcaaattttggtataaaataaaaggtagaacattttaactagttagtaactagtagaacattacaactagataaaacayttttatatttagaaaacaatccatatgctcattattttaatttaattctacactttttaactttctgctttaactaaacattattctacatcctagggagtatacaaagatgaacaacatatagttcctacatataaagacattcacaatctagtaataaaatattgttttatttatattttagtgtaaaatttgacactgctcttgtttaaaaatgaccttcaactatagtgcccaaaatgcaatagatgtattaaaaaattttgttttaataaaatcattctgttgacatagtatgaaaatataggtaataattatctgagtgctaattgctcccagaatgagactgtttgactgtcttaaagttgaatgaataaactctcaaaggtattatgtgattgagctcacataactaagtcattttaatttgatgagaaagtgcaaaatacacaacaaatttacactcagaaaaggcaagttargctgtttacataaatatgatagcttaaaataggcacagccatctactgtgtcccatatggattaaaaaaagagaacttttagctttattcttaattatatgtaatacacctgaatatggtcaaacctacttaatacatgtagaagatagaataataaagtatgggttctgtcttaatcactcttctcttttaaatattaaaaggctgttattaatagcacttttataatggatgtcattttctaccttgaatgaaaacctcatctcctttcacgtattcattacagaaattatataatcttttcaattctgaaccttgtaccaaggaggaattttcttttggctacatgccatatcttctttgtatctgccccagttcttgacatgtagtaaattttcaacaattacttggtgaatgaataaatgaccacatgattgaaggaaggaaggaatatagaagagagtaaaatgaatgatcataaagcaaaacctcctcgtttagttcaaataagctctttcaggttttggtgtgtaaactttgtctgagggagattttataatttctggtgtttcaaaacctgtataataataagctgtgttataattgagttctataatatataagggacagggagccttctaatcacatttagtagagaaaaaaaggtgttaaaatttttatatgtacaccttaattataatttgagaaaaccatacactaccatactagtttctttgttttctcaatggctggaagtcagattctaaaacctgagacgtctataggaatgatttaagaaaaattaaaaaagaaaataaaagactgagttgtcaggaagagattatagaaagagcattccagcaagctaatgacattttaatctatctgatgtacaagttgaactttaagagtaaggctatctcttaacatgttaatatactacaagaaaaacatagttctgatagagaaaattctactctttggatagtcattgattatgtataacttattaaaatccttcttggtaatcaaatgaaacccaataattccatcttgtaaagaaggtaaaaataacgtggatttctcaaacatcagcttctatgattgtgtttcatgttttgcaaacataagtatgctggtgttgttctgaagtacaagcatacctcattttattgtgctctgctttattgcactttacagacactgtgctttttataaattgaaggtctatggcaaccctattttgagcaaatctatcagcaccatttttttaaatgcatgtgatcactttatgttttctgtcactttttggtaattcttgcaatatttcaaatattttcattattatatctgctttggtgatttgtgataagtaatctttgatgttactgttgtcattgtttgggaataccacaaatgcacccataaaagagagtgaacctcatcaattctgcattctgacttcttcgctgactgctgatggagaagctgcagccattcctctgtttcgccttcttctcgggcctccctgttccctgagacacaatattgaaattaggctattaataaccctaccrtggcctctaagtattcaagtgaaaggaagagttgcatatctgtcactttctatcaaaagctaaaaatgattaagctgagtgaggaaggcattttgaaagccaagagatactgaaagctaagccrcttgagccaaacagttattcaagttgtgaatgaaaaggaaatgttcttgaaaggaattaaaagggttactcccatgaactatgaagtgaaagtgaaacagccttattactgatatggagcaagttttagtggtctggacagaagatcaaactagctacatttccttaagtcaaatcctaattcagagcaagaccctaactctcttcagttctatgaaggctaagagaggtgaggaagctgcagaagaaaagttggaagctagcataggttggttcttgagttttaaggaaagaagccatctccagagctttaaagtacaaggtgacacagcaagcaagtgctgacagagaagctgcagcaagttatccagaagatttggcgatttagctaaattgatgaaggtgtacactaagcaacagattttcaatgtagacaaaacagacttttactgaagaagatgctatctaggactttcatggctagagaaaagaggccagtacatggcttcaaagcttcaaaggactggctgacttttgttaggagctaatgcagttggtgactttaagatgaagccagtgctcattgaccattctgaagatcctaggacccttaataatcatctcaaaatctactctaactgtgcaatataaatggaataacaaagccagaatagaagcacgtttgtttacagcattgtttactgaatattttcatcctactgttgagacctactgctcagaaaataagattcctttcaaaatattatgattcatttgcaatgtacctagttacccaagagctctgatggaggtatacaaggagattaatgtttttatgcctgctaacacaacattcattctgcaagccatggatcaaggagtaattttactttcacatcttattatttaagaaatacattttgtaaggctatagctgtcatagatagtgattyatcaaatggacctgggaaaagtacacctttctggaaaggatttgccattctagatgctattaaggacatttatgattcttgggaggaggtcaaaatactgacagtaacaggagtttgtaagaagttgatgccaaccctcatgtatgactctgaggggctcaagacttcagtggaggaagtaactgcatacgtggtagaaatagcaagaataagaaatggagcctgaagatgtgactgaataactgcaatgtcatgaaaaaatgaatgaatggggagttggttcttatggatgagccaaaaaaagtggtttcttgggatggaatgcactcctagtaaagatactgtgaacattgttgaaatgmcaacaaaggatgtagactattacgaaaacttagttggtaaagcagcagcaagatttaagaagactgaccccagttttgaaagatctcctgtggataaaatgctatcacacagcatcaaatgctgcagagaaatcatttttgaaaggaggtggcaatggatgtggcaaacttgattgttgtcttactttaagaaattgccacagccaccccagccttcagcaaccaccaccctgattggtcaacagcctcagcattgagacaagatccccgcctcagcctcccgagtagctgggactacaggcgcccgccgccacgccgggctaattttttctatttttgagtagagacggggtttcaccgtgtcagccaggatggtctccatctcctgacctcatgaccagcccgcctcggcctcccaatgtgcggggattataggcgagccaccatgcctggccaagtgattataacttttatttgcagtgggaaatagaaaattttgtgtgactcactttcytactggatttgttggggaaaccagccccacaccacccagcaggtaccccgagtctggcggagacaaaggagttagaaagagacagaataagcttttaaaaggcgggtccaggggaccagagcgtcggaggcttgctcacggcccagagctctcgggctctgcccgatttattggtttataagccctttgttcttagggcagatgagagggggaggaaccgatgaggaaaaggattaatatgtgaaggagaactcstgagtcattcaataagatgtatagcagtggcggtttctgtgaatttccttgagcaaaggcatgtgtctaaactacttaagatctttaacttatcaggactgaaatgggtgggagtgggtttcaggaggagccaagatgtttgattatactccactgcttcarggkagtgttatctccctgagcaacctgtggcatgccgctgagtggttattctctccgggcataaagacatgaaggcaatagggagacttttctyttcagaggccacccatggctccccatgggtgtctcacacaggggagaccaactcaactggcaccccagaaactctctttcccacagtattagctttattgtggtgttctagaactgaaccctcaatatctctgaggtattcctatatgccttcagtgtttggtatacaagctatacctgtaggcaatagacataaattgaccaggaatcaaaacataaatggcagtatggtgtccaatcaaaagagagaccaaatgtcatgtgtactaaatgctggaatttaagtaatttctggaaatgtggcaggatgtaaagactcacttttgaaagggcaaattgttttcttcatgctagattaaaattctaaatttrtatgacattgttcataaaatactcacttgaagaatgaatgtgatgttcctacatataccttaaactgaaaatgcttatataaatgaaccaattcaattctgtaaaacgtcagaatgatagtatagtaacaaaaacactagatctggggtcaagagacatgactaaattatatgactcattgagaaacatattaaataggtcatctataccacaaattaattttcaaagtattttcaaccttacctctagaagttcagtatcaacttatctaacagatgctctccctaaaactgatttaataggaattgtccttattaaagctcaaaagtaaggtgtagagattctgggagccttttacagtagttgctaaggagcatttactgcaatgattaaacttcatcctacctatatattcaaaacctaattttattcttttctcaataaaatgttttccttctaaaatcaacaccttcaggagatacaatagcttaacctaagtggcaataatttgagacatttcaggcaaactgccaaaacagcagaaaatggattatttaaatgaatgagccttttaaagatcttcaaatcaggtactattcattttatgcgttcacagatccagtcctgataatgaagtttactagtttataaaacacaataaatttttttgatcaagcaggcagaagaggtcaaggaagaatatttaatagagccacaatttgagccctactgtgctaacagtatttagtctcagtgtatagtgtcttaatatttttcttgtgttttaattatatagtttatataaataaagacaagatgcacgtttctcctttattcataactaatataggtagaaataattgtttaaatatgccgcctgattgtctattgagaagtcatctgggtaaagacgaaagactaaacaccaacctttgttgaatcattgccttgttgttacccacagtagccaaaagtagatttaaaatattttaaataattgatctaactcagtgctagattattgttgacaaatctgtgtctctgtaagtatgtactataagcttaggatggacaagtgtttggacctgcatttctgggaattttgccatcagtacccacagttgactcacrtgtttttttggctctttcccctcctgccatctgcatgtttggcattgtgcctacttgcaagttggtcagacctgtgccaacatagtggaatttcgatagatagtacatagaatgctgcaagacgtagcatactaatgaggaaagcctgcttcagggggtatcacattggttcaacatatggccctccctggatacctgaaaagaaagggtgaaagaagaaatggaaatcacagatacctcctaacagcagtaaaaaatgagaacactgtgaaattttctgtgcaaagtgtaatacaaaatgaaaatatcttcatatactttatggtttgacatatttaattattaactagtatgtgtattttccattataatgttgattagtaagagaccattgagactttcacacggcacattaaagaatttttggagcatttctgacagtatgctcaggggagttaagtatttcattaaaactggcaatatgccctatagaaaatatcagaatctaaatactaattttaatttatgatgcccagtgaataagatactagattctgaattgccataaaaagcatcaaaaaatacattgctcttaattttagatgtcattgagtgaggtttataataatatatagttgtttgagttaagcacactaggctaggttatgctgcaacaacaagcaggccttcaaatctctatggcttaacacaatagaagttattgtgttatatcttgtctatcagtcaggctgctctcttttaaataacccagacatcaggcacttgcagctagtgcctctgccatatttgtcctcacaatgtgaatacaaatttgtatgtcaccttggcatcatccagcctgcacatggaatagaaaagagggcaaaaaatggaactcttgatacataactactgtgggccagaattgatatatatgacttctacttacaatccactggccagagctaatcaatggtcaacttgctggaaaagacagcaaattacagggtatcaaggagtaccagcagccttagccatagcagagaatatcagcagtcattgttcttttttgtgtggaaaattccaaggaatgatatctctattcacccacttatagtatcctggactggcagggactctagggattccaggtatgctgccctcagaggttagtgcgtggctctccaattttccagtgccttgctgaatctatggcacatctttgttttgtgaatgaatgaatgaattcatgaaatcaaaactcttattttgcttatcaaatcaagagagattaaatgacttgcttgagttcccagagttagccaggccgtctaaatcctggtacagttctctgccagtgtacagaaactttatttgcatattgtctacctttttttaataaatgttttatagctacatagtctatttttttctctttaagaagtttaaaacatgattaagcaaaagtttttaactgtaggaattttccattttgccttacaaaaacttttacatcatatgaaggtctggacttgcactaagcttgctctgttgagtcaagacaacatcctttatgtgggtgagtttacatctattgatttgtgggaggcatgaaattttatactctaatcagaaaattttgccaaaatctttattctgagttaccaggaagagtggttagtcatcgtgtctagtgaagtgttttgttgtagtctttggccatttgcactagaaacagctggaatccacaactggattattttttgtggttcacattgtgagctagagagtatacatttaacaatgaatgccataggcctgctttgtattacttacacttgacgatattaggcagaattataaaaaaaaatctgggtatgaataaaaatgagaacattttttattacactactgacaatggaagaatgttgccctgcctttggaatccacaggaaagagacctggaaagtaagcaagtgtcctgtagatcaaggaaagggaaagagaatttacacatgaggacatggtaaagaagcaaattactggcgtttgagcgtcattcacattttgtattgctctagcattttctacttccatatcttcttgaggaaggtctgctaactttttatttttctagttcacaaagagcctaaaggtgtcatcatagtctaaggcagataattatacacacacacagtcaggaggcaattttacattggtctttggaggcaaaacatgggtagcatggatccagtgttttcaaaaccttcacaaggcagcaaagttgtgaaaggtagaagtkagtctgtaatgacaatgagtggggaagtaagtttgaatttattttttctttttctttttttttttttcgagacggagtctcactctgtctcccagactggrctgcagtggcacaatctctgctcactgcaacctctgcctcctgggctcaaccaattctctggcctcagcctcctgagtagctgggattagcatgtgtgccaacacgcccagctaatttttgtatttttagtagagatggggtttcactgtgttggycaggctagtctcaaactcctgatttcagttgatctgccagccttggcctaccaaagtggtaggattacaggtgtaagccactgcagctggccaagtttagtctattcttgaaacaagacaaaacatgttcttaagaacacaaactgcataggatatgaggacaaggaatggaacattatatctaagctctatgccttcagtgaggccaggggttaagagatagcaccgtagagctttatcaacatgaaggcttattcttcacttctgacccaacaggtgttgatttctggctcttgttcctttgaggatttggaaaagtgttagcatgttcaagagatgactatcgaattaacaaaattaccagtgactattcttatctatccaatttgcttggttaaaagaaatcatctagtatttagtggcatgttgactagtgtagatgcagtcaactcttagaaattatccagtaaaatacctataagaatatttaaaataaaaatcaacctcaagttataaactttttgtgcaaatcataccttctttttatttgttttaaagaaaaatagtactttctgattgttctttgtgttttcatatactgacaacttattgatgcctgtgactacttgcttcagaacattcattcactttgaaaattataagcagaagagtgcttaaaattttacagtgcattagtaatcaygcatctcaagcagatgaatgacattctgtgratcacaaagcaaaagctatagggaaaaaatagtcaacaagttcatttctacatgcctcttagttgtaaacctccagccactatttgtcaatactaaactttaatgagtccggataagaagctagtcaatggatatccatttagctagtgacaatctgaactccagctgattgtcctagcagctgtgtgacttcattaccattagaaaggcgcacagccaagccagctggtatccaaaccagctactccatacacagagcctctctgtttgttggtttacacatcagaattacacaaggctccatgaaaagtttggagtataaaatagaatctgcataaagatttaatttaaagggcttatcattactatgccaagtacagctagtctgttttgtttctactatgatatagtgtattgtggttgttttcagttcttccataaatgcagcctacatgcaaaatttgcatttagataccaaacataactgcacatcataatttcccagttaagaaaacatctttttggttgtgtttgttttagtgcttacacagtacattttcattttctaaggcagctttaatagaaaacagtttcaggaacttgttaatagctagtttagcttccatctgtcccctcctttctattgctaatgcttctgtgtagatcagccctctcctgatatcttctctggacttctgcaaaggttttctaactggactctgccctttagtcactcgctgccttacattactataggaaattgtcttaaatcacatccctattgtctaaagcagcattttgttgtatagtctttggccatctgcaccagaaacaattggaatcctaaagtaagtgaaatgcagattcttagcctcatctcagacccatagaataaatctcggagttaatcttatttatactatttgttgaaaaccacctttttatttctacaattttttaaaaccacttccataaaaagataagaatctattattgcctcaagggtactcccaatataattaaatgattaacattttatattaagtaaagatgagtcaaaatatagatcatgatataaatttaaaataggtaaaaaataaggtaatagaagtaattcatgcagtgttatagaagagagaaagcagtctgttcaaatgaccatctcctctttgggaaaatgtgataggcagggattgactagtcttggagatgacagacacacaaatgtggagttagtttttcaaaagagttttaagaataacgtcttaccaaactgtctaaaaacttacaaacttaaagctttattgtctctgtaagaaaaattaatatcaggtagattcagcagtagatcttacacacatgttgaaataggtaagaaacatattttttgagcaattgagcaacaaaaaatggtagaagcacaagcacgcagatattttacagaaattagattctggagaggcataaatcacaagggagaaaaacagttactggagtgaaggcagaaagtcaaagaaagagctagtcctctcaaatgttaagctgtctagtggttcttttgttgattccagttttctgtaagtaaactgatcctttaggggaagattggaaagtgttgaagatgagaggagtaggtgaatgggaaaggaatgttgaaagccagaatcctagctatgtttatttcaaaggagatagaaattgtgatgggatttgaatgatcagtgcatacagcaagagtgcttttgcagttggggtgctctgtgaagagaatagtgttatatagattacatcatatttttaaggattatgcatatagatactttatgtataatctaaatcaggcctcaatttaagtttccaatctaatgtcaaaatttgcgatctctatatttctatcaactacatttaagactccaacttgtaaacataatattttcccaccagaaaactaattattgccaaaagtacttcagaattataaatgaatcctgaaatgatagtatagttgtgtttggtttacttaagagttgtatattgtgtaacatgtgacttcaaagtgtaatggctttaaacagccattttattttactcacaattttgtagggggagaatttggaaagtgcatagctggatgtttttttctttgattcatgggcattagctctggcagctggggttggggataaaattctaaaatattttcttaactcacatgcctagtaccttggttctacctgacttctctctctccaggagaaggcttctttctcatctcaaaacatgaaggtaacagattagttggacttcttatgtgaaagctggttttttccaaaacaagctttccaagagaaacaggtgaaagcttcaatgcctagaatgtcactttcatcacattctgttagtcaagcccacatccaagacattaagataaatagacttcctctttcactggggtatgacatgtgtgaacaagtagggaaaaaaataatggcagctactattgagacaagctacartgtccaccctcttaacccaaaaatatattgcaatcccacatgcaaaatatactcaccatcttccaagaccctcaaaaacctcatcccattatggtatttgttcgaagtccagaccccattatttaaatcgggtcaggatatagatggggttcctgagtgtacttcctcaggtacagctccttgaatatagttcatcttgaaataaaaacctattaactaaagaaacaaattatctgcaccccatatatacatccaacataaaatgacataggataayggcaatagacactcccattcgaaaagtaaggaaacacaaaatacacagcastcatttgttcatagcaattatgaaatccagcagaacacgtattgccagtttcttgtttttaactcagttcagcttcctggagatgattctctgagctcttgattcttctgtttgagtcattacctcttttccagagacacatatttgtgtttttcattaagcaagtttctccacctgctgccttctcacagtaggttggaggttcaacaacctcttttcattttgtactgtttctatcacttttagccaaactataagcattcctttaaaaactttgtatgtttcttatgtattaaattataagtctgctcaatcagacaaaagccataaccatatacctcctcctgatgatatttctttaacttgagatgctactttgggacactgtccttaagaagatccctattaattgaatccgtctataaagcattctcttaagagttctagaagccttcctgggcaggcccttaaatatttttaaggttttaacaaaaatcatacagtcacaaccttgtgattcctataaccctagatcccaccatgttattggtagtacactggatttgattttttccctgaagccaattcttatcttgagaatattttttctgggagtatctcaggatgagaaatagttttatcctcaaactcatcaagcttattaatattttctgtaaattttgccttaaaactttaaattcctttattcttgtcccgtttattattatatgcagctagaatatgtctgaacacttttctacattttgcctagaaatgtttacagccgttgtcatatttatagatatcttttatatttttcatgtaaaaagaagcaagaatgttgctaaatatttcaccgctatacaacagttgtcctgtttcttctagccctcgataacacttttctcactgtccttcaaatcttcaccagtagactccataaggtcctttgagcttctatcaatcacctagtaccgaatccaatttcacacccaactaccaggcaccatgcttaaaacaccacgagactgcttacctgtaggagtaatacctgtaggtattatttactttttattttttatggttaataataatagtgaaattaaaaacatggaggtagaaagatttttaccaaatatatggaaatgctacttgaaataaacttgtactcttgattgtactattttaggaaagatgatagcaaaaaaaaaaataaagaaactttttagtttggttcattttcttatcttaaacccttactccagtactaaacatagaataagggttcaatgaataaacaaattcataataaaaaatacctatttttaaatgctgataaaggtaaaataattttatttaaaaggctgatcaataaaaataatttgaaaacactttgttcttttatcaaaaaggtgaagtttaagaaaacttatagtctggatcaatacagttaaagggcaaagatgttaataaaatttagactacgagaaaaggaggatattgttttatttttaaaagttagcatggatttacagcaaataaaatatttaaaagttttaaaatgttatggagcatataaaattagggaacataaaaatatgtaaagtattgaaaaaggccagaacgaatttgtgaatattaactccacaagggaaaataacctgtttaggttatagtagtcctggttcaacttatttgaatttctaacatttgaagttgacctgtgggaaaagaaatgtattctcttctcaaagccaatgcctaaaagaaaacgctgggatgagccacgggtctgattcactatgacagttcttatgttttttgtttccacatttggaaaatatttaatcattctttcctttatcttactacactaggctatgctttgagcaatttctgtcatttacgtttcagaagaatatttgatttctccactacttgatattaacgttagtttatgtagtataaaggttatgtactaggaatcatgagccatagctctgccaccagctcattatttgtaaatcattccatttaaggtgttgcctcagtttccttgcttgtaaaaagaattttcaaacaagatgatctgtgaggctccacctttgtgattttatgattatgataatctatcactgatctgccatgtcttccttctaacttttggtattcaagaagacttaagccagaagggagagaaatcaaaccaaaactaatctttcgggggtgatagccaataatgtttttgtggatcatgctagcaaatactcacccatatttcttttgaagaattattctgaatgagcaaaacatactgcaaaattaaccatatttttcaaatcaaatgaagacttgcttcctgccaaagttgttaagtctcagcctcaagcaataataataaatgatattaactcctagataccagcccagaacaaacttagttatctttctgggcaaaaagcagtaaaaggggcagaaaataattttaaacatatagaagtttgggactatttgctacattttactactcaagcaaccagtgcaaaatttatcatttataaaataataataataactcaaaaaccgaaccacagagttatctttttagaatgatgcccatctctaagaaacaccttttctctacctctgttcaagaatttttaattcagaggactaaacttcccaatgaaatgaaattaaaactctttaccttcatactttcaaaatccttcatgtttacacacaatgtcttttcttcatcctcaaaacccagtttccagcccatctccaagtgattcctctctcttgaccttccttaccaaatataatctatttcccttatgtgagcaattggtaaacttacygcaagtaaataaactatattgctgtataaggtaattggtaattttgacattgttattctgttggaattaatatttactcattgcaaaatacaaattagttggattctcttttccttcctaacaaaaagtgtactactactactggatacattatagcatgctttgacagaatgctgtaaacttcaaggcaaaaaaatcaactaaattagcaattccccaaaattaccttcaattgactttaattctgatgattaatcataaaatcgaaaaggatgcctgcattttaattcagaacactttagttctactcctgttcagcattaacatttagacaggttattttattctctgaatctctggtcttgactttctacagatcactcaagtttttaaaatttgatgactttttacctattccattttccttttaaatttgtatcattatgattgtataatactttgtgttaattaagttgactgtattaatgtatccttagcagagcaattttaaaaatggagcacttgtttgtgaatatattttaatgagatttaaacagatttgagcaaggtaagcatcttcaacaaatcaamaaatgctattaaggagaatgtgtaaggtggcaaatttgcttcactaggacaattattgtttgctttaaaagattgttttcacaaattaagcagaaatagatataaattacatacctttttaagtgaaaaatatttctatacttaaaactctcagatacaataaagcatggatattccccatgtattataacagttaagaatctaactcaaaaatggaacataatccataaataagaatatattaaatgcatctttgtgtcaataaagttaaatgtacaacaaaacgtatgctttgagtgctagaaaatgagctgtccttccatgagtgtcacttggttatataaaggaatttttttcaatattcagtgggtattgtggaaataagataacaagccatctcctagaacagaaggaagcaattgagctgtgttcaaataccagctgaacccacctattggttttgcagtattgcacaaattatctagcattgctgaatgtcagtttgttcactctctgcataataacatacaacattcaataacttagtgaattattgttatttggggtgatgcagcaaagttcgaattcttgtctgctagctccaggccatttggtgctctggattatgcagcagaggctatttatggtcatttatgcctggctgaaagcacactgaggaatatagggacatgattgtttaataccattaggagagcctaggaacatagagctaaggaaggcatcttatgatatggggggatggacttcatagttctttgtaaagtcatcccaaaagtataacacagtctcaatatagagggctactgtagaaaccaaagatgttcacttttctttttttaaaacatttcttatgttttattttaaaatttttattttaatctctttagaagtacaagtagtttttcgttatgtgggtgaattgtacagtggtgaagtctaggattttagtgcacccatcaccctaatagtttacatcatatgcaayaggcattttttcattccttttccccctttctttctccccgcttctgagtctccaatgtccaatatactactctgtatgcctttgtgtacccatagcttacctcccacttataaataagaacatgcgtatttggtttttgatttctgagttacttcacttagaatagtggcctgcagttccatccaagttgctgcaaaagacattatttcatttgtttatggctgagtagtattccattgtatatattataccacattttaaagatgtgcacttttcttaccacttccccacctccttcaatatagaccttgaagcaccctcacataatttttagaaatatatccttattagctgtagtgactttggataccttacctagaaataggactacataatcactgacataattttttagtcatcaaattattataaatatctgaagcagctttatttatcctctgttttcatctttgtagcaaaagttattgcttctgttttcaaaaactttagaataatgtttctgcctctttgtcactgatgcatttccaataagtttcaaagaaaaatgagtagttaagggaagaagagatttacaaatattatttgcctaacagaagttctatgttttatttaatttttgtcttttcagaacctagcacagtgtttggcatacaataggtgctcaataaatattctgaaaatgactttgcaggttattttgatgaaaatgttgcttttgtgcaaaatattatattgtacccttataccactcatttttgcttgatcattctgatatgaataaaagaacccaaaaggcaccatttttgtaaagcatagccatttgtaactgagaaacaaatacccatccatctatcttaccaccttttaaacttttatatttttaatatgccactgaggtttatcttcataaaaacccaagaacaaattgcttcaggcaattattataagtttgaccatatgggcattacttctacaatctacatttgaaattcaaaaacaaatcttatgcacatgtttgatgaaacatgaactatttatttgttaaaggtaaggcaaaagaaaaagctacttccgtaaattttttaaaaatgcaagtcagtatgttaattattaatttgaatgtctacaataatgggtacctctgatatttaaggaagtcattattccactgtgtagtcaaaaagtatattgattagaattaattcactacaagaagcctccaataatttttaacataagtttttcctctttaacagtagcctgaagcttstctcttttttttgtgtggtcaatttagcaacaaatttscaattaatcatttactgattgcaatgaatgttctgtcaataatacgcaactcacattgctaaaagggttatactaagctttattgttttcgttttgtcttgggaatctttgtctagctaggcttcctagaatggattttgaatagttgttttgaagtaaaccatgccagttttaaagagacactacaggcagctctgagggtattaatcaagatatgccctaactttcttttggcattacaatatttggacatctgttctgactccttatatgtgaaataaaactcataccagatagtagaataaatgaagggtttcattatcttaaatgtcataacatttgtttgaattatcatgtgtagattttaaatgctgaaattgtcatcttggttttgtttcgtctattttgctgtcctttcaaaagactataagcctgaaaacttcttttttcaattgcattaataatttaaaaagaaataatttacaattttgtgtaataacagtgaaattgttgtgcaggggctatatagtctggtaatttctaaaagcataaatattttactgagaaacatacccttttaaagcacaaaaggtttcttgttataatggcagtgtatttagtgacaaataatgcattttaaaagagccatttgttgaccattattctctttgtgcaatagtattatagattcttatgtgttcacttattaaagtattttccattgtgtgtatcaggaaggatttgtctctgaattcagtggtgccactgattagtggggactacatctagagaatcatgggtcaacttgaaatacaataggaatatatttgtacttttcatttaagcaacagaaaataaataatttgattctgctggatatcaacaatactatcaaatttagcctattaaacctttgtctttcttgaagacatttaaaaaatagtattactaatcttgtgaagatagtttactgttttatcatgaagccatataacatgcagatccacgtggattgtatatattagtaggactagatactggtcaagtgtatgtatttttttaaatttcacgttagagtgaaacaaagacatacaatttgaaatacataaaatgatttaactaaatcatggaagcaaagcagtgttttacaaatgtgtaattttgaatacctttaaaaagtcataggcgctttcaaccttctactcactttgcatatttgatgtcagagaatgagtgatgtttttgcctggcaaaacattgcaatacaaggtgtcccataatattttgtttgtgagactaatttaaggtggttatcattcttaataagtgaatgccatattaagccataagtgtggttaacccataaatactgcttatttgaaaagatgaaaaatggtaggctaaatttgtattcttatatttgcaaagactgctttttatttcttttggtgggtagggtcacaaattaagattagcacaatacagaaaaaagtgtcccgtttgaatcactaagtgtagattgtctcaagatgcttatacattttgttaggcatctaaaatctcattttataaaattctaaaattaaaatactatatgaatataaaagataaaatgctagataagaaatgaactaatactaatacttgactactaagttaatatcatagaaaatatactcttttaaggaatacttccataagacaatatattttgattatgtactttcctgaacaagggggcctttaaaagaatttmatatgcagagcattttcatatattttaaaccttcaaagagcttgaaacattgaagctaatacatcggtgccaaaataacgtggagcattttggccatacatgtaattatagattttatattggatatggcatatgattaacatcacatttcagtttaattgctatgatgtgtacatagrtgtgtgtgtgtgtgtgtgtgtgtgtgtgtgtgtgtgtrttgtatgataccatgatagccatggtattttatgatgacttttttatatgtgagaagtttacatgctggataagtccagaaatgtagaatgcttaatattacagtagtcccctttatctgtggttgtgctttccacggtttcagttactgcagtcaaccatagtctgaaatattaatcaaatattccagaaataaacaatttatatgttttaaattgcacactgttctagtagcatgatgaaatcttggaccgtccctggacctccccacccaggtcttgaatcatccctttgtccagggaatccacgttgaatatgctacctgccacttaggtcactcgtagcctaatgctacattcacagtgcctattcacttcactttgtctcatcctgtaagcttcatatcatcttgtttcatcccaagaagtagggtgactacagtacaagaaaatattttgggagagataaacaccacattcacgtaacttttattacagtatatgtgataattgttctattttattattagttattgktattatttactgtacctaatttctaatttaaactttatcataggtatgtacatatgtaagggaaaaccatatatatacttatatacacggttctgtactatctgcagtttcaggcatctactgagagtcttagaatgtataccctgtagataaggggaaaacatggtattagcatccattgtttcatcaagcatcaccatctcttccttttagtcttcaaatagcagagtagaacataaaactccattttcaatccatagtttattcaaataaacataattgaccacatatacttgcctaattagagaaccattttgctggaaactaacataaaactattttatcagaaatactaacactaggcaaatatgcctctgaaagtttgcatagattaagcattcaaagtagatgtattgaaaaatggttatgtctatgtaagcatacagggatagttccatgtttgcaaaatttgactatggctattactatttatgacagcctacaaacagtataattaaaatatttctttcaatccattaaagtttaacccttttttgtcatgtactttaaatgtgtaattgtattgagttgttattgctattgaatgtaagctatcaaaaggatttaaatttcttggcccttattatttttgaggtgaaccatgtcttttatttttagaggtgtttgttaaattactttatggtggcataaaggtcagacctagaaatacatcaggtctagaactgtagaaacccatcatggcgggggttcatgatttgcagaaaacagagattaaagtattacatctaatacccattaattctgtgaatccctgtaagctgtacctcactaacaaatgtgtcaattgtattttcttttcttcaaacaatccaaaatatggataattttccttgcatgaagactagacctttgtttttaggttggaaaaacatgagcaaatattttaagtgccaccaatgcaatatcttatatatgttcttttattggtatttttaaattttccctcagggctttcaactccagccatcaccccccaccctagacaatagctacctcctcactccctcaacaagatttgatccttctgcagtacataaaacctgttcacattattgttcctttctctactgcccataggaaagtcctcaatagactagttatagccctgttttggggtaataaaagcaaagattaacaggagcaatttccccttataggttttatgtctagaatttttttctagatacacaatagattttaatttttatattacattataaacaaaacacttttatctctgtaaacttttatgaattaaaaattaatcatttataaggataatgtaataggcctatattctctttcaaatactagtttagtgttatgggagttctgcagtcactttttacaatgttctttgtagcactgaggtatgagatatttttgctgagggatgttggactcaatttttctaacaagttagataaattatgagtctctcatggttttaagctattaatttactgatttgattctctttaattactatgattacaataaaggacagttaaaataatattattcttgagaacaaagaatgaggacaaatgttatttatcatttaaaaagaatcaatcaacgatattttgttttttaacatcctccaggaactaaatcgttaattaaataaaacctaccattatgttaagaatagaattatggacacaagcagcctctaaatttctgaataatatgtgttcttttaggaaatattggatgctaatggcattagcaacaataaatgatgaaataccttagagaaaagcagaagtggttcttcatgaaaattaacatcaagtgaattatccagtaatccatattgcttgacaagatgggtattagtccatttccatgctgcaaataaagacatacctgagactgggtaatttataaagaaaaagagatttaatggattcacagttccaygtgcctgggaagatctcacaatcatgacagaaggtaaaaggcacatcttacatggcagcagacaagagagagaatatgagagccaagtgaaaggagtttccccttaaaaaaccatcagatctcatgagatttattcactacatgaggacaatataggggaaaaagcccccatgattaaattatctcccatctgctccctctcataacacatgggaattatgggaactaaaattcaggatgagatttgggtggggacacagccaaaccatatcaatatggaagtagcaccatgagtcatggattgagagtttaaagactaaactcattctcacttctagggagctgcataatctctagaaagccccttaaactcagatctattctttctaaagggcaaacattagcatctctcctgtttctgcattaaaaaaaaaaaattaccacaattaatcaggtcaaaatgaataatttaccagaaaatcctttggaaatcacacagctctatataaatacaaagttttgtcattttgtctctaaagaaaaataattgagtgaaatattttgtagaaatcgccattacagaattcactgactccctaattttatgttctcacaggaatgaagcgctgaataaatgattacctttgtttcaattaggatcgtaattggctttatggaacaataacaaagttctaagtcataggcttcttttcccaggacaactggaagaagttagttcaaagccagtaggacagcttcaagttgttttaaaggactggactcctttttgtcccccttttcaactttcaggaattaaatccacatttctgtgagtaaggtggtggtratgaagggtggaatggacctctgtctagataaccatttctagttacaaaggtacccaggaaaatcagaatgtatttgtttattagctgggcacgtggctgcctagatgaaatgagatgcaaataaataaactatgctgtcactttgagatatctaattgaaattaaccaaattattaagataattgtctttcaggtataaagaaaataattatattttggaaattattcttataataaagcttgattctctttggaattcataagctaaagccttttgagatagtagactatgtaactatgtgctatttacatatagttacatatattctggtttaagttttggctaccttaacttgatttttgctgagttatgtaaaccaattaagtttcagctttttctctagaacaatatttacctcattgactcactaaggaaattaaatgggattaaaaactatataattgtactttgcactctgttcttggtgcagcatcgatactgttggcgttcttgagttaatgaatgttatagagaaccttactttcagacttttgccgtgaaagttatattatttctagttctggttccaccacactatccagctcccttctctctgtcccagtataattctcaagggaccccttagcctcaattgcaggcttatatcctcccgcgcctttgagatctattctcattcctacttgtagatagtaaacatgatttttcttctatctcatttcccctcctcctttgtgtccacttcaggctccactgctgcctgtatccctacctcttactctcccatctcatcccaagttactggtgaccactcataccgctttggtcattccccacttcagtttaatgattgcaaacgcacatgaggttttgacttggatttattttgcaaaattaagtattatgctgtcacatttcaaacccttgggtattcaaagatgataagtctttctttgcagattttcggaaattatatcaaatcactgaacacatttgcagcttttatcagattgaatgaatactgtaatgaccaatcaacctgagacatataaatgtaattgatggatacaacctttgtgccttaactgagaaagatatcttgattattgaaaataatatatatcagcaaaaacacttagggtttccagaaactaaaacagagttaaatatctaatttactgtgaaatgaacagttttaaatatattacattgacttgatttcycaattcaaaatctcaatcaaatgattatagtaaatatcttagctatataagtttatatacctgtcattgttttctaattgggaaagaggaatggaaactatgaaataaggattctattagagggagaccaaaacacactggaaccctacattattcaatagatacaggcagagtttgtgaaatattctaggcctatgatcatcttagtaaagatttttgttaagtattttcttgtcaggtgacacttagggaagtagattaattctatgttaagacacagatgatttgtttcttcagtgacatgttggattacacttttaattcagttgctgattgtatgctctktacaattttcttcattttagatttctagacctaatttttgttgtttagatttctagaaaataatttttgttgttgttgttgttgttgggttttttttgtttgtttttttttgtttttttttggagacggagtcttgctctgtcaccccgtttggatggagtgcagtggcgcagtctcggctcactgcaatctcctcctcctgagttcaagcgattctcctgcctcagcctcccgagtagctgggactacaggtgcgtgccaccacaccgagctaattttatatatatacttttttttttttttttagtggaaatggggcttcaccatgttggtctcgaactcctgacctcaggtgatctgcccgcctcagcctcccaaagtgctgggataacaggcgtgagccactgcacctggcctaaatctagagatttaaaataaacgccttgagagaaattccatctctttaatccattaaaaatgagtctggaatttgcttggtagaagaaactttgtatttaagggagcattttaatcacagaaatgatatatctgtggttatagtaagtgtatagtaagtttattctttctacaagtttgtttctgaagcttacagttaattatgtgaaaagaccattacagacgttttctggcattgctaatgctacatattgtacgcaggaaagagcaagagtgggatttataatttatattctcttcttggaagttgtctctagattctctgaggtcaatttttttcatattttgaattagtctgcccaatttcatgaactcttctgtatgaaatatttgtaacctagagaaattctcagtaagattattaaaacttaattaaaatctcttcatctggttccctagctgtagtcatgggtttctgttttggaattgagactcatagtaatcatttgtacatttgctttcaatcctgtcatattccattacaatgttcataagtttttatttacagcagatgagaaatatattttatttccaataataattgatttgtcaaaggtcatttttgccaggcacattgcctcacacctgttaattycaacacttttggaggctgaagtaggagaatcacttgaggccaggagttggagagtagcctggacaacatagcttgacctcatctctcatctctaaagaaaaaaaaaaaaaagttagtcaggcatgatagctaatgcctgtaatcccagcttactcgaggggtcaaggcaagaggatcacttgagccyaggagttcaaggctgcagtgagctattgcactgcactgcagccaatgtcaccactgcactccagccttggtgacagggagagattctgtctccaaaaaaaaaaaaaaaaaaaggaattttcttaagaactttgactttttggagtaaaatggaaatctaggcagtaggcataattaaatatttagaaatagttacaatgattaacttaaagttcacatagaaaattactaacattcacttatggtagaagtccacagagatttaatccagctccttttatgcttattggtcctattctagattcatcttggcttttttaaaaccactttactagtctaacctatgagcattatttaaggtcaattctaaatttaaaattctaaggtttcatttcttttcaacacatgaaaattaaaatcaagcaaaccggaggaaactgctagggacaggcgtgttgtttgcagcatgttagaatttaacatattagaatgttaacagtctaatgtggtggaagaggaaataagttaaaaatccagaaacgattacaaggcacaactaccactcggcagtctggagtcatttcatggaaagtgaatagccctacacactctgcccaccacggtacgtggcatgtgttacttaacaagatgactcttgccattatgaaaaggttaaaggtgatgctacgtatcaattttaataagacaaaagattaatcttttacttcagttaaattaaatctatagatttaatgaaatatttttaatctaaattgttgaagtttaaatgtaaatgtttaatgcataatgtatagtggaaaatataaaacaatttatactgatactccggtggtcaccttaattaataattgtcaatactttaccatagatttggtactggtgctttttagacttctgtgcacacacagctctccattctaccataagcattgaatctcaaggactgtggtccctgtgttctgggtgcttctgtttgcctctctagatattctctctgcccttgttcgttctgctgtctgcctgagaaatgtcctgtatagaagacagcaaagttcccttgccctctttcttctrgtggagttggccagttgagatccccacagtagatgagaggatataaagcagggttcaggttcttacgttcctggatacctyggtgaaaatgtcacctggggctggatgtcttttcctcccaaggccrttttctctatataactctttccctctgggtctggtaactagctcctcacattgtccctttggacatacgagtgttttacctaccccagtattctgcatgatcctatgtggtttcscacagactttttggtagtcatttaaaaagagtaaactttcctccaattacaatagggcacttcttcagattagaggccaccatctgtttttgatggaacaatgatgctgccccttctcccagtgtatagctactactttcccaaggggcccttcctgaatgggagggacaatgggaaaatgctgaagtaaggcaggccttatctcacagataacccaggtatcactgccctctgcaacataatcayaagagtgatatgaccatgtccaactttatggaataattattttttaaaaaaaagaatgaagtggattgtaaagtttgagattaataacttgaactggattctaattataaattttgccatcacctaatatcaaatacccaagaaattaaataattcacttggaacctgctcacgggtgcagccaccttcatacaaaggtgtccctattttttttttttttttgagatggagttttattcttgttacccaggccagagtgcaatggcgcagtcttagcccactgcaacctccgcctcctgggttcaaatgattctcctgcctcagcctcccagtagctgggattacaggtgcccactaccatgcccgggtattttttttctgtatttttagtagagatggggtttcaccatgttggccaggctggtctcaagtgatctgcctgtctcagtctcccaaagtgctgggattacaggcgtgagccaccgcacccggccaggtgtccctatttaaaatctgcttttgaattttcatgtaccattcagcaaatcctatatcctactctagggatttgctttattctaaatcccattaacttgctctcaatcatgtatttctccaagtctctaagttatttcattctagaaaaatgccctggttgttccagcagtgtaatccaaaactaagtaacagaaatctacaatgggttccatctgaagtattcacagcaggcaaaattgcagatgtgcaacataatgcatctgagttcctgtcgaatcacacacacacacacacacacacacacacacacctcatgagcattagttctaaaagacaaaaaatgcaatctagcagagtaaagtccaggtgctgctacctgtgctcgcatttagaagagcttgtatcattcctcagacactgtaacatcaactccctaaatctttgtaactcaggatagtgtgtatctccactgattgtgtgtgtgtgtgtgtgtgtgtgtgtgtgtggtgtgtgtgtgtctttcagtaattatcatttttccccataggactcagattaacagactttttacctatatatttataattacttttgccattgtaaatggtattattttctgttactttgttttaatgttgtcaattccactaattgttatatactactcctatatctgggaaactttaaactcttctcccaatttatgtggatttcagtttatttctttgaatttgctgtatataacattatatcatgtataaataatgatagcctttctttttctttatgatacatgtaacttttattgtctaattcttgatgtgttatatttctaaagaycgcacatacaatcttaaatagatactcagcagtgctatctggggtgtgttaggccattcttgcttgctgtaaagaaacacctgaggctgggtaatttctaagaaaagagatttaattggctcaaggttctgcakactgtacagcaagcatagcaccagcttaagcttctgttgaagcctgaggaagcttacaatcatggcggaaagcaaaggggcaacaggtgcctcacatggcaatagcaggagcaagaggtggggggagatgccacacactttaggaagccagatctcatgagaactcacccattgtggcaacaccaaggagacggtgctgaagcactcataagaaatctgcccccatgatctaatttcctcccacgaggccccacctccaacactgggtaccacaattcaacatgatgttcagaggggaaaacatctacactatattgtcgcgttaaaataaatccttcttttcaaaacaacaatttttacctctagagttttactgtttggttgttgtgtgtcaactttgtggagttgacatatatataggctttgctatgcctattctaatgtgctcttatgcctttttgctaagttatagattctaaactgtgtgttaaatacaaaaataatgcaaattcaaattaagaggatcaaaataaccatggattcaagaaagaattaaaatattatagaataatgtttttctcaaaaaaaaaaaaaccctacatgaacagatgaagtataagtttcccatgcctgctgtaacaaattaccacaaacctgttgacttataacaacagaaatgtattgtctcacagttcaagagatgataaatccaaatttaatatccttggackaaaatcgaggtgctcctaggtttatgctccctccagaggtgatggagaasaaaacatttcttgtggctcttggcttctggtggctttcagcattctttaagttgtggctgcaccactccaatgtctgcctttgtagtcgcatcgtctcctcctgtctaatctctgtctctctctcataaggaaattgtgaagggaattacgtcccacctggataatcttctcatcaccaaattattaatcatattttcaaaaacctttaccatcaaaggtaacatttcaaggttctagagattaggacctgatatgtttagggatcacagtcatcccactgctaactgtcctctggcccccaaagattcatgtctgtgtgcaaaatacatttacctcttcttgatatccccaaatggctcagtcctttacgtcatcaacttaagtagaaaatctgatctaaatatcttcagctccaagtctcaaagctcatcatgtaaataacctaaatcagatacagatgacacttagtatcatccatcttcaggtaaaatatctctccatttgtggacatgttaaagtagaaaacaagttatgtgctttcaaaatacagtggcaaaaaagcatagtatcacagttgtacrcattcctattcccgcaaaaagaaagtgcaatgtagagaggggtcactggttccaatcgatatcaatcatcaacttggtcacttctgtaaaaaaagttaccaggttccagttattaggwtctgatatctttttggggggcaccattgagcccactacagatgatgtaataaaaaacataatttatgaagagatagaaaaactaatatagcagagaaattaagaaaaccaaaacgttaacttctccaaaaaaaaaaatgccaggccaacatttcacagatgattaaagaacaaataattcccatgcattattaactattctgcagcataaagaagaaaaccttctggctctatttatcaacccagcactacagatatcaatatctgatacagtctgcctgggaaataatcccacttgtggctattattgtaattttctttaaaaatattaacaggtgaaaawagtgccttatatacatagtatattcaggtaatgattgtcaggagagcatagtacattcaggtaaacactatcaggagagcaaacattgttttattccagatgggaaatacagaaccacaatctcttacctaaaagctcaatctaacaaagctttgaaaacccagatttttatagtttcttagtgagaactataacctgaactaagctgctctttgtggtattacaaagtgtagtgtttctagtataactgtaattacagttagctctatctcacattgttaatttatctttccttgagttaatattcatatgtactagtgcagaaatatttatgtgaagtttaagtatagtgtgatattcctcacccttttgagtttgttagataatttatcatatatgaatgcataacccaaaaaattctgaataccaaagcaaaaatttcctcatatacttcatcttaaagattatgcaatttatttaattaaccatctcaataaaccaaaggagaaggtattatgaatctcaaaatcatgaatatttttcagtaatagtaatagctaacatttattttcttgctttctatacaccaggcacaattctagttatcttccaggtattagaacaccagatcttcaaagcaaggcaggtattattaaaattattcttattttaatataggaaaatgacaataatgaaaatctaagcaaacttttcaaagtaaaatattcagtaaaatttagagctgggtcttgaacccagtcaatttaatatacagagataaatggacacagacttcaatatgtagtccacataagaagaaatatgaatgaacaaaagcataggaaaagattgttgttattgtatacctttgacaaaactttttgaagtatacacttaaaattggcaattttcttgtttgcagtaacactccaaaaatattactggaaatctttaacaaaatattcaacaaatacagcaccgaaaaccagcttttgaaactttttagtaaattacaatttttgagaaaaagaaaagtttgcacacagggagagattggaattcattcctccaaaaacaaggaagaactaaattatttcaacaataaaaacccatatagtatgcaagattacttttaattctaaaattagattttggaataactcttgatgacactcatttctaattggctaaatttatattctattctaaaatggaaaaaaattgaaaagatatttaatgtggtgcaatggtcaaatcatcaaaaatgaacaatttactcgacaaattttagaaactatttgtgagagaaagattatttaaacagaataaaagataatattgatgacaatatttgggtacctctattttacattttataaagacaatattctcctcagcagaatttgctataggctctgggatctcaatacatatagaacattctctcaattgaaaatgttatgatccatagaaaatattcagcttttcaaattaatatcataaaatgcaaatttggagatttagggcaattttacttaaaacataaataagcctatacagaaaaaggaaaaatacatttcagaaaaatactagtgatcaagtatttgagacacatatggctaataagctgattattctatatacatatatttgcatatacttatatatgtacacgtagcaagaaaagttgctaattacatttttactgtttgaataacacaatgaggtttaaatttgttttgctttaataagattgacttattttcatttcttagatttttttaattaattaaaaataaagctatataggttaaggaaataataaaaagcaatgtaagtctttaaaaatatatttcaaaaatatgtcatttaaccatatttagcattctyatttaactttaagaaaatactggtttgtatataagatgtatgaaaatatgagctatatagaatactgttccaattgctatagagaatgatattaaatctccaccaaggtactttgaagggatgtcagtatcctcttttaaagataaggaagttgtggttctcaatgaataaataatttgtttgaagtcacaaggcttggaagtagaaagtctgaattcagagtttgtgccttctaggaagcggaagtaatgctgatttatttctgttgtctaaaaactgtaatgcattcagacagaaatggtaaaatttattttaaaatggcattttagctttttcttatttggctgtctttagagaacctttggtgtctcttgaaaaatggctgctggatagtgttgcagattttggcagtactctatcaagccctttggggttatgccaaagggacagggtcccatgtgaattggatctgaattctcatccaaatgaacacctgctgtcattgttccttatcaatcctgtagttggcaatgccagttctctttttatggtggaacctattcaacacaaggaaaagacctgctagtgtttgacactaagttttattttttcccctcttaactaaatgatccattgcccaagtatcttgaagataaataagctaatattagttctrtctttggctatgtagtcctgtgtttctaggagtttacccaattatagtctagtctacttaaatggtcttttgctgtctctcccctctcttctccctcctgtcttcttgcctctctccctttctctattctgtttatgttgctttgtaaaggaagaaatttgtcattacaaaaatatacacctgtaaaaaaaattgtactacacaatctatttttaaaagtctcagtctccccaacttagcagaaacaattcaagcagaagtaaattcaatgatactctccctatgggaagcaatattgattattcattcttagtgtttgattcatattcctttgctttgtttaactagtctgctgaatgtatgcctttaattggaaggtattccaagttgattttgtaccagattagggataaagtaaaagtaagtgcatttcaaaattaattaattgatcatgctacatataccataaatagcccagttcaggtgtttttcctgtaatctcataccacagtaagacaacttcatattataaagtataatatgtttatgacttaatagaattaaatttataaaaaggaactctgtgactagattagagagttatcgttggacgaataaaagtgaaccatcttgatatttgtacttcctagcaaaccaggaagttggccatgtatatataacaaaataacgtcttaaatattaaaccgtagagggggatttttgtaacctttattataagcattgtttctatacacctctatctatatgtctgggtgattttcattcatggattcattcaattacttgacaaattttagggtatcaaatgtttatacagaaaaaaaattacagttagctgtatcctgcaactctctgccatctgcagtgggcattggtccctctctttttgtgcttcatgctttgttatgcatgagtaagcacattagcctttcatttcattcattagacttttaatccttgattagtgttttcaagattctctcaaatacacaacttctttatttccttgagtttggttttctttttcttttatctccactttgaaacaaaattaacagtgaatgtcaacaatagcccttttctgttgagatgactggtaaatatattagttcctcatttgagtgattaatcatgtgtggttgaagaatgggaaaatatctccacacttggaataacagagataattgtttagagtcagttggagcagtccgtgcttgaaaagcttggatagcagtatttcagcagtctcacacattgagtatgatttctatctcatggaaaaattctgtatttgctaaaagtaagaaacatccattagggtcagaaccgatgcacttggggtctcagaaacaaattgtatttgtcaccaattccccaaaaataaatgtttctctttgttgttgtttttttttttctattcaacgagctatgccagaaagttgcttgtggtccaaactgttattaattacacatcaagacaacctgagcaaattctgaagtcaagtattgcacttatctttactagacatgcacactcacaccatccttttactcataattatctgaaataattaggagcctctgtactgatcatttctccacttagggcatccttctaactcttgtttaacagtattttccattactatttgacatttacactcatatgtgctatcttcaacatacgttgaacatgaggccaaagccagtcattaaaggagatatagaaattaaatagcaataaagtcttagatgtaaatgtaacaaataatcaattgtgaaattattacataaatcacttctgcatagaattacataaatcatttctgcatatggatcacacatttttgcctaattttacataatcttcttggcaataatattgtaaataaaagttcattttgaaatgttatttttttatttagtctacattttcataaaataataggatcataaaccatcctgtttttgttttctattttctccccttaggatgcctccattgcacacagattccacatcatgagagaaaaacacccagagaaattcaacagtaggtaaggtgacaaaagagatgaaattatagatatagttgctgaattttgccataaaaagatcactagatggtacagaatattttataatctactggctttatgaggctttgtgtgcgtgtgtgtgtgtgtgtgtgkaaatattaagatggtaggataaatgaattaaatttttcttaggttgtgatgaaactataatgaggaatgcaatgggtcatctctatttcattctcatgtaytataaagaaagatttcaagtaaaacatgaaattaatagttttaagacacactggaagttttcatgacgtatatgaacagcaatcaaccttgatcccaaggaaaaacacagggttctgatttgataatgctaagtgtatattacatagggattatatatctttggactatcagcttcaaattggcctaaactaaatcaaaagaaattatagtaatatcaataccaatataaattatttttagagacatttcttcaaggagaaaagacttgacgaacaaaatttctttcctcataagagcaataggcaaacattttttcttcaaaaatgtagacattgaccttcacagttactcagggaaacaggaaagccttggttccgtatcttccccatttctagaaggaaatatggctctctccacctcactcccctagaaaagtggggcagaagaagtgaattatcttttgcttcaattatactcatttccactctattcagctcacaaagctacaaaaccataactagcatttctgtatagatatttaagtgactttatctattaatattcaaagccaagggctttattgtcgctgcatttggctgacatcttgccataaatgttatagaccatttattagatacctgcacctggacattcttaaatttatttcagttttgtcactcatgagtacattgatgtaatcttctcccatgtaggttcacaataaataaaatgctgttaaaaactatttcaaaattgttttatagttttctaaatattaaaattgcactactttatgcataaatcatcacagcaaatgtttcatgagtttgtatctaatttttccttaaatttacctattgagatctttttagtaggccgggcacggtggctcacgcctgtaatcccagcactttgggaggccaaggcgggcagatcatgaggtcgggagttcgagaccagcctgaccaacatgaggaaaccatgtctctactaaaaatacaaaaatgagggcgtggtggtgggtgcctgtaacccaagctactcaagaggctgaggcaggagaatcgtttgaaccctggaggcggaggttgcagtgagctgagattgcaccattgcactccagcctgggcaacagagtgagattccgtctcaaaaaaaaaaaaaaaatgtttttagtaactaaaaacataatctaatacctatgttgggtatttccttgatttgttttttaccctacaaataaatcatgaccttatgatttgcttttttcttatagttcagaaaactatactttttatcgtaaagaaaatgaaataaatgcatatatggatatatatgtgtacatatattttcagaataattcacacaaattttataactctggttgcttctggagatgggaacaaagtggttgtggtgacaactgtatttttctttattgtactgtttgaatttttctccaggtgcatttcaaaattaaatcaaagtaatctaattaaaattttgcactataagttgcctttgtacctagaatagacatttttattttacaagatttagtttcagttcatgaaacacatgtaaaaataaattgacataacagtgaaagtatatgtactgtatagatttcagcacttgattatacacctcaaatatcctgraaatgaatatagctattaatgtgtacaaaacatattataagatagagtagtctatgctttcccacatgtcattctatgaagcattcatatttatattcatatatattatttatgttatattcataaagaagtttatattcatatattaaaataggtttcaagcaaaaaacgaaagtgtgtttggataataccttttggagtgtacctcttagagagtttaacataaaaaagttcattaaaggctttatagagagatatatcaatatatttatgtgctaatcatatttgacaacctatgtgtaagaatgccaatatttattaccctctctcaagcatcagaggctaatgaatttctttctgcagaataatttttaagtcttcttactcataaagactcctattattcacatatctatttaatcttttattactaatagctctactaatttgtgacattcctcactgctcagtrtgtgattagatgccatttataacaatgtgtttgtaaacttcaatgttttttataagatgtaaaactaactktattaaaacttctttgcaaatttgagtcatgaatgaacctcgcttataaatagcttatagggagtctttgctagagataataacatagaaaatgctctctaaaatgacacaaagtcacaggtttctattgcgagttcaagaaccaggtatagagtagatgttcaatgtattattggccaaatattttttaagataatgatcagccacagaattccatatattaccacgtcaattaggcatgtatgtttcaatctatacatttgcagattaagtctacagttatcatttcaagcatttaggcaattccctaaaccataatgtgatatattcaggatatgaacattttctgatgaatttctgtgaggaagacatattgtacccaagcaatttcatacttacaatggcagatagttcagatttcaacattgcgacaggctcagccatagcacactttcatattttcaggaatttgcaaatggatttttttaagtactcctaataatggtatttcagatcagatctcttgtcacaataaatcacatgccattaatattatcctctagcatgctcaccttgaaattcatttatattttaaagaacatgatgtttctaacattatcttaaggaaattaattaccacaatatatagttctgttctctatgcttcttatgacagaaattgaaagaacagggaaaggtaatgatttttccgttgcttaagagagtgctagttgaaaggtttatatcatattctttccaaatttctatataaatctaagttaactgttaaaagaaagcakgctgtttaactttctaaactttaagatattcttccaacaaacggaatttgaataaaaacttccagtcctttagactcaagaaaaaaaaaaactaaatatttatgctactagaattttaaactatttattacataatattggtatttaaaatatttatataaattgtcaattagtattcataaacatatttacattcataattcacatacataatacttctcatggtgctatttagagagatgactttaaatacttccttttttgaaaaaaaggatattaataattatttattaccatactaaaataagcaacattaaaaagggcaattataaaggcgtataatgattttagaaaaacatgcaaagcagtgtggaattccttgtgtaaaactatgtaacattgaaaaggacttccaagtaacttgcaaaatggaaccagttataggaaaagtattggcagtgtattactctgttttcacgctgctgataaagacatatctgagactggacaatttacaaaagaaaggtttattggacttacagttccacatggctgagaaggcctcacaatcatggcagaaggcaaggaggagcaagtcacatcttatgtggatggcagcaggcaaagagagagagagcttgtgcagggaaactcccccgtgtagaaccatcagatctcatgagacttactcactatcataagaacagcatgggaaaaacttacccccatgatccaattaccacccaccaggtccttcccacaacaaatggaaattcaagatgatatttgagtgggaatatggccaaaccatatcattctgcccatggcccctcccaaatctcatgtcctcatatttcaaaaccaatcatgccttcccaatagtcccccaaagtcttaattcatttcagcattaactcaaaagtccacagtccaaagtctcatttgagacaaggcaagtcccttttgcctatgagcctacaaaatcaaaagcaagttagttacttcctagatacaatgggagtacagacattgagtaaatacagccattccaaatgggagacattggccaaaacaaaggggctacatgcccccacacaactgcaaartccagtggggcagtaaaatcttaaagccccaaaatgatctcmttttgactytatgtctcacatccaggtcaagctgatgcaagaagtaggcttccatgaccttgagcagctctgcccctgtggctttgcagggtatagtcccccatcctggctgctttcacgggctggcattgagtgtctggggcttctccaggtacatggtgcaagctgtcggtggatctatcattctggggtctggaggatggtggccctcttctcacagctccactaggtggtgccccagtagggatgcattgtgggggttctgaccccacatttcccttcctcattgccctagcagaggttctctgtgagagtcctgcccctgcagcaaactgcttcctgggcatccaggcgtttccatacatactttgaaatccaggcagaggttctcaaaccccagttctttacttctatgcactctcaggctcaacaccatgtgggagctgctgaggcttgagccttgcaccctctgaagctatggtttgagctctatgttggcccctttcagccatggatggtgcagctgggacacaggacaccaagtcccttggcttcacgcagcatgggcaccctgggcttggctcacaaaaccattttttcctcttatgcctctgggcctatcatgggagggcctactgcaaaggtctctgacatgccctggagacattttcccccattgtcttggggattaacgtttgactcctcattacttatgcaaacttctgcagcctgcttgaatttctcctcagaaaatgggattttcttttctatagcattgccaggctgcaaattttccgaacttttatgttctacttcccttataaaactgaatgcctttaacagcacccaagtcacctcttgaatggtttgctgtttagaaatttcttcctccagataccctaaatcatctctcttgagttccacaaatctctagggcagggacaaagtgccaccagtctctttgctaaaacataacaagtcatctttgctccagttcccaaccagttcctcatctccacctgagaccacctcagcctggatatcattgtccgtatcaatatcagcattttggtcaaagccattcaacaagtctctagatagctccaaactttccctcattttcctgccttcttttgagtcctccaaagtgttccaacctctgcctgttacccagttccaaagttgctctcacatttttgggtatcttttcagcagtgccccattctactggtaccaatttattgcattagtccgttttcatgctgctgatagacattaattagagattggacaatttacaaaagaaaggtttattggacttacagttccacatggctgggaaagcctcacaatcatggtggaaggcaaggaggaacaagtcacattgtacgtggatggtggcaggcaatgagagagctagcttgtgcagggaaactcctccttacagaactatccgatcttgtgaggcttattcattatcatgagaacagcatgggaaagacctgcctccatgattcagttacttcccactgggtacctcacacaacatgtggaaattcaagatgagatttggtggggaaacagccaaaccgtatcaggtggtcttacaaagatttcttaaaaatctagtcatagcatgatttcagtgattcaattcaaattcttaatgtgtaacacctaaaaccattttactagaataaactaaaagaagttagctagtaagcacttatggccagcgatcacaataatactgtttaaatccacgcagcttatttcaaagtatctgktctctaatttttggaatgaaacaaagataggttctcagccccctggtcagaagtatgtgatttatttctgtactactttctgctttttctttcttgggctttagtaactacacagtttgtggaacatactgtgtactcaataggtatttattctktaagttatttactatttcatggtatatttatcttctctatatttttctatatatcttactacctttatagtttatgcttttatagtgcaaaaaatgcaataaagattgaactgtgatatgtagagtgagtcttcattctacataactattatttgaggtattaataccttttagttttctcagcctttacgtacataaccttcaagaaccagcaatgcaaaacaaacaaaaattctttaacataaatccctgagcactgtgtcctacaaataaataatatgagattacttatagattagtttgtgcttcttcttatcaatttatatgtcagcagtatacaattttcaacttattattctttatgtgttgatggtattgaactgaagactaaatataaaatatcactctccttatacatatatgtatgcttatacatatatgtgtgtgtatatatgtatgtatacacatatattccatacatatatgtatgtatacacatatattccatacatatatgtatgtatacacatatattccatacatatatgtatgtatacacatatattccatacacatatatgtatgtatacatatattccatacatatatatgtatatatacatatattccatacatatatgtatatatacatatattccatatatatggaaaattatcatttctaagaatagaaaaatcaaacctgtgtattttttttctattttgctatagagacaaagaaaagcccacagactagastaatagaacacaaaattgccatttgttatctagagataaaaattccattaaagttctagaatataatgagaagttaaaaatawaatatttcagtagtgacagaaaaatgctatatcaaagccaaatatttttacttaccatataaagtaccattgagaaattatttctgtgaattcaacaaaatgcttttgaagttccagagcaattcaaattgtcttacatcatgatgatatattctgttgatgtattcatatttataattttcttgatcttctgtaagaatctttaatgtacaaatgaaaaaagcsaattgaaaattggcatccaatcaatttcatgagatattctcttaaatgtgtatcttacatatatttttgagtcaggtatgacatagcaaatagaatatagragatatttgtatttattttcctctgaaggcttttaacatgtatctttgtagaatcacatttgtaggaattcatgttttctttcactttaaacttttaggaattaaactgttatttcaggagtacaattgatttttaaattactgacattcacaatctattaaaaacagtgaaagtaaagaaaggatgaagtatatcacaatgtcatcattcaggtatttgacctcacttttgcctcagtcaagacaagttcattattgtagactgaatttttttcatttaaaaatgtaaattattatcatgttttaaggcacacttctaccttgtgtatatgtcactatcttttattagccaactaggtaaacaggactactgaaattaaaagttaaatgtttgtcatttttagtgttttgaataaaatcagttttattagaaatagtggtgttgtgcagggaccttttgaagagaatcatatcttcatgagagtttcatgtcctaaagcacttttatgtctttagtttctgtgtactagaatgaattgatgtgtttttaaagaagaaacatactcatttttcattctaacttagaatactttgctatatcatttaaatgaaatttttgaaatttgtgtgtgtaagcattatcatgaggccagtttttccatatgactaaattacggtttgcctataaaccatatagtgtacagataaataggtaaatatatagatgtatatatgtgtatacatatatgtatttgtgatgcatcgatttatatatttgtatacatatatatttgctaagagttttcattttatcatatttatataaatctcttacaattatatgtgctcttctatgtgtgtattcctaatgtaaagcttttaaaataatttactatgctcctcgattcatatatttttatttgtatgttgagacttgcttaaatactttgttggatctgagcaggtagaaatgagaayggttaaatgagtcaggactgtgtgtgttctcatgcagggggtttcaattcacctgaagcttcctgcatcatttcttggcaccattaataaaaccagaacacttacttctgtatccaggctgtttaaaatcatgtttgtaagatggctctttggaatagagtgagtgaggactggaggatgaataaagaagggaataacttttctcccttccttttttgcccctcactctctttcttctttcacaccacattttttattctcctgttcattttttatttttgccactgcagtgaagtaacaaaaaatattaataaagtttctgaagcttggataaaatactgcttatctgctrttgatttggttgtttcctttgtctgcaaacatttactaaggagccctgtttatttgatgggcattcagctaaggcctagatttttagaatctaaggtaaatgaagaaatggaacttgggatcagagagagcttagataatcgtaaattccacagaagaatataaaccagagaaaaattctactttgtaactttacagagggaagatatttcctggggctcccaaattaaggtgaccattgagctctaacagatacatgctgaagtaaggcttgattgtatatgctctaatttaaataaaacagaaatatttatttctagtttctgtttgcaagacacttacattttattattatcatttccatgcaaatattttaaatattttccccttgattttgcctttcgattcctagggtttgtattattactttacatgaatttgcatgtggtctatgcaaaaattttatatacacacacatacaaatacttctaggataacaaataaagaaacaagatttgtaaagtaacagtaattaattcagagatgtccacaagattacaagaataattcaagtttaagtattttcttatagggaagagtattaaacagtaaaaaaccacttttagaaaaaatttctactcattgttgtagcttgtatgcctacacgcaaactttcaggaagtatttgttaaattaaaacacaaagaaaattatttattgttccttataagctgacaacaatatatatatgtaacagatatattacatagataatattatatataataattttaattagtccataataagtaaactatcaatttagtttaaagggaagaaactgcagataagcttggacaacagttaaatctattatttccaaaatccctatcctcaatttatctcgtgttttatggtgaaaacactgaagcttctgttcccttgtgttcagccctgccacctaggttagcatcagcctctccaactgcaacaaaattcaattgtgtgctgsagacagaagagaccctctaaactaattagacaatggacagtctayttttggaaataagcctgtgacsttaaccaatatcaatgatagaattttcttcccctttgatgttcatagatagccgatagatctgtatttggaattgactagagttcaattgctgttttgttagtataaataaaatccgtgccatatartttagttaatttgatatgaaatttaaatacttaatttctaatatatagatgtgttaggattcattctatcaataatayaataagaatgctttttgattcttctggaatagaatcaattgattcttggtggcaattatcccagggaacaattgtgaggaccctcgttgtaacacttctttacaggacatattaagtagaaggtaagcctggcttgaactttttccaaagaggttaatcacctcattataggtaatcttacctagaaagtaatcccctggcatggctaattggaactaattatatcctctgcgttgcttctccctccacataagcattagttactcatgcatttcttttggaatacatgtagttatgtgaaaatgttcaacattattttctgactgaacaaagttaattctaaaatattacccttgaatgatttattttttaaaaaatggttcactcataaacattgctctttgaagagaaaaataatattctcacatatgcagcattttgaaatttgtattttctgcattaacagtgttttcatattgggatatgtaatgccatggttcccaaacttcagtcagcataataattacatcatacagaattaaaaatgtgtgttatgttttatataagtatatatataatatgcgtacatatatttgtctgttacttatattttatattttatttttattaaaaacataagttgtatttagttatgatgttcaataggattctttgatgtttgtatacattgtggaatggctaaatcaagatatttcacacatgcattaactcatatacttttgtggaattaacatttaaaatttcttttagaaaatttctagcaattttatataaataatatagttaatagttatataaataagtatgtaataaaatatttaaaaacagtaagtaataaaataattatataaataaatatatttatgacaattagcttatataaacatataatagttatatacataacatacaaaaactcattaagcataaatatggtacatgtatatacaactttctgtccttttatgctttgatttaattggttcaaggcatagtccagaaattttcatttttgaccatgtcctccagaaactctgatggacatagtccaagaaatgtgctttgacaagcacagctccacatcactccctagataggaactttagtagcttgactggtcaaaataagagactgacaaagtcatcaggctgaatccatctagcctctctatataaacgccatcgttattaatgttgctatttatttattttgagacgagtcttgctctgtcgccaggctgcagtgcagtggcgcgatctcagctcactgcaacctccgcctcccaggttcaagcgattctaytgcctcagcctcctaagtagctgggactacagatgtgcaccaccatgcccagctaatttttgtgktttttttttttggtttattcattcaacaaagatttattgaatgtatttatggaacactgaggatacagtagtaaacaagaaaccctccttgtgattagtaaattacactctagtgaatcttggtccaaggttcttgcccctattttgcagtgttgactggctgcaactgtttaggcctgtcactgtgtttaaaaaacatttctaaggtgttaactggtcttgctggtactaaaatcgactttaactttctttggtacatttttaacaggacagggtttcaccatgttagccaggattgtctcgatctcttgacctcgtgatccacctgccttggcctcccaaagtgctgggattacaggcatgagccaccacacctggccttaatgttgctattttaagtatggtccaaagctctgttgatcaaagcttgttgagtgctcctaggcactcaatgagcgcttgttcgtatttttcaatgaaagataagaccagtttgattacctcattcctgtttcatagtcaccaaaccactgacaactcctgccttatttaaccttttyatgtttatgatccctggaagtagatgtgcacttgaaatgtttaggatttatatgataattccccctccctgttgatggctcatttctgttcttaggccagcttgtgtgcacatgcaaacgtctacttccaactcatgcaaatccgatggataatgcatcacagaaagtctcaataattgtgtacaccagcagctaggagtaaggctyacactacatatatcacatgtgagcaagtgtgacctatgggccatacttcactatgaagaattaagacaacgctaataagcaggggatgttattgcggagtcatgcttgggtctcctcaatttacctcttctttcccccagatatttataatgtgctagttagggctccctggcttcaaatagtggctcttccacctcctaactgtgtgactttaggaaaatttctcctctctccatgccccaattttctaatcagtgtaatgaggattgatactaatggcatcaacctgggggctgtgttgcaaaactaaattaacactggatgaagaacattttaacagtgtctagcaaatattgtgttcccccaaatactagcaattatgattgatcatcttatcacttattgcctccaagtctcaccatctggcatttccttggattcattctatacctattcccaggacrttcygactcycttccaagctttcctcattttgccttgattgttctttcaaagtcagaattcatcatcaggatcatacctgcagactcttatgttttcttttcgttattttgtgtagcttgagaaatatttattatagttctataatgtgaaagtacttggagaatgagtaatgttaatatgaaatatcctctctgctcttgtaaagcctttgggcctacagggaagacaaaagccaaacatggaatcacagtaacatgtggtaaagactatcagtgaggtaaatgcaaaatggagtacgatatgctaccaggaggaggtgcctctttctgtctgaggactggagaagacatccccaaaaagtattcttctcatacccatgtccaatgcccacagcatcttcaccaagtttttccactgggagtcgcccctgtcgctgctactcatatcacaacttagtgacctagccacccttaaaggcaagagctcaggaaaatgtgatctctggcaggggcatggtggtgtcatgtgctcacataaagtctgagaggttcttgtgtacacagaaagaaagaaaaatgaataacgggtcaaaaagcattctctgccaaaaccttcatatattttaaaaatgagttgggctttgcaaagactttgggtttggcagttcatttctcagctttaaggaggtcacttaaatctgaatttctatgatcctcatcttctactgaaactttttaatgatgtgataaaaatactaacaagtacacggagaaatcctgatgtaacaaaaccatttgctgtgcaagcaagcatctctacatttatatgcttttaaagaataaatctttacatgtacatttatgtctatgcagagcacatgccactatgcactcttcttacttactgatgtttagtagtcactgtgatgtcataatttgtttggtttttaatatgtagacacagtttgttctttatacatattcttttaatattttgtttacttacttttcatcttacttttactaactttgtcttatttaattcattttgctttaatctttaaggcatatttaaattacaaaagtcatttggaattttggcaataacttctaaaataccagaaagtttcatgtactgtgattcatgtagtttgcaaatttatgaatataaaattcatttatgttcaaattcaattactttaattattttggctgttttacatttcaacctggatgctttagcctgttttctactcamctaatgataaaaattattttcaaatataactaaagtaatttaaagtatcatatgacatacagaaaagaacacaaagttacaaaaaaattctattgctttttctagatctatacatcttactaggggaaaaaaaaaaaagcttggttaccatgaaaacttaagctaatatcactaatcgttagtcccaatcttatttttattctcagttattatagcctaataaacagttgtaaacctaaygtgtaagttgtgtgtccttgtggcaatagactacaataaaactcatcatttatatttcttaaaggctggggtatgttccagatactctactaaatgatttttctggattattttatttaatccacacacratcttaggagatagttacaattattatttttacttcacatattagaaaacaaattcagaagtataacttgctctagtttacatatgtagcaatttactaaacattctgtctagataaatactcatttgatgcaaggctaatatgttccagaaaagacttcttttgctcagggtagaagatgagtttaacaccattccaaccacttagagtttatagcttagtggggaaaagatacatgcaaacacatatataatactgtaagatgagtgcagtggttggagtatcatacacagaggatgcaaaggagaaaatacttcttatgcagtgatgggatagtgctgattaggaaggttttgcataaaacctgatacattattttaaaagataaagagaagttttacaaatgactttggagccaatctggggtacatgtgcagaacatgtagttttgttacataggtatacatgtgccacggtagtttgctgcacccatcgatccgtcacctacattaggtactatgcccagtgctatcccttccctaggccccccaccccctgacaggccccaatatgtgatgttcccctccctgtttccatgtcttctcattgttcaactcccacttatgagtgagaacatgcggtgtttggttttctgttcttgtattagtttgctgagaatgatggtttccagctttaatccatcctgagttaatttttgtataaagtgtaaggtaggggtccagtttcagttttctgcatatggctggccagttttcccaacacctttttttaaatagggaatcctttccccattgcttgtttttgtcaagtttgtcaaagatcagatggttgtaaatgtgtggcattattcctgaggcctatgttctgttccattggtttatatatctgttttggtaccagtaccatgctgttttggttactgtagccttgtcatatagtttgcagtcaggtagcatgatgcctccagctttgttcttttggcttaggattgtcttggctatacagcctcctttttggctccatatgaaatttaaagtagttttttctaattctgtgagaaaagtcaatggttgcttgatggggatagcattgaatctctaaattactttgggcagtatggccattttcatgatattgattcttcctgtccaagagcatggaatgtttttccatttgttggtgtcctctcctatttccctgagcagttctccttgaagaggtccttcacatcccttgtaagttgtattcctaggtattttattctttttgtagcagttgtgaatgggagttcactcatgacttggctcttggtctattattggtgtataggaatgcttgtgatttttgcacattgatttttttctcctgagactgctgaagttgcttatcagcttaaggagatttggggctgagatgatggggttttctaaatatacagtcatgtcatctgcaaacagagacaatttgacttcctctcttcctatttgaataccctttatttctttctcttgcctgattgccctggccagaacttccaatactatattgaataggagtggtgagagagggcatccttgtcttgtgccagttttcaaagggaatagttccagcttttgcccattcagtaggatattggctrtgggtttgtcataaatagctcttattattttgagatacattccatcaatacccagtttattgagagtttttagcgtgaagggctgttgaattttatcaaaggccttttctgcatctattgagataatcatgtgggttttgtccttggttctgtttatgtgatggattacagttactgatttgcatatgttgaaccagccttgcatcccagggatgaggtcaaggtgatcrttgcagataagctttttgaygtcctgctggatttgctttgccagtattttactgaggattttttcatcagtgttcatcagggatattggcctgaaattttctttttttgttgtgtctctgccaggttttggtatcaggatgatgctggcctcataaaatgagttagggaggagtccctttttttctatcacctggaatagtttcagaaggcatgataccaactcctcttcatacctctggtagaattcggctgtgaatctgtctggtcctaggcttttttttggtttgtaggctattaattacagcctcagttacagaacttgttattggtctattcagggattcgacttcttcctggtttagtcttgggagggtgtatgtgtccaggaatttatccgtttcttctagattttctagtttatttacatagtggtatttatagtattctctgatggtagtttgtatttctgtgagatcagtgctgatatcccctttaccattttttactctgtctatttgattcttctctcttttctttattcatctggctagtggtctattttgtttatctttaaaaaaaaaacagctcctggattcattgattttttgaagggtttttgtgtatgtgtgtctctatctccttcagttctgctctcatcttagctatttcttgtcttctgctagcttttgaatgtgtttgctcttgctgctccagtgcttttaattgtgatgttagggtgttgattttagacctttcctgctctttcctgtgggcatttagtgctataagtttccctgtaaacaatgctttagctgagtcccagaaattctggtacattgtgtctttgttctaattgatttcaaagaaattatttatttctgccttaatttgcttttttaccccgtactcattcaggatctggttgttcaatttccctgtagttgtgtagctttgggtgagtttcttaatcatgagttttaatttgattgcactgtggtctgagagactgttatgatttccgttcttttgcatttgctgaggaatgttttacttccaattatgtggtcagttttagaataagtgtgatgtggtgctgagaagaatgtatttctgttgatttggggtggagaattctgtagatgtctattaggtccacttggtctggagctgagttcaagtcctgaatactcttgttaatttcctgtcttgttgatctgtctgatattgacagtggggtgttcaagtctcccattattattgtgtgggagtctaagtctctttgtaggtctctaagagcttgctttatgaatctgcgtscccctgtattggatgcatatatatttaggagagttagctcttcttggtggattgattcctttaccattatgtcatgcccttctttgtctttttttatctttgttgatttaaagtctgttttatcagagactaggattgcaatccctgkttttttttttctttgctttccatttgcttggtaaatcttcctccatccctttattttgagcctatgtgtgtctttgcatgtgaggtgggtctcctgaatacagcacaccartgggtcttgactctttatccaatttgccagcctgtgtcttttgattagggcatttcccccatttacatttaaggttaatattgttatgtgtgaatttgatcctgtcatgataatgctagcttgatattttgcctgttagttgatgcagtttcttcatagcattgatggtctttacaatttggtatgcttttgcattggctggtaccagtttttcctttccatatttagtgctttcttcaggagctcttataaggcaggcctggtggtgacaaaatctctcagcatttgcttgcctgtaaagtattttatttctccttcccttacgaagcttagtttggctggatatggaattctgggttgaaaattcatttctttaagaatgttgattattggcccccctctctcttctggcttgtagggtttctgcagagagatctgctgttagtctgatagggttccctttgtgggtaacctcacctgtctctctggctgcccttaacattttttccttcatttcaaccttggtgaatctgaagattatgtgtcttggggttgctcttctcaacgagtatctttgtggtgttctccgtatttcctgaatttgaatgttggcctgtcttgctaggttggtgaagttcttctggataatatcctgaagagtgtttttcaacttggtctccctgtcactttcatgtacaccattcaaacgtaggtttggtctttttacatagtcccgcatttcttggaggctttgttcattccttttcattcttttttctctaatcttgtcttcatgctttcttttgttaagttgatcttcagtctctgatatcctttcttccacttgatcagttcaactactgatacttgcgtatgcttcacgaagttcttgtgctgtgtttttcagctccatcaggtcatttatgttcttctctaaactggttattttagttagcaattcatctaaccttttttcaaggttctttgcttccttgcattgggttagaacatgctcttcagagccagcaagcaggaaggtttaagttgctgaagctgcacccacagctaccccttcccccgggtgctctgctccagggagattggagttttatctacaagcctctgactagggctgctgcctttctttcagagatgccttgcccagagaggaggaattgagagaggcagtctggctacagcggctttgccaagctgcggtgggctctgtccagtttgaacttcccagtggctttgtttacactgtgagggtaaaaccgcctactcaagcttcagtaatggcggacgcccctccccccaccaagctggagcatcccaggttgacttcagactgctgtgctgacagcgagaatttcaagccagtggatcttagcttgctgggctctgtggggatgggatcccctgagctaaaccacttggctccctggcttcagctccctttccaggagagtgaacggttctgtctygctggtattccaggcgccaccagggtatgaaaacaaatcctgcagctagctcgttgtctgcccaaacaaatggcagcccaattttgtacttgaaacccatggccctggtggtgtaggcactggagtgaatatcctggtgtgcaggttgcaaagactgtgggaaaagcttagtatctgggccgggatgcaccatccctcatggcacagtccctcagggcttcccttggctatgggagggagttctctgaccccttgtgcttcctgggtgaggcaacgccctaccctgcttcggctcaccctcygtgggctgcacccactgtctaaccagtccaaatgagaggagctgggtgcctcagttggaaatgcagaaatcacccaccttctgcattgatttcgctgggagctgcagacaggagctgttcctactcagccatcttgccagccaccgctgggcacactatattattaacgattagttttatcagaggtatttattcagaatttatttaaatttaaattatttaacttattttatttattgttacactattttatcagatggttcacttattatgtagtcataagaatttattaaatttttaatttaaattttaaaagaaatttgggratctaattttattgtgatcctcacataaatattcaggtggttagaatacctgaaatcgaattaaaatttaaatttttaraaggcttcccatagattcctaattccagaaagagaaagaatctttagagcatcgttttttttaatcaaggcttgaagattcttgatttaaagacgttgaagaatctaaccagcagagggcgctagcccacatgcactcagccttgccgcacttcccgcaatccagagaacactggatgagtccttccctattaagcatactggcaaagtcattgttttgatttgtgttgcgttgccgggacttagattttttacaccagtagtccttctcatgtagatgtatacaattcttttaaccaagtgtaatttgagttatatttgaatgtcagccggcatacttgagagtctgttgtaaatgctaaaatgttagcaatctgtcataggaggtcaaagggcatctgtgtaccttagtccagcctactaattaaggagcttttgatcccatttgatgaacaagacaagttttaatctcacgtggaagggactttgcttcagaccaactaaaagtcaaagtgttgatgttctttcttaattgcagcattggaaattaaataaatgcaaaatgtctgaaataatttgctagttggaactgagatcagtctttaaaaaawtcttttttatttataagtaattcagtttagaaataatagctttaatatagcaattaatagcaagaatattattttttaaagtttccaaaatgcaagcaatactatatttactttaagagcattttaacaaatcttgtgtattttaggtgcctttattaccgtaattttaataactttacccagttagataagaaaataaggaaaccagttttagcatgtgccagctctttattgtacagaaattaatggcaggtgtccattttaggtaattacttaataatatcaactaattgttaataacgcagtcctttttacataccctctttactagtgcactatgatatcatattattttaacatgcggcatactttttaacttgtgtacaattaaatatatgatgtatctgtgtggtgactgaagactttatttgacaaagctgatatgaaatatatttgcttcttatctcttgaaaagcagttaatgctgtcatttctactttatgattcagcacagtgaaagtgtaggaaactgttgaaaaacctgtgggaagttaattttaatgtgtaatagtatgagaggggtcctatctcttttcttcattctgtaaagcttataacaaagatgatgattatttaagcaagtgacaaactgtcccactgataggatacattaatttgcctgcaaagctgttccttgtcctctataagaaggtgataattaggttttcaggttagaaaaaaatcatgtcaattatgtagatgcttgttaaaatatatttaattctttatataaacttgaaacaattacaaatggtaaaatatttttgtgtaaacttttaagtgaatacagctaatatatcaaattaatattaagttagcacaactcttgggaagacaaacaattggaaaaataatgtaagaagtgattaacttctcaggtaaagcattaggttttgctagaacatctacctaataaaacatcacttattcatagcatgatttaatttcttcatttgaccacactgagtgcaatttcatctttgaaaagtcacataggattgttttgtgcaggtatattaacatcctcaaattctaatgatgttgaaagcttgagttaccactaggtactgccaatgattatgttttttagcttatattatacagaattaacttcactctacatctgagtgcctaaaagagtactacaggttcagcagctcttatgtgaaatgcttgggatcctaactatttcagatttcagacttttttatattttgggatatttccatatacataatgaggtattttggtgatatgacccaagtctatcacaaaacacaaaactcacttatgtttcatatataccttatacacataacctgaaaataatttcatgcaatattcttaataatattgtgcatggaacagagtttgagttaagtacttacgtgttgaattttccacatgtggcatcccgttggccctcaaaaattttagattttgtaacatttcggattttggatttttggattagaaatgctaaacctgtatacggtgtatacattttaaatagtgaaggcacaaattcaacagtgaaggcacaaatttataaacacaaaacactagtgactttttaaaggaagacgctttcattgccttggagttgattttagcccgttgtcttaaagttcttaaacccaatcttttctagctttaaataaccaaaggtaatttcctcttcttaaaaatttcagggtattaaaaactttcttatatctatttcctgaaccaagttgaagaatgttcagtgcacattcatttaaaatacctttaaatgttccgactcaattacttttaatagagtggagaatgtttgctgtttctcagagtgcacagccagaaaggttgggttttagttagaaaacatagaaaattacttcctgtgcaaaggtactctctagagaaatataagtaaccagaaaaccctactgaagaccagtatatgtactggaaatgtcatgtaatttctttgcacttgttgtgaacagaataatggcataaataatgttatggtaagacattgacaagataaaataaaaagagatttttgttgataatatgcaaaaatgccacatctgtttttattcattctgcacttatttctttgagggagcatttctacagctgtgaaaacctagggagttttttacaaaacaattttaacaaatgttcatgattccacaccaatgaaatgcattttaattccattcagaatgttccaagctctctagcagataaccagtaataaaaytcatattgaagttatgtctgtgatttttaacttcactgctcaaatggtataagcaagttttcctggttgtcataaagaaatacagagaattctaaacagagtttatagaaaattaaaaagtatattgatggttgggaagttcaaacgtgatattgggttccatagataaccaggagacacttctgatgtcatatgaaaaagacaaaccttcggttctatctgtgtctgaattctacttctgcctyttaccagttctgaagcctagggtaaattatttagaatttagtagcatccatttcatcacctatgagagtagaatagtgattcttagttytcaggattgttatactattaaattaaattgaataatacatgtcatgttagctagagtaataccatttcttttgtttttattcccatcagaatttactatcaaaactatcatgtgactcaagtgtatgcaggatattgatgctataatgcaggggtccagtaactctctgggatttacaaagatgtgtcagaaatattaggtgattcttagaaagtgaaaaatggagttgaaagttcattgaaagctttattatttaaaagttaacgtgcatctgatagcaatcatatatgatttctatataatgcaaagatcgtgtcacataatcacaagagcacaaaatttagatttaaaagccatattataattcctgaacgtggaagctacctttgtaaattggaatggttttcttaagacaatctcacagagttactgcaactattgaacatgaatgtttgtaaaaacataggctactaaataattgccttaaaatgtgtttgcagtcaaaatcctagtcaataaaagaacataggtctgctagagacatacaggaaataccatagaattaagtgattttttaaaatagggaagtattttcaaattagaagtggatcaatgggtacaaaaatatacttagatagatggaataagttgtagtattcaatactacagtaggaaaagtatagttaacaataatgtgtggtatatttcaaaacaggtagaagagaagaagtgtaatgttctaacactagaaaagttgaatgtttgaggtgatggatattccaattaggctgacttgatcattacacattatatacatgtctcaaaatagcacatgtatctgcaatgtgtgtaactatgatatatcaataagatataatacaaaaataatattaatgaaacacttccaagaaaacccttaattgtactcccttcaaaaaagacaaagcaagatatacatacttcccactgataagtaataagacagatcaggggtcagcaaactatggcccatatgccagttctggccctctgcttactttataaaagraatgttttgtggaacacaaccaagstcacttgtttttctgctatctwtggctgcatttgaactacaagggcagagctgagttgtgacagagaccatatgatccatatagcctaaattatttactatctgggcctttacaaagaaagtttactactcctgtgatagatgaaaaactgtagctctgagagaaagtgttcgaaaaattacagataaatttcagaacagataaaaggagtaaaaacttcatgttctgtcatacagagaacgatacaatggagatggttagaaatgcagtgaatggggaacttaaggagacttattttaagtagcatgggaattttgagccttggtggagaaactgagattctctgcaaagtgtaatgctttctagtccagaaccatatgtgctacacaaaatgcatggaatagagactctggagcaaactagtcccttatctgtgtcgattttgcttatttctttattagaaaaggcaatatctaccagaaccacgtaaccggatgcttgaaatggctgtggtggtgacaagaaatgactgtggtggctctggaacctgacaacccatgtccaaatccaggctcctccacttagtaactgggtgaccctgaacaagcagcttaaccctttctgtgcctcactttcctcctctgtaaaatgacccaataatggttcttactccatagagtacaaaagagtaaatgagttaatgcatctaaagcactaagaacagtgcctggagcgtagtaatcactatatgtgtaagccattgctatttccatttccatgcacacgcatgcagtcatggaccacgttacaatgtttaagccagtgatggaacacatacgttctgtaagatttaatggagcctttatagaaacttaayatagggcatgtgatattggttttgcaaatcaagtagaggaaatgattgatattcagtaatggtgctgggacacttggttttccatataatatatataaataaaaatatctaggtttgtgtaagtacactctatgatatttgcacaataacaaaatttccaaacaatgcatttctcagaaggtatttctgtaaagtgacacatgattgtaaattagcttatattagttgtttcctttttgcattctacctatgatttttattatataatataaattcagtcagtttcacttgacccatttttgtctttatagtcttctgagttaaattcacattcaggtgactcttattaaaaatttcagtaagaaatgcccttatcaagttacactatgaaatgatttgccaggagtagttatccaaatgttagctgctatccacatattttttcagagacttaatagatgaaatgaagcataaatatttcattctaaatgatacaatttgcaattctaggatctcaggtatttttctcaattgcaaagtaaatattattttaaaatatattttcaaataatttggaatttatatgagaataaggttgttaatagattctaggtaattaccctggttgttttacattctgagaaacctattgatccgtattattattgcttcagtaataaaataacatatgcttactgatttatagttttaaataattgcttttgtataaattattttatttgctcttgagatatttaagcccacatatgtatgtcatgcatgttcttttctattgggcaggaaatattgcaagcatatygatrgtgataattaatattttctaaacagtcaaaaacaggtgtacctttccaaataaatctaaataaaattcaaaacaaacttgttgaatgacttcagaaaagagtcaaaaattctcttgatgggcttcagattaggaatatgttagcaataacaactttaatacaagcagtaaaatattaaacaatcataagtctgactgtgcaaaagagtgagtttcattaatttctwtaattgatcccattttgtttttgagtggccactcttactggtgaagtaagagtttggggcatctcactgattaagtaaatagctgatcttgttcattaaaagcagttcagtcttctctggtttaacacattttctcattgatgtaactacccagttgttctgggtatctttctcaactcactggctttgactttactttcctctttctcagaacaatgtttaagtacaaagggcatagcacagtttcttataacataggagtattttagcgtattccagagaaacagaactaattggagattagatggagagagagagagagagagagagagagagacagatagagagatttattataaggaattggctcacatgattgtggaggctaagaagctgcaagatccacagtcagtaagctggagatcaaggagagctgatgctatagttccagtctgagtccaatagcctgagaagtaggacagggtaacggttttagtggagtccaaacctgaaggcagaaaaccaatctcccagcttaaatgtatcagtcagagagaaaaaattctcctttacccagcctttttgctctatttagacattcaacacattagatgagkcctacccatattgtgaagggcaatctgctttactctgtctaccaattcaaatggtgatctcattcatagacaccttcacaggcacacacagagtaatgtttaaccaaatatctgggtacctcatggctcagccaagttgacatataatattaatagtcacaataggggaagattctgtctcccagatggcagatggtctctacttctgctgaaaggtagcagaagccacctggtctctgggcatcttacactggtatccgctgtggagacccatctgatattttgggcatctgactgatagctattcctgatggttgtagactgtgtaattaccttcattctcaacatcccaccaactacttgtcctgacctctgtttcctcctagttcattctctcagcatttttgagtccacattgttcaagagtcttgtcattctaaggtgcttttttcctccaacctaataaggtctatgtgacttggcgaggactttcctcagatccacttgataggacacctccttctgctctttgctactttctacttccatgcagtccatggcacagaatgatgaaaatgggcatcattcttctcagtcacagaaggatctcccaagattacccctaggattctttgattgccatattttacttaggaattttttttctactcttaggtgttgacctgaagaataaggggaccaatcctgatatccaatctcttgtctctctaatcccatgatttgggctttgccacccacctcctccactcagccactgtagggctttgccctcttagtttggcagaaatctcccactgtgccttcttattatataactttggcatattaattattttgtcctcagtcctctgggacttgtctgttgatctgaaatctctgctgtggaaatacaaagaaaaacgctttatcatttagcaaggcctaacacttgcaagagtaaaagatacatgtctttagattattacctggacagtggcatccctatgaagatattcatgttgttgacataattggtaggagattcacaggcattcaggaatttggtgttaaccagcatggcaatatatggacttacaatttcaaaaattaaaaagaaattgtcttggtttcatctattttgcatattgataaattgtgttcttgtcatagcttatttttttttaatcccagggaacaatttatccaaaatatcataaaatcaaaattagttcctgtcgcctagcaagtaatacataatgaactttgagaagcaaagtacactaatttaaaaacaattcactactttgtttactttccacactatcatatgttcataaagaactaattagatagtgtcactcaacattctccgtgagagtttggcattaaatcctaatcagaatacctaactgggttggctgaacattttgatacaagagacaatgttaatgctcttattcttttaaagctgatatttctttaatctgtcatggcagaaatctttgcaagaatatactactactctaaaggaatgtagatgttggagaggaggttacatatctctgcaagatatttagaaattatcttgtcttatggattttataatggtaaaagatgtaagcagtgttcaggaaagtgaatgcagatattataggcaattgaaagtagtaggtggttattgtagctggaatgcctcccagagcagatggttttttaggagtttttgaaggagaagagcaaggtggcctgcatggcgtatattaattgggtgcctgttccaagtgtagggggtgtttggaagaatgtgtgatgtcttgagtgggcgaatgatacaaacaggcataacttcaaaataacctggaatttatatcccagaaggcttacagacaattctcaaagacacagtttcgtctgtagggaatcagtaaaatgcaaaggtacacaaacagaaagttaacaccacgtaaaacagaacatgacaaaccatagtcaatgttttccacatttaacactyggctattgctcatcaacaaaaaataataattccctaattaggaaaaattacttactaaaattacttgctgagtttgtatgtaaaaagaacagatcttatcaagcatttaaaatatgtgattattaagttctaatattttctatgtatatttggtagacatagattctttgagaaatgacatggtttaacttactctgtagtttttatatgtagttgtgagttcctaaggacacttgtatctattgcacccatccgtttcctacagccaccactctggtttaaataacattatctcatgctcatactgctgaaaattcttcttattgaattctgttcttagtctttccagttctttgaacacacccatatttgcactcaaattaatcttaaaatctgactcggttccctcactttgatagtgtaatagttaataacacagaatttgaaacagacttgtctggatttgaatcccagctctaccacttcctaattgtgaccttaagcaacttacttaacgtatccgttttttagttctccaagtatgaaatacctggataataaaactaagcatcttagaaagttgttatgaaaagtaaattacttgttttttgcaaaagtattttaaacagtgtacatcacaagtgcatttgtaagtgtttaacttacaatgtcatggtcatactcaggaatatttaggattccctgttgcataacacagcattcagaattcttagccagacattcaaggtctttactaccatctgccttccactttccagtcttatcaaaactacaggcaracattctaatcagtgttcagtgcatgttgtgttttcttgcttgtatcttttaacctgtagttttcctcaaactaggatgctgattatcttcccaacaccacacccatctctacccccaaattacacatgagatcaaccacaactttcagcatccttctttaattccactttctgcataatgctttctttctccaccccattttcctaagtatcyttctcttccaaatgttcccagtactcatagaggaggctgtaacagcattatgtggctcttctattatttttgtaattcataatctctctcccactatattgttaaattcctggaaaacatcacaccagcactcagcatactgtcttgcacacaaaactgctcaataaatttatggagaatgagaaaactaatgagcagattagtgaatgcatgcataaactggagtattcaacaaagagatttattgtgttttaaagagattgaaatgtctaagtttcttggcatttaaatgtcactctgtgagtttttagatagttttattttgaccaagcaccgtctaaaaatcagattaaatcatctaaaattcccagtgaactgcggaaattaggatttcccgacaccgtcaaagtcaagaaaaagcttctgatacacaaaaggagcttagaaaaagtcagtggttataaccagtaagtgtgctgtgacaacttggctgtgatacactgtatgattattatcacaggtattttggtatctagaagtgttttgaacattttcatctgtgagatccggacatgttcctagctctacttttaggatgcaatgatggagaaaatttaaaaaatgataaaacgatgcaaactaaacatgaatataccatgctttaaattaaatttatcttataatctaacttaaaaataaatatcttcacaaattatcagtgtatatcaacacaaagctatttctatacataagtaactctgcatatgtgaattttcagacccatatcaataaattaatgtaccctattcctgatccacatgtggaagctattgttgctgtctccttattctttagtttagtgaggtccaagttattgtcctatgaccaagaagaataaggcacacagacaccagaaaatgagtaagacagagtaggatttattaagcaacagaaaagctctcagcagtagaggggccccaaaagagggctgccagtaaggggctgagttcthtttctttcatgtggcaaaaacaaggaagtcttctgtgggttccaccctgatgggggagctaaagttccccctaggggtgatgcatccgtgcatacctggggttggccatagtgactccaccttggttactaccctaagtgaaacccacagggtttgccaaaactacaatgataatgayattacaattagcagygggtcaagttaaggaaacatagttaatttattgtgcctgtgcctaagttgggacagtcccttctgagcagacatcctggtataagaggaagttcttaaccacatttccacctgctagttacaccacaggggcgatacaggtgcattcccataggcaccgtctctctcttgaaactctccctctctatctgcctagccagcctctaactgcctcctctctcactattggattagagcatggcattaatgaggccaagtttatgaatttgtttttatatgagcctctawgtgtccctggacaaaagtctttttgacagaaccctgtaccaggtactttaaacacttcttttcatacaaattgagcaaatattgagctaagtaagaggaaaacttagagaaagctcagaaaacatggcttataaagttgagttttattgtattttgttgagtacattaccattcaaaaatgtgatcataagtcaaggtttagttgaattgttttttaagttgccattaatgatcccactgagtgtctgtctgtatgtcatgtgcctaagtaatatatgaaaggtggtaaaaattaacaaggtgaatttctgtttaactgctctttgccctattgtatcactcctaaagagtaaacagagcaattgatgaaagactaagtaaatcaatttacctaaattctcaggaagctttgatgaggatctcagaagagattttaaggatgtgcacataactatccaagaaaagaaccactttcgattgaatgaaacattggttaagtagctgctttttaaaacacagtaagtttgtctggctcttgggtctactatcgcccggattttctcttaagtcttttagrggacaaattgacttcaaagggaattgccttcatgaagtacctaatacattgactaaacaagagattgcaagaagtatttggagaaagttttagttgggatatgtgtgaaaggggaactagatattcaattaagtcaagaaagcacgggttttccttatgttataaattatagttagtgaaatttaatttaaaagtaaaaaatatctgtgagcccttcagtgtagatattcacttttggtagaacttctagttatttcctacagcataaacaagtagactttcatggaaggcaactttacgtctatgtttcagaatatcaaaattattaaagaaggatatagcattttcataagatgctgatggcttataaaaaacatgaaacttatacccgtgtttaatggatataagttattagggacactattttttgatatacagattttactttatgatccttgggaaaaatttctacctgttaagatcagaaactgtaatcattattgagcagttccttcaatttatcttataatcactgttgattaaatgcaaattgtgaccatgtacacagaacttcagattatgcattttaccttcgtgttattacctcttcattatctcctttctgctgtttcttcttctttaaatacatttctgaattttatatcctggtaaaacattttgaaataatttaggcaaataaaaagaaacatggctgacaaataaagaaaggggctattgcaaagtttgggggatagttctatttggattttttcctcaatatcaattgacttttgcttggtaataattacaagtttccycttccacataataaatcaaagcaatgtagcagctcttggattatatatttaaaatatatagtgggaaaagggaaatcaagaaattagaaacttcactcttccatttccttcagggtttgtcatcctagaagacttgaaagtttttactctatacattatggtgaggagctacaaagaaaagaaagagcaagaataaaggaacaagagagagaaaagatgaaagtctttacaactattttctcaaagaaagaatgagaatatataagtgaccgaggtgggaacaatagtggtacaggtagagaatctgaaatactttaagaattaatgccatatttctattacttagcaactgaaaaaatggcactttgaactagtaactaaatagttataatatttctcaaatatacttactgcaaggaattaacagaaatacttattagtggcccagtgaatcttggttttgacagtatattatttatattttatgctcttttataccactcttaataatacaatattcatgagttcagaaattgaagggttgtaaacataataataaccattatttgtcggagaatttataatgtaataggcaatatgctaaaagctttacatgcattacrtatatttgtaaagtggggatagtaataggactaccatcatattctcctttgaggataaaaatgtctgactgatatcaaaggcttagtgtaattttcaataaacatcagatgttatttatattgttactattttatattttagyatttaatgctaccaatttactrtccaaatattctagattaggaaactgaagtttagagaaatcaaataagttacaaaacttgtractgttggagaccgcatatgaattcttattcatccacctgaaaagtctgtacacttgtcaactattatataatgtttctaatgaacacatagtttatcattttgtcatacaggatattgctataatattaagtgaaaatttactaagaaaaaaactcatatatacaattatcaataagataaaataatgcatgtaggtaccaactgaataaaactaagataataactatcatatacaatgtcaaaattgtacacaaaaatgttagaatttttagggaaggaaaataaaaatgttgcagttgtagatataaagaggatttataaaactcaggtgatattataccaatatttttgacaaggtctcactattgtttacaaaaccaatttatttgaaaaacaagccaaattcaatgtatataaatgtaaaatatgaatatttaaattagaaaaaatccacaatagaggactgataaatattaaacacagctaaaaggagtattaatgaaacagaagatagagtaaaacatgagggaaagagctttaaaaaatgaaaagaaattaaatattaagtagagaagcatgcgattagaatccagaagtaaatgataaatagaaggtgagagagctaatatttaaagtaacagtgcataaaaaatgttgctgaatttacaaagaacacaaattttgaatccagggatcataataaatcctatgcagaatcacaccacctcaaaaactacaacaacaacaaacactcaaacaagccaacaaaattttcaaatttgtcttagtaaagctacaaagtggagagaaaaagagagaatgagagaacctttaaakttccagagggaaaggacaaattatcttccaaggaacacaactaaagtgacaactgattattcaacatcgacaatagaagtcagagtacaggagaataatatttttaaagttctgaaacaaataattgtcaacccatgatttgaaaataagctaacctatcatttggaggccaaataggaaatgaaaatatgtttctacacaaagcaagagagcttatttctaaytaattttcacttaaggaagtgctaaaatttatttttgcccagaataaaaggttttgcttacgagaagaaaagcagcttgtataaaagtaggtaaatcaaaataaattggctgaataaattaatggtgtctgattgagaggtcaacaacaaagtaaaattcgaacgtgtaactttggagagaagtgatgggatctgatggttctaaggttactctattcttccaaaccggtaaaaggaaaacatgaggaagcaaatctcaagtaatgcaaaagaaataagaaaatatttgtaaaaatgcttagaaaaggcaataaaaatagagaagacaaaataagtacacatccaacatattattatgcagtaaactagacagttataaaacaattataaaacaagattggcagtttggatttataaaatttatgtaagtgatgctatgtttcaagaattatcaggtaaaccacatttttgcatgaaaggtaatgttaaggtgaatttttagcaactacagaaagaaaatatgtaaaaagatgtttacttagacattcaaaatcatatgtacattatagatttaaaaaatcatatggcatagagtggggcacagtggcacatacctgaaatcccagacacatgggaggcagaggcaggaggatggcttcagccagggagtttgagtccagcctgggcaccatagcatgatcttatcccaaaaaagaaagaatcatattggacattagaaaaaagttagaaataatatgtggtaaaatattacatattaaaactcttacaacagaattattatagaaatttacaggaaatttatatctgcaaacaattyattttgtgggaggaagaccaaaaaattaatgaccaaattatcaactttaaagccaggatgaactccaaaaatttgaggagagttaaacacatttgtaagagatgatattaaagttatagaataaaaacctagagagagtaaacaaaattagatatttgtttactgaaagacaaatattctaccaatacaggttgaaacaacaaaagtgatcrtgaagaattttaagaatcaatattaagaatatcaagaattaaaatatagaaacccaagtaacaaaaaaagaatattataaagaaatttatttcagtgtacttgaaaactagaacaaatagagaaatgctatttacaaaactgataacaaaagaaatgaaaaccttaaaagaaaaaacccatgaaggaaattcagtcagtaattaagaatcagttcaccccttcattcattgatattttcaaargcaattttagcaaatattctgaagcatacttacaaatttaaatttgttacaaagtaaagaagttacaaagaaaggaactgtttcccactcattttatgacatttgaatctaagacagaatgaggaaggaaattaaaagctaatatcaagtactagcatagatgtaaaattataagcaaatactaggaaatcatatcctgatatgtatgtatatctactgcattatgacaaagttgtatgatatctcaaatatacaaggatgactcaatatcaggatatttataatagaataaatctatcaaaggagaacatatataaaaataatttgttaaatgtgtcattaaaagcaaaaaataaaggcagttgataagagagcaaaaaacatataacagtacaaaaaaactttagcaaaccagacacataatgatgaaaattagaaccattcctttgattcaggaatgatccaaaatkctcacaattattatttctgtaaattacacaaaataatttgtactgcattcaagatctaaatgtaataaacaaaattttaacacttttacaaaaatatataggagaacaatttatgagtccagagtaaaaaataatgtcttaagcaagacaaaatcataaatattttcatagttaaaaaattttttgactttatcaaaattgataattgtgcatcaaacaaacacaaaatgaaagactaaagataaactttattgagaaagttcaaggtctataattgacaaatgattattatttggaatatgaaaagaacttctgtgaatatgaagaggaagacaagccaatctgcagtctgataggcaaaagatatgggtcgggcgtggtggctcatgcctgtaatcccagcacttcgggaggctgagatgggcagatcagttgagttcagttcaagaccagcctagccaacatggtgaaaccccgcctctactaaaaatacaaaaaattagctgggtgtgtttgtgcacacctgtaatcccagccgctagagagtctgaggtaggagaatcacttgaactctggaggtggaggttgcaggatcatgccgctgtactccagcctgggcgacagagcaagactctgtcaaaagaaaaaaaagaattctaaaagaagaaaaatgaatgctcaataaacagaaggaaaactattcaactggtttcaattaggaaaaatcatataaaaataagagctgatacttcacagctatcagaatactaaaaatggtatcttaccataccaagtgttggcatgaatcaggtagcaaaagcaaatgttaaacaatgcccatttgtatatacattgatgtaaacactttgaagagcaacttgtcagtagacataaatttaaagacatgctcatgccaacactcagcaatttccttcrtaggtatgtataaggatacttgtttaagagtgttaaacattatttgcattacttatataaaatttattggagccacctactgtactatcaacagtggatgagtaagtagactgtgttagcaaattcaagcaatagaatatcagtcagcagtgacaatgaaggaatttgagttacctttatcaatctgaatgtatctcacagacccacattttggcttttaaaagaacagactacaaaataaatacatacctttatttattgaaggccgaaagaatgagggtcatgatcaactcagtatatcactggaggctacatgagtgagtcgtgatcaactcagtatatcactggaggctacatgagtgagggtcctgatcaactcagtaaatcactggaggctacattagtaaacagcaaactgttctcatgaaagcaggatgttggcaaattgacaaactgcatctgctgccaagaaggaatgctgagggcagtcagaacccaggcacaagtgtttcttgtgattaggcaaatctgaagcctgttagtgataatgttaacctgtgatcaatcaagcagctgaccaatcgttacctcctcctccctgctctttctacccaacaaatatgaagggctgtagaagctcagggctgctgcctttgctcactagaagcagggagctatcttcttcttccctggaccctttyttgaaaacagtttcttttgttttttgttagcatctctgcattcctcctccttcattcagtcttgtaatgatggtctcaagtagtaacagtagtaactgttgtagtgacaatctcaagtagtaactgtggcagtctgccacatttattcattactttttttttttttttttttggaaacagagtctcactctgtcgyccaggctggagtgcagtggcatgatctcaggctcactgaaacttctgtctcccaggctcaagcaattctcctgcctcagcttcccaagtagctgggattacaggcacctgccaccatgcctggctattttttgcacttttagtagagatggggtttcatcatgttggcaaggctggtctcaaactcctgacctcaaatgatccatccacttcggcctcccaaagtgctggaattacaggcatgagccactgtgcctctaatgtttatgttttagagacctatacatacataaagaaagcataaattcatggacatgatgaatgccagactgaagaaagtggttatctatgaggasagaggatgggagaggaagtaaggaggccaatacagggagcttcacttgttatttgtggcatttcatttcatcaaggggtgaagagaacacaggtctttttgtgtattatttctattcatcrttattcaagcaaagactttagatactttagaaatatttctatttgtatttcctttactgtatattgagaatttgcctaaacaaagatttaaaagtatcttgagaagatacattttcttctctactgaaatagaagttaacactgatgacattagctaataccaggaatgaggccactgtcaaatgtaaaggggagagtttggggattagtacgtgtaatgaaagtaactcctcctttaaaaatccaaacccccttaatgtacttttgtttgtctgttttgtaaagacactttagttggagatatttcatctggctatgttgtttccagtgaaatacaagaaacttggaaaaaacttgaactaaaagaaaaaaaaaaggaggcttcccccattataatataattttcccacatataggatttgaaatgttaaaaaaaaaaagtcttagaaatttaaaggttaggkagtatattcaggtcactacattttttccccttattactttgattttaaaacatgaaagtgttaacctttcaaaagatatagggaagataattaggtgatacttaattatctgcttcttttagaaatgtattgttggattgaaacctattcttgctgccaacacttactaagattgctagaaggacatcttgcttcacaatgtctgggtctaatttgagataaaatattgcatctaactatgctkttatctatagttcctggccactcataaatgtagttcattgaaatctcacccacgctccaacctctgtcactccaggaagcaagattcatagcacttttctttctgtttgtatctaaattattgtgttaactgtataggggctttgggcagtaaattgttctcagttaacacataatcaaactcaggcttgacaatatctctttaatgagagagtctgtgtttgatcctttttaaataatgtttagaacatgagtacaaaattaacaaaatgttttcggtggattctgtgctgagtcctccaaatgtgacgtgcttggtagcactgttaaaaaactgactagctttgctctcttgacctactaattcgactccatcagcctcactaagaagcagtaacaatatagaacctgataacgaggcagagagcttgagccccattttcttaatcctaactattctagtgttacactaacaactggggtcagaaatctgtcaagtttgaattaatttctcctagtatccctgagtttttatttgatttagatagatacttgttctgggggttgtggtgtggggagacttgcttggaaacttcagaatttctcaaacttcagtatagcagtgtagataataaggctttgtcatttatgtaytataacattattcttgtcattctgtaacgcagcaatgaaagaatttttgtaattttatctatcctatgctaaagaaaaaatattgaactctgagcttctatttctttgacgtgtttttcagttatgtaaagaccaataagtcctgtctttaaaaagctttctctagaattctctaaggcacaatcttatagtcatttcctaagaagggcttacgagataaccctagggagaacttcgggggttatagagtaagtagggaattaatgtttaaaaattatatcataaattgttgaaaaaatatatttttaattcaccagagattaccttgaagacaattctctgtcttgaaagattccctttcaagatgcaaattaacacaattatcttagttgaaaacatatttaggaggtatgcaatcaaaatattaaatcagttaaataaagccgacatgtgcaatcacatttggtaagtaaataatttttaattagaaactttaaaaaatatatttagcatacttttaagrgtggagcatattttccgcacagtcagtactgctcctcaatttgtgtttaactttatttttctaatccagaaaccaatgagctggtaagtgtgtagaaaactaaaatacaaaagcacggatagttttagaattatcaaagagatttaatgttaattctgcattactgaataaagaaaaagttgttctctattttatggacttggttactaaattaataaactctaccttaatttttaattagaaccactttttctgggactgatataaagttttttcttattgttgttgttcttgcagatcctctatatatttaaaaataaaatacctctccataaatcgttaagtcgtggctcccaggaaaatattttgtgttccaaaaataaaatttatagtttgctgaggttgcagttctttactgctaaaacacataaataagcagaaagaaacccaagaaagaggaaaaaatgccaaatgccaatggagttatgttcattaagaaaggtgaaattaattgtgttaattaatggatactaggaaagcattttaactataatatagtttttaataattcacctagctaattttactctggggttcattaaaatatttttgaggatgattctcactttttttggttccagtacttttaataatttaatattgccacttcattaattaaaacaaaggtcaaactcttaaaatttgagctaaggctagactatctgtaatgagttttgtggtagaaacatgtgtacctcttgcaaatgaaccactggaaaatcactaagagtgaaataaaaaatcaaagcaatttacttacatctaatagcatttaaatatctaattactgaatttaggttaaaaacaaaatgctgcattttggaaagaagggtgktgatctgctttttctagggwaagaggccagagagtggtcacaactatagcaacttgtccccaagtggacagcataccaaaataaatgtccagggggtcagaaatgcttacgaagagagagggcaggaattctcagtctcagccatggcccagaggaaaaacaacacccatagtgttggcaagtcaatcaaagtcttgttaaatatgactttgatgaagttagtatttgcctgtatttatttaataatgctatttggtcaaagagctaaacattcaatactattaaaaataaatagacaataatctttggtatgggaaattaatttttaaagttctctgatttattttcttttactgtagtataacacttaacatgagatccagtgtattaacaacattttaaatgtacactacagtatttttaattacagagacaatgttatgcagcagatctctcaaatttttttatctggcataatcaagactttatgccaattgtaaaagtctatagtatctaagttaatatgccaacacatacaatgggaaaaattaggcattagattccatttgaaatattttgtgccaaaaagactgataatttctattgaatttccctttgatattattctaagtcatagtctattagaatatctacgtgccatagacatccaggaaagaatattacaataataggtgccaaaattcaagttatagacagttgttggaagctcagaacatatttccaaaaatagttttgtaaataataaacttgctttctaacataatttataatagaaatttaaatataattttcaaaaacaaagtttcaagttgataaaaccaactattcaatttcacttttttcttgattattgttgcatgaagaacagactataaattagaagagtatgtggacatgggcacaaaagccatcaaagataacatggcattgaatataatgttgggagctttttcaggacaatatttattaatgtcaatggttcttgtagtaaaaataataacatttatttraagtttattatctgttatcttgctagagtactttatgatcatttactatactcacataactctgttgggtcagtatagcccatctttcataggggataaagtgtgatttagacatttaaataatttccttgacatgagatactgaccaattggaggagcaggaactgaactggagcctgtgtgattttaattagtcctctacatactgcgttcttctcctgaactctgtattttgttcaaatcacataaaaactcagggattccctttcttctattttgatgaatcaatggatgtttagttgtgattatagtctttccttgtgatacaaataaactatgacaacaaaacaagtgagagcaatgcttatttctggagaaatagtaggaaaaaagttaatttaggtagaggttgagagataaaaatccagatcaagagctagtttgaattaacagagtgttaatattaagcaaaataaggtgagcagtaggcaaaaataaggaaagaaagttttcagctatttctcaatgtgatgggaaatataacttttctggttatggatgcaattgaaaggaaatggggaagagaaggtgcatcttagaaggtcaagagatggtactggcaaaacaagcttagtgtgaaagaaacatattgtaaacatacgatcaaccattggtatatgccaaatatattttattccaatgattaacgtcatactcttactggtttcccatcttgttccctttctttccacgtggttgaggctctttggtcgctagacacggcctactggttgataacttttccatgagttatgaaaagtgtactcattttatatttctgctgtaataaatcaattaaaatttagtarcttaaaacaacatacacatttgttaaatgtattatcttatggttctataggtcagatattcaacacaggtctcactgaacaagaatcaaagtgtccaatgagctgctttcctttctggggctctatgggaggagctacttttgtatgttttccagcatggctccttttcttctatctgcaaagccagcaacgccaggctgaactcatctcacattgcataactctaacctcttttgtagtcatctctctctctaattctcttctgcctctcatttttgaggacccttgtgattacatttggctcacctggaaaattcagaataatccctccccaaatcctaaaatttaatcgcatcttcaaagcccactttactatatagggaaacatatttataggttgtagagattgagacgtggacatagttgggacagagaaggactttctgcctaacacaaagggtttaataggttcaagtcaaaataaagataactcagcagtggcaaacwgtttgcttgtccatcttaatttgtcttcatcccattaaagtaactgaaaaatctctttgattctaagataactatcttatactccaaaaatgaaagagattgaccatcactaatcttaaactctgaagtgctaaatgttccaaaatccaaaattttctgagcactgatgtaactccacaagtggaaattttcacacctaacctcatgtgacaagtcatagtaaaaatacagtcaagactttgttgcatgcacaaaatcattaaaatattttataaaattatctttgggctatgagtgtaaggtgtatataagacataaattcatttcatgtttagacttgggtcccatccccaagatatctcattgtatatatgcaaatattacaaaggcagaaaaaaatgtgaaatccaaaacacttccagtcccaaacgttttagataaggaatactctacccttaattagatccttaattgactattttgcttggtttccttcttgttttcctcaatctgtccaaagttaaaaggggggaacaaaaaatgtattaagtgtctactctgcaaaacagtaactgctttaaatatatgatttaatctttcacttatgtagtggtttttttcagggaattatgttgtacaacttcaaggatgtcaccaccgtagaatacttccgctttcttattacccrtttttgcctatagagaaaataaaccccaaagtaacacagctagcaagtaaaagtgcagttgaattcaaacccagatctctctgacccccaaagcctattatttctggtcaagtttattagataaaagattctgatatggaaatttgcatgcaagaattttgttgagatcaatacctgcaaagcagtggaggaaattggattgagaagagttgaactgcaatgaagtctcaaaaaaaggcatcagctaatctcatggggagctctagaattggaatgactcttgacagtaatccctgaagcaaaggaaccaagtcttttatcttcctgctagccagtcaatagatacgacgtgctcccagggagagtgtgtgacctcagacaaggaggctccccttgcccagctgttgtctgttgtcagcatttacagcagctgggaagaatgaatactttagtctttaagggaggggatctgggaatatcaccaaagcatccactccaccatgctcttaccatgtgtgtttattacaattccttccattcattgcatttgattttcttccctaggtttctaggccttcatatttcctcattcctcccaggtgatacctttggagcgtgttacttgacattaaaataaaaaggttctggagcatttaaatagcggaaagaaagacaagggaaagagagagaagcatgaaatgagggaaatagaggagataaaataaaaactgaaataaagctaaagaaatctaaactaaggcacaggatgaaggccaacatggaaaccacatctcaaattgttctccttttgggattatggttgatggatccactcttagagatcaattcctgtctataaattttaaaaagtagttgcaagccagaaaaccttgtggayacaattcaagccagaggccatgaagactaactgacagtcactatttagagaggggagaactaaatctgaggaagtagaagtaggataataaatgagaaacagagtgaagagctaaaagtagtttgagctggaattaatttaggagtatatcctgaaagaataaagacatgtggaaaagtgctacagacatggatggtgtttacagcctattgttttgcayggagggagtgatgatggggcttgagtacatagctcttagaagggttatgtctactcctcatttttgcctgttttgcaaattgctcaattcttactcaaggtaaaaaatccctttatagcgatgatagggcaacagcaagtacagacagttacaaagggaaatatttctgatttgacagtagcaacttctatactttgcagtgagaaaccaataattgtttgcagaagattttgtaaatcaggaatttwttctgtatagatgctgttacactgaagtctattttatcaacagaaataaaaatgtaaatattaggagacgagacaacattgtttttatatttctgggcaagcactttcattttcccctgaaacatacctggcatagtctttcacagctaacaaatgtcaagacattgcaaaatgtacatttataaataacatatgtaaacatagatgtgaagattataataaggacatgatctcttataccatagctacaatataaatccatgtggctttcccattattgcatatgrggggctatttttctttaatatattttttatgaaaaatctcatatgaatcaatatatacatctttctcaagaatgtatcagttctatartaacatagataaaacttaatttgattattggattaagtgcaaaactagttaaaatattgtcagaaaatttgctccttaatgacttaccacaataaaatataattttaaaagtactttttatagataaaatttattcattaaggcacctagagtattgcctttagaaagtaaacagtgttgtttgatgatacttagtctattatgtaagagctactaaattgtttctttggttcgtgacatggtgtcagagctttgaagtagaggagtttgaatttctgaacattttcagcagcacagtttatgtttacacttaatattaggttgatccaattaaattgctaatattcaacttttcacttaaaaaagcagaaaaaatgtctgttgtaaatgaatattacaagttttaatattactgcttaaagttatatcacagtctcagtagataaaaatgtgaggtttaaggaaccctaaaaggtgttaaaagttacactgcagaatggctgatggttcagcggtcaggtaagtggtcatgatgatccagcttccaaaacaggagatcagggaagaaagtcaatcartcatgcagaaggaaggcttacacacataacaatgaaagagaaaacccggaggcaacacaagggagaagaggcctttttatgttgggaggtcagagactcaggagagcaactatagccaggaaagtcacatcgcctgaaagatcaaaacaagaaggcaagaaaacaggccacaggaaaatgatacttcagagggaaattcctctctgaggtaggctcttctaggtagatatgtctatgcagaatagaacaaatctagaggtagaattgttggcaggatggttataattagataataaaggtagattcttagatagctatggtacgatatgaaaatcaaagtaaatattattttcaccaaatcataaagtacttctgtaacacataaaaatgtgccaatgaaattactcagaaatgtgaaagtagttatatataaaatgtggatatctgaataaattcacttggacagttggcccaaatatacaacaaatattcaactaataaatcaatttatattgtattcatctaaaatgaaactttattggcatcttagcactgaacataatttaagaaacatttacggaatcaatgtgttagagatgtggcatgagggattctgtagtttattagtcatagaaatttgaaattttaaatcttaaaactatgtatgtagcttccaataactttttcctggataaaattaatggaccaacttcacatgttaaccaatcatgattttggatccagatgtcattgaaaagaatgacaaattggcagattgtgacttatatctcaacagccagtgaaatattttaatgatatgaaaatatagatataagtcacatggatctcaaaaattaacaatctaacaagcattgttagtctttcaagacaaagaactttgatgaaatatttttaaaagaccatctcatagcatcatctaaaggcgtatawcttggtccaagtctgacttcattttcttttgaatgttgccacgagtgtgtgaaagtgcaaggaagccatcagccacttgctaggacccaaaacgggccacagagaaacactatgtactttaataacaacaagtcaaacatatttcctgtgaaagaatgtaactaaaaagtctagaaagagcaaacaatcagtaaaaagcratcatttcccaagtgaagccacaccaatacttgctaagactagtatgcttgcaggaatttccccgaaatacattttgccttttttttgggggggggacagagtctcactctgtagcccaggctggagtccagtggcctgatctcagctcactacaacctccgccttccgggtcctggttcaagcaaktctcctgcctcaggcttccgagtagctgggattacaggcacacaccaccatgcccagctaatttttgtatttttagtagagacagggttttgccatgttggccaggctggtcttgaactcctgacctcgtgatctgcccaccttggcctctcaaagtgctgggattacaggcatgaaccaccgtgcctggcccccaaaatacattttcatgtgcatccactataaagtggaaagggcgcagagtgaagaggagatcagactcttcagatatatcttccatgtgactaccagaactaaagrcacctaaaagtgatcatgaatgtcttagctcagagtgctgtattaaatttccataggttgagtggcttaaacaacaaacatttattactcacagttctggaggcttggaagtccaagatcatgatgtctgcacatttggttctggtgaggaccctttttctaattcacagatgtacatcttctccttgtatcctcacaaggtagaaaaaaagagaaagagagagcaagttatctcctctcttcttatggcaccactaatcccatcatgagggctccatcctcaagacctaattatctcctaaaggccacatttcctaacaccatcacacgggagattaggattttaacattttggggggactcaaacattcagtctatgaaaataaatagtattttctcagtaacaaaaatatgtctaatccttctgtcaaaatagaatcttctgttttcaatatgccttctgtgtttagtaatctctgagggcctttggctacagagtttaatttctatgaaaattaaaaatctacattattctagtcctgtattattaaaccaccaacttttatatagaaatataaaatggtcatttgttcagataaaaaatttatattttttatattacaaagagtccttagtaaaataggggcttggggaatgttctctgctcttttcagcctgttttcctagcatctgaatgagcatgggtttttttgttctcagatcttgccattagctgaatcagtgagtggcaaaattaaagggagaggggtatacaatgtaatgcaaaaacatacacacttacacaatcacatgtgcacctatttttaatcctaagaaacttcccattaattagaggaaacctctgatactctgcacttaacagtcccaatttttgttgtactcacttcatttaagagcaataatgaagaaaatgaacaagtataggctctatacaataatgtgggaaaacaaaaagagaaaaagaaagggaggaaggagcaggctgagaaaagcaacaagaaaaatattggtatgagcagaaggaaatcacactgttttattttatgaacctctcacttcctcatacccccaaacaacctcgatgcaaaacaacaaatcagtatttcaatacctcagaatgtatagtgacacaaagataaaacccaaaccaggagagactaaggaagatgttaaaggtaaatataaagcagttacagaagtgaaagtcaaaatagaagcagtaaaaagtcactgatgagagtaataaggggctcagagaacagaactgataaagtaagcaaaatgagtcaaaatgaaagaatattggaagatgattgtaaagaaaattatatatatatatcacagaaaaagttatgaaacaaagtatagaacactgtctagcatacaataggcattaaataattgcctattatttctgattgccagaatcagaatattttttattgaatattcaataaaattttcaatattgaaaatattgaaaaataaatgaaccatcaatagaaaattgatgtgctggtagaaacaaactgtataaacaggaaaatttaaaacatagagaaagatataatttaagaaaacttttgagaaattattgtagacttgaatctacagttttatagggccaaatgtattctaaaacattgtggtatggttgtgtccccacccaaatctcaccttgaattcccacatgttgtgggagagacctggtgggaggtaactgaatcatgggggcagttctttcctgtgctgttctcatgatagtgaataagtctcacaagatctgatggttttaaaaacgggaatttccccgcacaagctctcttctcttgtctgccaccatgtgagatgtgcctttcaccttctgccatgattgtgagtcctccccagccatgtggaactgtaaagaaaactctttcttttgtaaatcaccctgtctcagatatgtctctatcagcagcgtgaaaatggactaatacagtaaattagtaccagtagagtgggtcactgctgaaaagatacccaaaaatgtggaagcaactttggaactgggtaactgggcagaggttggaacggtttggagggctcagaagaagacaggaaaatgtgagacaatttggaactccctagagacttgttgaatggctttgaccaaactgctgatagtgatatgggcaatgaaattgaggctgaggctgatggagatgaagaacttgttgggaagtgaagcataggtgactcttgttgcattttagcaaaatgactggtggcattttgcccctgttcaggacgtacaggtttgttacatacgtaaacatgtgccatggtggtttgctgctcctatcaacctattacctaggtattaagccccatatgcattagctatttatcctgatgctctcccaccccccactccctgacaggccccagtgtgtgttcccccttgtattttttgagagtgtttcactctgtcacccaggctggagtgcagtgacactatcttggctcactgtaacctccgtctcctgggttcaggtgattttcatgcctcagcctcttaagtagctgggattacaggcacactccaccgtgcctggctaatgtttgtatttttttttttagtagagatggggtttcctcatgttggccaggctggtctcaaacccctgacctcaagtgatccacctgccttggcctcccaaagtgcttggattacaggcatgagctgccacgcttggcccatagtggaatttcttaataatacagagtcagtggaactaagtacacaaattcaacaaattttaaattgaaggccccacaatagcttccatcagtatgtctagcctgttaaatagttcgccttttctgaactcataattttagcatggttgcctaggatacttcattctcaacaaatcactcagatcccagtaggcaaataggtagcagtgggacagcattaaagctgttttagtctggtcactttataaagacttgttatttccagctgtaccccctaactattgtggtacatgactttattgtgctatgaagccactccatccattcatgcatccattcagcaaacatttgctgatcccccttggtaggctaagcacacatgaatgctacttcctcacaaataaagcttaagggtttgattcttgtgtctcacatgtacgctgcatggctttaaatcacttagcttaatttacagatttctaagtccaatcttatcctttatayataaatagcaaattttcagtgcaatgagccagcatctccaatagtagacagagccactgtcttccaggcctgtaggtaatctgagtccaataattcataaaactttgaattgactacacatgaaactagcttgtgttatgtttctcttagaagtaaatctttcattttctgttaattcatatatagctattagcggtagccacaatagtggtttaaatctggattcaaaaaatacaggagtttcaggttaattagataaaatttgaatttcaacactctaaatacttgtggcattttctttcaaactgttaccaacaaaaattgaatgaaaatattgttattttgtttgagatggctttgagggaaaaggaacataacgattttactgctgtaatactgacttaaagtgatctaaaatactcatttttgtatatgctatgagactgcactgattagrcaccaaagaagatactattaatcatctttaatgcaagtctaattataagataatgtcaatgacatactgcaggatgttgtcacaagataacttgtcttctctctcctgctgttacataaatgctgagacaaaactgaaatgtttattctcaaagcaggagacattgctcttgtaatcaagctctatttcagtcactttrtgtctaatactgactatcagattaatgcttgtattgattctttctgtatgttggatataggtgttccagtagtagcttgaggtatctttgcataaatttttaaatttatgacctttatgtcaggaytatatttgatttcagtatgaaaatgscattttttttcacctgtgacaattagtaaattcaattagatatgtacaggctgatttctatataaagcaactatatggttcagttgatcttattctttcaccaagtatacagacaagtgagaatttttattatggccttagtataatggtacattgcaaagattctaaatgaatatgttttatattatggatacatatatttgagatatgtcctacttattattttagagggattttaattcaatgatcaagcatggacattgaacaaagcaaagtttagcagtatgttgttgagaggatagaatattagcaaataaaagaagaaaaaaatcaatgaaaatcatataaatttcaattcttaattatataatttctgggataatgtcaatattgttaatgttctatatcatatgtgcacttttcttatatttctacatcaaccaagttatagatctaagatgaatatgtatttatgtgakacttgagtaagtaagcaaaaataaagcccagaagaatggagagtgaactcatcttatctatctttggctggcaattggcaataaggatatgaccttgtccacaggaaggcagtgtggtgcaggggagtaaacatcagatttgatcaacctacatttgaattcctgttctactacttacttgctgtgtgatctgggcaattatttcaaacccttgagcctcacattccctatttgttaaattgggagagttttgaagcataaatgggattatgcagttcatggagaacaaggactgaggaatccggagacccggtttgaagcttaaccatacctttagtgttttatttaaattttattcagttatttaagagaaataataaaacctacctctcagtagtgtcttgaagattatgaaatagcagatataatacatttagcagaatgcctagaatataagggatggttattattaatataaaaaagcttycagagagtgatagaccyaactcttttatatagggtggtcagagaaggctttttgctaaatggtatttgagcacagacttaaaaaaaaaagatgaagaaaatgggacaggtggaaatctggaggaagaatattttgaacagggaggaaaatagtcacgaagcatcaaggmcagatccacattaggtgtactcaaggaaagaccaatgtagcaagagctgagtgattgaaacaaataaataaacaaacaaaactgggcagggagaatgaggacagaaaaagagcagaggttcaggccacacatgaccccagagatagtgatgatgatttggttttactgaatggtaggatttggctagatgaacagtgaccaatcctggtttttgcatggaagacgtagagagtaaggatttaaatggtgaaaccagttaggaacctattgcccaagaccaggtagggagtaatactggttgaactaaggtgatggtgttgaaagtgatgaaatatggctgcattctggatatattttgaagttgacattaaygagttttactggttgatttaaatgacatgtagaagacaactaaatgataaagatttgggcctgagcaactacaagaatagagttaccatttacaaagaggaaaagaccaggggagaaatagattgatgagaaagcaattaagagttttagattcaatatattgccatataccaaattcaagggttagagcagttatgaatgttaaatgtgtgtcaatgattttaatgcagtcatcattgagtgaaatatcaattatctctgttaacttcgtaaaagaagttctgttctgaattttagtccaactttatactgaatcacttttgcatgagttaaaagttgcaaagttattgtaaaggctctcaaaatatatcaaaaccaattttatgaactactaatcagtaattacacagttaaataaaaatgtacgtgcacttagattcactggcttttatgtattaattataaaccagatgatatttgaacactcattttgtaaaatctaaaagtataatagttaggagaccgtttaaaacctcttaaacgtcagacarttttactaattttcaagtaattaatattgctaacttcaaagataaataacaccattctttttgacatttattttaaagaagagccattktttaaatcttacattttgcaattgaatagcaaggtatgtagtaagtttaaagactagttcctaggatggcaaaaatatttatgaatttttaataatagtgatattatgctgactattgtctagcaatccagctatcttaccgtatagttttccatctataatttgggtcagctatttccttcttgttagagcatctaatttaaccaaatcatactgattttcttctaaagtagaaagagtggtagaacttgattattaaacacaggcttcatcttcagaatgtaatttgagtcccagcactgccaatagttagctatataatattgcgttagtgatttcattccttacagcctagtttccctagcaaaacaggcgctgatctcgtagatttaattggggaataatgtatgtaaagaacttaaccgcataccagtgaggtggaaagtactcaaaaagaatgtttgctgttmgtattctttgtattgttgttatttcttattactactactattattattatcatgctcattatattgtgaaaaatctattcactattctaccttccaccttgttaatgaaccagtctcatgcatgacaaccataggattaagtactaaaatgttttaattgggaaactttttagctaactgctaaaacaaacaaaaaacctatgagagaaatagaactttaagacttcactatcaaataaaataatataaaggtattttcttctcaagacagttttgggtatttgaaattaataaagcctggaatgattttgtgtcctctgctgcggtatgtgagtaattgtggaaaaattacatgatcttctgccaaaataaaatgtacatgggtttaagtctttctgattctaaagaaataatcaaaaagtacacatgtatttataagtgtctctgtttctttattcrcagagtttttgactgtacacaatgtttgcaacagaaaaatctcaacaataacaacaaaaaagttaacttcagaaaaataaacamgtatttactccattaaaagttattaccccttccttggctttttagaggccagcaggcaaattctgaagtacagcgatactttgttgacaccagattaatcatatttagaaacaattgaaaggagactaaatttaattgtatttttccttttaggttaatggaactgaagaaggtaatatgattcagcaaattgataaaggagattagttgtcacaagtgcatttttaaaaataggtaaacatatcaatatttttatatataccttctataaatatgcttattattttcccagaaggctgtaatagcttttttggatactaaggagtgcctgaagtgaatttttatggcccagttataaactcctaaaagaagggtttataatggaaacatggtgagatatttaatattggcacttaaatagatacttctgagccccatatttgtttgaaaatagtaacagcagttacattttctcccagaggtatattttctttagctacatgtctaagtatctctaattacatcagtgctstttgtgcctattcaaagttgatactaaatattgctttccattatcatcactttcttattttagagctttttaaaagtactctacccaataaaatatctgtggaaattgcattttgagactgagtgaaatgttttccattgataaagattgaaaggcaaaacatttccttttcttaaaatcaaaacttctagaggcaattgacatttgaataagacaaagggcaaaagacatttgaataacttgttttagaatagatattatctactttgattagaaaaagataaggatgacaacaataactcatttattacataytagtttacagtttactatgcactttataaacatacattattttattcaaaaagttattttaaaaattaaaatgagcatatatgtttgtaaagtgttactagataaagggttctgatcgtgagtcatctaggctcttgatgtattgaacaaggatttgaacagcatgcatgaacaagcaacaaaagcatagatttattgacacaaaaggcaacagaaacatagatttattaaggtgaaaataccctctacagaattggagcgggctcaagcaagcagctcaggagccctggttacaaaatrttctggggtttaagtaccctttaaagatttcccattgcttatacgctatgtaataaaggatggaagtggaggtttgactctggccaatcagaggctgaaatggattggcaccttatgcaaatgaaggattggcccacgcttggcccacgtccaatcagaggtactttccattttccatctgtgacgcagtggaagggggtgggggttgtggaaggagtagcatttgatcctttgtcacttgggcatggagaggtggggttttccttttgatccagttctaggacgtcagcatgaattgaccttagcttccctgcctccagaccctattctcctgcttcatgtgggctactctttctttctcatcagccagataaggatttagttagttaatatttgaattgaactgaatcagcatctcagccacatataggtgaaacttmaattagaagtttaaggtaaatgaaacttcatgcagtagtccgtgtctataataatttccaaagaaactgaagcttctgagttcatatcacaaatgggatagatttaggacaatagcagccactttcacttttaagtctactctgatgatttatttttcacttcagaagtacagagaaaaaatagattctgaaatatatttattaatataaataggatagatactgctccccacccaaatctgctcagtttgtaataaggtagatattttaccaaaacttactctaaatgtgattttctagcagttatattggcaaatgaattaaaattgaaatctgaaaaccctcttgcagattagctttaggagcctaaggatcaatgagacaagagaacttcacaaaatgtaaacatatttttgagccatatcacaatgaaaatattaccacttgaattcatctttaatacagagtaaatgtattataatacaaaatataaacagaatacatatataaacaaaaaattttgtttatataaaatataaacaatgtatatatattgtttagaataagactatttcttttaaacaccagttttctatgcccagggctgcattttagttagaacttctaaaaaaagttaaaataatcaataatattgatgtttgttcttgaagtttcagtttggatgtattcaaagcctcacacatatctgtccaataaaagcacagcagtataagttgacattatttaagaaattagatgtcgctcttccatgtcccaaataccagccagacacaatgtctattttgctttttgatctgttcaagcatattcctctttggaaatccatggaccatatggaacacaaggactttgagactgttcttatcttcatgaaacaagccagtgctttggtattttacactcatttgtcacatagtttatatcttgattgtaaaggccattcagagctaactgagagsctgtatgtctctatgtctcgtaagattgttcactgtttcctgctcatgatttctttcaactttcctggaacactatsagttccagtccaacatttttttttttttcaaattaagtgcatttatcttcaatcatttcaacacaactttaaggataatgtggaagctggtaacgatcaccaaaccctcactaagtaacatttttcatattgtcttttgccacacagcaaatataaacaaatagataatcataatttccttaattgtaactaaaagcccaaaaggagtaatgatctgagttttgcaaagtttatatctccaaaactcagcagttttacagttgactgagaattggacaaagaaatattcagaagtatctttacatgtgtatttcctagtacaattttgattacagcatagctttatttatagtttctactctaaatttaaaaatgtgttatatatcatattaacagttgaattcactcaattactttctcactccttttctttttcccatagtatagataattttgcagaggtttattttcttcatacgtaattacagtgaatttattttttgaataaaataaattataattgtgtaaagaatttttttaataggacaaacattccgctgtcccagagtaaggattctattattctcctttctctgctctctcaatcacaataatcatattcaaygacaggtttcttaatagtgagtcttgtctccctaatgtgctatgcagaacctatggcctggaatattgtgaatgtttataaatgtttatattttagaagcaaccttatttcctgatttcagattcagttaacccttactgaatgccttctgtgtgacagttttgtgataatgaatttctcacctttttgtcacatctatttttaaactgctactcataacgaatctgcaagataaccattattgtcctgcttttaaaatctaagacaacaagcttaagggtaacaatgctaatgaaattaacctagctatgaagcaacatatccaggattaaacctagatgttttgactgcaagcctaacccatttttcaacatagtccaagattgtttgttatttatgtttgcatcagaatgatagcctgttaaaaagaaataaatggactgatacaaaccatcagggtttcaatagctatttaatagtactaatgacagctaacatttgtaggatagttactttgtaggagacactatggttcactttgtattgtatgctgtattattataattagaaggaattgctattttacactctgccataaaggaaatatgtatactcacatgaatatatgtgtgtgtgtatatatatatatatatatatacacacacacatatatatgtgaatatatgtgtgtgtatatatatacatatatacatacatatatacatacatatatgtatatatacacacatatataaaatatatatacatatataatatatacacacatatataaaatatatgtacatatataatatatacatttataaatataaaattttttatatttatatttataaaatataaaatataaaaatataaatttatatataaaatatatatttttaaaaactctaactctagaagcattataatcagaggctgtgtaatgcagcaatatagagatgtacagagtcctacaaacaccagtgagatacagaaagctgcatttattaataagcaaatgatgaccaggcatcagcaaactcaagtttacttatgtttataactctgacattttttgaaagaagcaaattagtgtataatgaattctagaaggtttccatccaaactaggtaaaagttttttgttttattttctctccttttttactgcaaggtataaaccctcaaatatcctgaagaccttgctgtttaaactatccttctcatccaaaatattacagcagaaagctttacagaggtttatatttaattatttactagcagtcatagttaaataaatgtatactgtacaagttaaaaaaaaaagtaaaaaatcaccagaagcaatttattttactttccaattttcacatgtccatgcaaaaacttaaccaaaattgagctgcagattattatttagggagtttcttaaattgggtgaatgatttttaatcattttaaatgtcatttatcaaacttctctgttgaggttcaagaataatttttcccagttgagataaaaaagaaaattattcataaagtatatctcaaatttaatattctgaattagtggatacctcataattctaacagctcttaccattcaaaaattttatagcttagttcactgagccaggataactccactttttgttatatttcttgaagtcttatatgtgaacattaaagttgctagttatttcacagtttttattttgttctaatacagcatctgcatataacaatctcaraacaagtttacactaaatctttgaaattgtgaaattaatcataattataatatatttaaaaatgtagaakcctaaaactttagaggaaatgtaatcttggaaaacacctaatcattatggaaaccagcagggtgcagagaacttaagtgtcgttctgaaggtcacaagttaatttattagaaacaataaaataccaaatctgttcctatggtcctagttctttccattaaatatgtgtatctttataatcaagaacatgtacagtaactgtgagaatatttcattgttggattgcttacactaaggaagaaattgcccggtcagtgatgcctggggagcagacgacaatcttgttcattgaaggcaatggttacaattcgaaaaagttttcgaatggattgccagacaaagggagcgttgagtaaaattacctgtgcatgtagaaactaactaatttaaacccagtaaaaagggacttgtattagtccgttttcacactgctgataaagacatacccgagacttggtaatttataaagaaaaagaggtttaatggactcacagttccacggggctgggaaggccttacgtggcagcacacaagaaagaatgagagccaagtgaaaggtgtttccccttaaaaaacaatcagatctcgtgagacttatttactaccatgagaacagtatgggggaaaccacccccatgattcaattacctcccactgggtccctcccacaccacrtgggaattatgggagctacaattcaagatgagatttgrgtggggatgcagccaaaccgtaccaggacttgaggccaaaggtaagattttggtcataacccataatataaatcaatttgaagggtatatatgtttttaaacagcatacattttacaaagttcttagcaatgagtaagagtgggagggacatcctcttaccttccaaaatttcagaagttatcctgattctatgaaacataactgaaaaaaacatagaaatttttcttaaatrtattgacatcaaaagctaaaccctatataaaaatatatgcaacctacagaatgggagaaaatgtttgccacctactcatctgacaaagggctaatatccagaatctacaatgaactcaaacaaatttacaagaaaaaaacaaacaaccccatcaaaaagtgggcraagtatatgaacagacacttctcaaaagaagacatttatgcagccaaaaaacacatgaaaaaatgctcatcatcactggccatcagagaaatgcaaatcaaaaccacaatgagataccatctcacaccagttagaatgacaatcattaaaaagtcaggaaacaacaggtgctggagaggatgtggagaaataggaacacttttacactgtaggtgggactgtaaactagttcaaccattgtggaagtcagtgtggcgattcctcagggatctagaactagaaatatcatttgacccagccatcccattactgggtatatacccaaaggattataaatcatgctgctataaagacacatgcacatgtaggtttattgcagcaccattcaccatagcaaagacttggaaccaacccaaatgtccaataatgatagactggattaagaaaatgtggcacatatacaccatggaatactatgcagccataaaaaaggatgagttcatgtcctttgtagggacatggatgaagctggaaaccatcattctcagcaaactatcgcaagaacaaaaaaccaaacaccgcatgttctcactcataggtgggaattgaacaatgagaacacatggacacaggaaggggaacatcacacactggggcctgttgtggggtggggggagtggggagggggatagcattaggagatatacctaatgctaaatgacgagttaatgggtgcagcacgccaacatggcacatgtatacatatgtaacaaacctgcacgttgtgcacatgtacactaaagcttttaaagtataataatactaaaatttaaaaatatgtatatatatgaatgtcatttgactcaatgttaatcattaatttgatacataaaactaagctaatcttaatattcaccagaaaatagtcaaattccaaaaaggaatagaaatatatttatatgtaatcactttatataatatgtattatatattcattatttcatatgcttatataatgtatttacttttagaaatacatattttaacttttaaacctgtactctggtgagactctataggagggtttttttttattttttgtttgtttgtttcaacrtagatcacatcagaaagtcttgaaatgactaggtgctttcttcagagtatttaaattttatgtagttgttaaaaattatgttcacaacagataaaattttaatggataagttacacagggaataatgtcaaatgactcagcttgtcagaaatgttaagtgcccttcacacatccctaagactggagaatgtcatttcacacccgtgtcaacctatttagaatgaagtcaaggactgtgtggagcttttattytcacttacacaggacctacaaaaaaagtttgataatgttatgctctagagacacttaagtttacctcaatgtatatatttttttcttacagcatacctattctgttagttacagagacaaagaattttaatgttgtaagaaacttacagaaaatgtagggaaactctttaaatacacaggttaagaaactaaagctctgattaattaaatgacttctccaagctactgccttttattattgacacagacaaaaccaaacccggtgcctggcttctagggaagggctgttytgcagctgtaccacactatgccatctccaaaacaatttgtatgtcatataatattgaaataaccttcttactatcacaggagtcttttcaactctcatttttagttgctcgagcaagttttaaaatcttcccagagcctgctctgttttacttttggagggtaaattttcctgaccccctctagattctttatactcacttatctcggacttgttctatcccagtctctcacactgattgttcaccttctaagctccagacatttgtaaagggtatatagatccctctaattcatctactttatatttttattgatatattttgaaactttacatcttttgctgtaatctatttaatatttcttttcttgaattatctgtataatatcacaacttgtaaacttaaaaaatgtacaacaatttgttaaaaccgtataaatattgaataaaaggacttagtgtggatttagcctttaacttccaagagcaaatctctactcttaatgtgctcaaatctctcccattaagaagcaaattctatactaatttgccttgcacatgtctttctggtgaatatcctttgttgttcctcctctttatagccaaaatactgaagatgtttttcatattttctattttcacagctcaagtctgatccaatactgtctacacattcatcactcttgccctgggtgccaatgacttccatctctctttcttcagggagatttctgttatctgcatcttaaatgagttcttagcaagatgtattacagttagatacctgaaaccccctttttcccttggtttctgtgacattatatctcctactctatcccgcttcaggcttcttctcctttacctggaatacctcaagacttgttactaggccctttcacctttagctttattgaccacatatgtaacctcgtaacttttatatacaacccagacctctcctctgagatccaggctcattttcccaactaccacattggcatctcytcttgaatattttgaaaataatttaaatttttacatgtaaaactgaatttatgactgtccccctcaaaattaatagtgttccctatctcccatctccatgaatggcaatgctatcctttttgttatgcaagtaaaagttctatgtcatcttcatcagctgcttctcactcaacatcagtctgtttctgtgcctggccccatctgggatgctgaaatggcgtattgtttttttcattctcatgtccttgtgtggttgatattattattttctccatgttgcactctccatatccaatccattgctatatcactttagttttgccctgtaagtagctcctaaatccatcacttcattccatttcactccatcctagtccaggctgctgtcatctctcacttgaattactcaaatgacttcacggtactcctcatctcactgacttttttttttttttgagctggagtcttgctctgtcacctgggctgcagtgcaatggcatgatctcagttcactgcaacctctgcctcctgggttcaagcgattctcctgtctcagcctcctgagtagctgggattacaggcacgcaccatcacgccttctaatttttgtacttttagtagagatggggttttgctgtgttggccaggctggtctcgaactcctgacctcaggtgatccacttccctcagcttctcaaagttctgggattacaggcgtgagccaccgtgcctggccttcctcgctgacttttgctctccctcagtctatagttaaagtgatgttttcctaacagatctctgatcatttttcttatatgatcacctcctcaactctccttaacagtgtattttaaacctggtttgatctgtcacctgcctttccagactccctgagcctcaggctcatctattaaagccacaccaaattcctttgctcctttccccgggctctctttcctcccctttttgctatgtatgtcttgcactttttgcagatttcagttcaactgggtcttgagcagggaattctgacctgctttcaaaagtcaatgtgcctgttacattcttccacatcacattgtccctttgtagcattatcccaatcagaatttgaaatctattttrgagattattctaacaacwtctagcttcccaatatattgtttgctgtacaaatttgtgtttgtcttctcttactttttatcaccagaagttagtatggtatctgctttatagcagcaattcagcaaattttttctgaataggtgaatgtttatagacttctggtctttctctgtgcctatgcatacacatacacaatcacacatgcatatacatcatatcatgctcatgcatgacccatacacagaaatacctgccctttataagggcataaccacacacgtaaacaaaattgtgataataaaacacttattacttatacaacttgattttctggtatatcaatatcacttaagcattttactaaacaatctcattaatttttctataacatggtttaaatggtcacatattattctactatattaatatgacataatgtattaaaccaatgcccctatattttactgttagagatgatactttggttaacatctttgtatacagagctttctttgtatctataattatttccagaaaaaaaagaaagaggtaggggagaaagatgagaaactattaggatagaagtttttgtctgaagaacagttatcattgtcagaaaatgtgttaagatgtgtgtattatactgtttatcttacagccaccttgaaagatggttgttatgatcctattatgcaggaatttaagctaaaactcatggagtaaaataaattactgagattacatagcaaccaagtggtagaccaacaatttgaacccagaactctgattaccataagacttgttaaataatacactttaaatattttgatgtttgttgtcagacattctccagagattttataataatttatagttctttactcccgtatctgggccattaccaacttattaaagaaaaatattttggccattagaagatacaaatgctccttgacttacaatgggtttacgtcctgacaaatccattgtaacttgaaaactacaacaaaatgtcaaataaataaacaatgcacttaatacatcgaactgaccaaacattataggttagtctagcctaacttagacgcactcagaacatttacattaacagttgggaaaatcatcgaacacaaagcttattttataacggtgttgaatatctcatgcaatatattgaataccrtacactgtagactacagtactggttgtttaccctcccgatggtgtggctgactgggagctgcagaaacctgccactgcgcagcatctcagggktattgcatatcactaacccgggagaagagcaaaattcaagacttcaagtaaggtttctattgaatgtgtatcaccttcacaccattgtaaagtcaaaacaatcattttaagtcaaacgagcataggttgggaccatctgtagaggcattcactttaataaaattgtatatatttatatttcaatagaaattcaacacattttcatttttctgtgggttatctagthttttatcattttgatttgatacaatttttaaaatatcattgattcctcagagctctttttatcttaaagatatttatgtagctcagatgtggtaactatttactcattttgtcaaatttcttttaattttatttgtgggatacgtatgtgcacatatatgtgtacttttagtgttacagtcattttaacgtttttatgtagccagatttattcagtcataccttttgtcatatacaagatttgacatttgaaaacatattaacaatggataaatgttaaataattcttgaaagaaatgtgcttggaaatataaatacgtttggttatataagtgaatgcagataaaatctattttagatgtgtcttgctgaataaaaatgtcttagagataggaatagcaaaaggtttagaaatagaatgaatatacacatgagatgaatttggagaaaaatgaatagaaagttacacagaaccagactttataaaaatatacaactatattaaaattttaaaatgtgttaagcttatctgaaggaagattataaaaagagtatatatatacatgtgtgcatgtatatgtatatatatgtgtatatatatatatatatttagtgtaattaaaaggtcagaaaaattgatggaagaatacctgagacatttgagtgtgaatacagattttgttagttgtggtatcagagtgttttggcttatagttgacccttcaacattgcaagagttagggataccaacttcctacacagtcaaaaatctatctttaacttttgaatccctcccaaatttaactgttaatagcctgttgttaagtagaagccttactgataacataaacagttgatttacacatattttgtatgttgtgtgtactactacactgttttcttacaacaaggtaagctagagaaaagatagtgttattaagaaaatcataaggaggagaaaatacatttacagtacttgtctgtttataagatgaatcgtttttgtctgaaatggggacaaacacaactgcagactttaatctacagtacatatcaaacaattcaactttttctttaatgtcatgacatttttctgcttctcaggaacacatcaagcatccttagtagcatttcatgtgggtctcatgatattattcaaggtttatggtattgccctaaacacgatgaaaagtacacaaggactgagaatgatggctttttactgtgctacggaatttactagagaaaggaactgctccctcgggatgattagcatcacgtggagttttaagcagatactcacaacacttgagcccaccacaatggcaataagagatagtgacaaaattatttcagtagtaccttatgtactacagttaattttatgcaagtccgatttgctactggatctttatgtttgtttacatttctctcagctgcaaatggtgccatgtattgtttgcarstgttcrtgtgtgtatgtttcaatacattttcacttttaataataaatgtatgtatactttatggtagtaaatgataaactaaactagcatctacatatcttttatgcgctcatgacatatctaactttttcttcatgtttttccatatttctaggttatagggctcatctgtgagttttttcaaattgtcccaaatcttcaataagttttacaatatatttgttgaaaaaaaatccacgtacaagtagacccatgcagttcaacctcatgttgttcaagggccaactgtatttactcattttttagcttgtttttaaagcttggattcattatcaagtaaagaaccaaaaatatgaaatttaaaatactatatttgaaatttagaagaatcagtgagctagaagaataggattataacataacttagaaatggcaattgttctatgtatttggaaggttgttaaatgtatcctccaatggcattttgcctgcacctcaatatataaattattcagacttttccagttcagcctacaatcaggtagcattaatattgtggttaattttaccctgtgaaaatgattgctttgtcttacaagccttctgtattccccatattgctagaaccataccrgtcacataaacaattgcttattgatttcagaaatgtccttattctgttcttactccctccaagacaaaaatcygaagtacttccatgataattaaccaggctatgggcgtttttcctgcctccaacacctagggtttattaatgacaagttctataaaatcccaatcaatcacacttactctgatatcctcagagaccaaaacttcaactgagtaattgatcattaaaccgtgaaagagggatgtgcctactttgtcaggagccaccatgttttttcttcataaytgtgtttgataaaatatgttttgtcttcttacagtgtgtgttccacagttagcttctaatgactagtaattatcagtatgcccccacaacctgctatttatggtttgtgaggattgggggagggtagtttctgtttttcactgccttatgccctatccagactgttattcttctaaggacttctgtgtaggggcatggagaggatcatggttttttttgaacattagtccctagttctgtctattctatctctcttgttgctgatctctgttgacttccattcacttgccaagagtctcaaagtccactgaagcacatgatttacagcatttgtcttcattcttattgcatcttcatttgaratatttactctgtcttaaccaaagattttgccrtatgattttataatacaactcattagaaaagaaaaacctcttattaatttcagttttcagtttattttaataaaacatgaattgttttggccaacgaaattttagcagctatgaagtgagttgaggttttaatttgcttgtgtggttaggcttttgcctcctgtactgtcactctcartaagaagagcatacccaggtagcttcttctccatcagcctgccctctaaaataaacacacatagaaaagactgaaatcctggagcaaagttctccagwctcacaccgtggagcaacatggtccagcctagatcaactgaaaatagtcaaaccacagtctgataagcacgagacacaaygttattggargccgataggatttttgaggttgtttgttactcagcaacgttgaacaatagacataatagcactaactacatttgatgaataaattaaggacaaatttcaaatccatgtgggcaactttctaactccctaacatggcagttcctggaaccgttgaactagaactatcacttccattctcttcagctgctccctgtcacattcatgcactagaatgcctcattgccytcactttctgacttctactttacatcctttagctctcacacttcttcactccttcttaactactgtttgaccttctatagacctcatgtacttgatcctgaattttctttcataactataagcatcttcttggactaaattatctgctcaatacagaacccataatcacttgattatattctcaaccaatctgttcttctttcatttctatgtcttctctgaaaaccccaaacatagatcaagccctcaatttattctcttcactcctacatccagactagcaatagcacttgagaaaattgtatataacttgagtaattccataagatgagatgcaatatggtcatatctcatattgtacaaataaattgttcaacatgctagttagcttaaaagcrgagagtttagcatcttctaaaggtttttctcattctctgcattttacaagatccctagggatagatagtcctaaagtgggtcagtctacttgaacctaagagcatgtttttttaaatagaaacaaggatcaccaatgattgttttatggttttccatataacagccacttttcaggaagttaaccatttagagcctgtaagtgctgtcgtgatcagtagtacctggacatgtagagccaacacttttttctratatcttcatttctttawatcagggtcaggcaggatttttctttatatacctaaaatatgacattttaaaattcatcctctttccctgcatagtgggattattttcccaaagtmttaaagtagttgacccttaatgaatttaagggtctactgttctgagccaacttgctctcaggtcaatttcttaccctttgctctttctactgggtgtgttggagattgaattcttagactgcatttgctaggctattgtgtcatctggcatctgatttggttcagtcactggaagtcattggtgatataacgaatggagggattaagggaaattttcaaggtatctctccttctccctctggggcagcatctctaataatggctgtatctcttctttggatccaacttctcttgaatataccaactaagattctatgttatgctgggtcactccacccctgggctctggtaatacaacctcctcctttttctccttcaagctaaagatagtagcaactccctgctgttgcgaatcttgtgttgcttcattagcccaagattggattctcatctattcctaaaagacaccaaactctttcctgcctcggttcctttgtccttcctgatgtctctcgcttagaatgggcttttcttatatttttgcatggagagctccttcttctttaggtcccattctagacatcatctcttaaaagctgtgcctggtttccattactctctcacatacaaagtccttttgtttcatgaggcacaacctatatagcttgaatgattattgtttacttgcatgctgacttttttctccaacttggttatagctcaagggtggctagaaccttgtctgtcttgattgtttctgcatcctcaacacctagaatgaaacatgttagattcattatacagatttcttaaatgagtaaaagaaaaaatgaatgcataaaatctgattatatcctttaagaagcctatctcatttaattcttactacaagctgatttcataatggctattattatccaaatttaacagttgaggaaactgacatttatagagattaagtagcttgtcatgaattatttcagaagtcataagattaagtaacttattaaaaagctaataacatggtagattctgtatttaaaaagcaggttcttgtgattccccagctgatactctttactgtaatttattttttttaaaaatcatgagaatgatactgacaagtttatgtagaagaatattacccattcttctgttgactagattatgtctcagttatccacatatgcaacactgtacacaatttctagtcttgagaaacttgaggcagaatagatttgaaatgtggaaatcaagaatttcaatttagatatattaaatatgagctctaaatggtggaatctagtatcctattggagtttgaaattttagatataaatctggaaatgatcaagttctatgtgatgctttcagcagtagcactatatgagattacccagagattaaccagggagaggatggggacacagcactggtctgaagcttgggtttcattagtgtttaatggctgaggtgagaagtgggagtgactaaggaagtagaagaagagcagccaacgaaagacaaggaaaagcagagagtgtaggttcccagacatgagcaggaggagcaattcaagaagacgcagtggtgaaggcccagtaagacaagcagagcagaaaagaacacttctggtatagaggaggggactgaagggagggattgagtgagaagcaagatgaggtgatgcagaaagtgactagagaccatggccttgggaagttttgtttcaaaacgaggctgcagctctatttccataattaggcttagattctggcacagagtggctactcggtaaatgttaatttcatgcaactggattaaatgggatgctgagttataatttgttttaaggaacagtgtatagcagggtaggcagttgagtgtgcatctaatttgctgttgggtagaatggacaatgagagaaagtccacttgtagatttgttcttctaagcatttgactcccasgagagttggaaaggtgtgtatgtaacagcataatattcaataaaaaraaggtcatgataacatttcttgtttcagaggttgaaagaaataaaagggcattgcatctaaattgaatagraggttaaatggggatatccgagacatatgtatgattcatctcaaaatatcagcatccaacagtttctcacattctgttacttttcatctagtatccatctatgtttgattattagaagaaagtagatatccaacctcactaaataagtaagcttaattttgcaccttacactaagcatgcctttggcctgaaagtgacccacttctctttgatgtgataaaatgccttgactttttgaagactactttcctcaaagaactttttacttctgttttgctaagaggttttattctggtgcctaaggaattataataattatttaagtggggtatcattataatcttacttttacataagagaaaagtgagggacatcatccttaggtgaattaacaaagcttagatgagtatcacaggttctgattttaggtgtctttgtctagccagattccatgactcatgtagggtttagtggtttcaataacagtcctcatcaaaggatttttgaaaaaagcaagctagtgtggtggttgataaatggcaaagcagtcacatgtaaatagtttccgaggtttttacataagaagtttacttccttattgaaaactaatggatacaatgggacactaattagggttccctaagagttctccaacaggagttgcattggagttgatgcgaattggcagaaagcagcatgaattgatttgatcactaaaaggccttgcatttggggtttttttttaaaatggaaaatggttccccaaagaaaacatatatcataggagaatgagaggaagagaagataaagaaaattgaatgttcgttgctgatcaattattcagaatcaattatggtwtgctagggaaagcatactgtgccaaagccaaactaaactccaataagcatgaggattaattactctcatgcctgtataagctagaggaaggaggggctggtatctactggcagaacttgactgctgtctaggagcagaaactgattctgatacagagagaacatcctgttccagaatatcaggcttttttttttaaattaaaagagagagtctgtgttcaatttatgggaggggtatgtatatatatgtaatttcttctaacaaacactgtattagtattctccagagaagcagaaccaatagaatgtgtgtgtatctatgtatgtatatacatatacagatagatggggttgagaatgatacacagagagagaaagaaggcaaggtttattttaaggaattggatcatgctattgtggagctgaaatgtccgaaaactgcagggcaagacagctggctagaaattcctctaagaattgatgttgcagtgcatagtccaaaggctaggaactcagacagaattttcaggttacagtctggagcctttgatctcttttcttaaggctttcacctgattagatgaaggcccrcctatgttagggaggattatctgctttattcaaaatctactgatttacatgttaatcatatctataaaacatcttcacagcaacatctagastggtatgtggccaaactgggtatcatacccttaccaaattgacacataaaattaatgatcactcttatagtacctacttatggttcaggtcagtgctatagataataacttttcacattttgatagctatttttacatactgtcatactcataaatttcatattgtcataacagtattgcaggttaaacagagtagcaaatttgactctaatgacataagtgaggaaactgagtcatttttaaaatatgcaattcctaaattgtagactagagcgcacacccagtgtcataaagaattgtattagcagtcaataaggaaaaaaaagcaaaagcaatgttagtaagaaactatgttcctggaattaaaattaggcattgatatgggtaggagtatcatctttatcattaaattagaattattctgtgaatttgaaattgcagggaactttcatttagcttgaaatattttcacttacagaaatagctaagctgtgataagacagtttaatggtaagaatgatgcaatcttccttctttcttttaaaaaataaggattgagtgtcatatatgaaatgaaatagatctatctcatataatctatttctatatatagaaataaataattaaaaagagaatggtaattattagcccctgcccaagaatctgtagtaccccacagccctctcattgagcaagatttaaaagggagagggcaatgattcatcatagctgaataggggtgtgtgtgtgtgtgtgtgtgtgtacaaattattgtgttttatttttttcttgagatagatttcctcctctatggaggctttctttattcacaggtatcatacataaaggaataaaacatcctatccgtattaaaaagtcttccccagtgagacagtattttcctttcatatttgactgccattgagtggtcttttgagttgagagagattgagggatgtctctcatttttagagggtgaattggttaactataatgctggaaagggactattatatcaattatttgaaacatttaaaaactgggcctattgcaagcgattatgtttasagttaatgaagcactgatacccctaacatagtaaagggaagaaagatcttttgccaataaaatctcatcaggtgatggccttgacagaacatcccactattcctgtcagccagagctgtcataaacaaaacattgatgagacaatgacaataattaacacagtgttaatgggatatagagcctcacagttattttttcagctacagtgaacttaatgcatgccaagcagtgcactggcttaacatcataacatgtttctcttttatttactgtggttatgttggctctcttgtgttacaaatcacagatatgctttctcaggcttatgagatggtagataagggaacaaggtgctagaaatccaacagctatgttcacattactattaaaggttgagagttaagaaattggcttgatctgaactgtttagataagactatggcaatttggccatgcacaatggaagacattttggattatgattgaaaatctagtaggtaatattcttttaaaagtggaaaccttgagccaaaagttaaaataatcagagacattggattttattagagatgttgtcactggcagaatcaggttaataaagtcatgcaaggtgttggctgctgctactataagcagacatatttggtggtgattttgtagtcaacaagacaacatatctagtacaggacagcaaattgagtggggaggcagtcaaggatagctcggtagattccctgaatataaatctctggaccccccactgaatgtgacctgcttaaacttgactatgttttcaagggtatatctaagaggtctctccctcttggcatttctgtttttcaataagatacttataacacatataaatatgtccttaagccacatttcaggataataaatttcatctcacacaagaaacaaacatgatacgtctagacagaattttttttttcattttagcctttctgcttgaactcaaatcaaaggaaatagctgcattacataaaacgcattcacttgtggaaatggtaatgttttgatctccattaaatactggaaataaaaaaaagtttgaatgtacgctgaaaagcaggattatttttaccatcctgaatgacaaatctttctgaacaggctttccagcaattagtcttgctctaatgctatttctacactggcaagatgaagtctgttacttgccagatctctggagaatatggtgctttctgtagaggcacaagtatatgtccaaatgccagagtatatacttgtacttggctagtgtagaaacagcagaagagacctgaaatactcgaatttttattggattagctcagtgatttctctgaggaatcactgcttaacttctctaggagtcacaaattattaaacataatgtaaggaagtctgtgggttattctgactatttactgaacatgcattatgtttggcattactgagagtcacaaggaaatgaaatcatggtccttactctaaaggagaccataaagggtgttttcctctttgatttgcaatttaattgaagagatttatatgatgcttcaaaatggatttttagtaactatttttacacgcacttcagcatacaaatgcttttttatggatagtctgttaaatactttagaacttcttttaaaataatttgaaaatattcttatcgtcaaaatttatggtgttttttgtaatattctaaatttcttgttaatattgtccttcgtgtatctcttctatcaaaagagaaaaatctggcagtctatgaagactgtttaaaaaaaactttcattttgtcattttgttagattcaaaggcttcagaatagtctgttccctattctgtctctttttgagaacttcaagaggaatgactttttcaaagaacaccctgttgaagtagattttcattgccattctagaaacacataatttggatgtcatcccatagtctttctcaattaaagtactatcaactctaagttttcttttatctcaggctaaaatcaaaacttgcttttttatacaagtaaatatataggacagtcactatacatagtaatcaattcacatttttttcctttaatcttagcacttagttataaaattagttaagggttatttgtattataggtactattgtttcaggatgaacggctttgtaagtattgttattaataaaatatawtttttctaaatttaactaatatcaaacaagttacgtacttctgtctcactaatatttaggttttagggcattaactggagctattgattataaaataactgaaaactcaaatatggtaagttatttttctcacataaatagctccatatacaaaaagttgtggctatttaaccattattatatatttataataatgaatactaacattttgttttctgtaccaaatgctttcaaatatatttttgatatattctcaatagctttagaccacttttattctagtagtagtaatgatggtggtaatagtggtattgccattttgccaatcagaaaatgagcsttggagaagttaaaaattcaactcggatacatatgttttmtaagtcgccgaggaaactcctgaactcatatctcttgagtccaaatctcttactaatttcactatactttctcttcacgtctgcgggttgtaaatgtgagatattcagatctgcaaattttacaggcayataacttgttggggttgcattcgagcagcccctagatctttcctaagcattagtctgggcccacaaccaacctgaaaaccttaatgaatttcaaaatcataaccttctgcaagtcaatatcttgcctccctcttgtttctgcaacttttttttttttagtcatagaccatgtgttagcatcctgagctcatattacttcatagatgactccagataacaaatgccaacaactgttcactctgattccatccccttgatgagcttctaatctctattctggctctactctcattctagctcatcagaataaagttactactaaatcttttacttctgtagatgatttgctcattttggaagagcaaaatgataataaaaacagagtccaagattttgccttcacacatcccagtaagttttcttttttataaaagaattttatagctttgcctcgctatttcttttgaaaatgatagtgtgaatttgtcaaaatcataatgtgaatttgtgctcaaagcattgattgtcagttgctcagccttttgaatgaattatgcctttagtaccatatacagatcctactgatgttcattataaagtgtctgtttttctaattttcattttgtattcacaaggacagtctcaaggcctcagctcaaggaaacatagaagaccatttatttattggtaaatgtggtttaacataatgtttcacaatggctactgtaaaacttggcatttcttcatttttcctatctttattctcttcacccagtcattaccattgatcgaaatcattcaagaggatgagatcaaagtagatatttagatagttgcaataggtgagcatttatctatcttgcatttctccaatgcgtaaaacatcctttgaagtgattccaatgtttatattgatgctgagtgttcagatatttcagtaaaattgtggccatctgaaatcagattttttgcaacactattttttgcaccactgttttgtaccactattcattttgaaataacaaacaaaagagaagactcccagttccttgaaaataaagccgaattgttgagcacccgggaacaattaatttatctaaaaggagaaaacccaaatactatacttgacataagaaagcattcataatgaaaaatgcttaaattacctaacaagcacaatccacttttttttgcatgaaagctaagaagtacaagagaagcaacatgaaacaaaacgtaaccgaacaaaagtgaaaaataagtaatcaaaaggagaaatatatgacaaagaagtgtccactggaccctggtggtgaacatgcaggtcacacatagtgatagaagtggtaaagagactctgtaaggctaaagaaaatgagcaatgaagaaacgcaatgaacaaagcaactttttgactagaaggacacagcagttctagactctcagagaggtgatctttactatcttaaaaggagtaaagaagaaaagaacycactttccacagtagaacctgagaatatacttacagaatatttctaacaactggactatggaaaaagggaaaggtgcaaatatgcactagtacttctattctcctaaaatagtccacatgttaacagtaggccaaccactacgcttaaacagagaacggcaaactcccacaggtcagcgcactcacaattcttatcccctgcccggtcttgtactagtgaaactggtatttgtaactttagctcttcatatagtacaacacaattaytcatactaataatctaattttctatcttcaagaacatttagatcatgtcctgtctacctatgtaaaattgcgagaaaacatgtaacccttagcagattttcatgccccgcaatttcttctgtatgtaaatttctctctctctctctctcccagaaagcttgaaaaacttattgaccggaataatttaatctcttcaatatttccatataacataatttttgtaataaaaaccatggaaatgaaatcgtagccatcttctcaaccttattcaaagttagaaattcgtcttcctctgaattagtaagatacagagactacagcaactattctgcctcttttattcagagatctggcttcagtcttcagagttttattactctataaactcagtagatagtcacatagcatggcagctttagctaaaagagagcttggtgtggattgaagcatattgtcaccctggtgtgaaatgtgtccagagcactttaaaacatactgcttatagcaattttaaaaataaatactggttctgtttaaatatgccatctgctttaacctacatgtcattaaggttgttgaatatcatgctttttgaagaagcccatcaacaaatccaagctcaaaacagccttttggtccatggccacacagatgtggagttttcagctttgaggtgaacttgagtatcatctttgcattaaatctcagtatgtaaggtctaacaaagactgatatgaatctaaaattaatggagtccctgatggtaagccaacacagctttctttttgtagaaaatataatctgttagtaattaaatgaatggcccaaactatttgttccatgtaagttttgataatttagtcactatgcaaggctaggctactgtgcctcttgtttcttacaagatatgctactttatttcaccttgaaattaattgttgtatcaaataaacaaatcttcagtaaaatttagaaaaaaatgtgaaatttttcaggtaacagactttgcatctattcacagttaatatatttaaaatatattaattcctaacctataaatataccctttcataacagaaggaaatctcatcctaaccaacatgtaaggttaacctgccctaccattctccagtgatatagtcatataattacagtctagaagactaaacaattcatatattgatgactcataatgaggaaagttatattgaaagcagtccttcaaatgtataatttataaccaataaattttaccttattgaagtgagacataaaataacttgcaatgcwtataattagatcattttagggaaataaagcattaaccctttttcttagagaaactagtaatccaataggttatatatagatgttcaagaattttttcttaaattcactgttttttattattgtgaaataatgtatatcttaatttctttcagataaaataatgtgaataataaattaatggaacctaaaaatggctttaacagatttaatatgtcagaatacagaatattacatgtttggtatttgcacatatttttacatatagtaatatatcatttaaacatggtagttctctgaaattttttacttatctggattttagaatgctaaaattcttgtttaaatctcatcactatatggtgtttgaacatcaacttataataagcaactataaatgtttacccatatctttaaacataaaatgaaatttttcctttttgttacatttcttctggaaataatatcaaaatattgtgtaacaggtttatctatttaaaaagtatatttactaaattataaaaattattttgttccaaaaatggcttggaagagattattttaagtatttctaatgtgtgagcaagaaaaacagcaaaaggtagggtgagagtaagagatactagtcaaaatatttcatcattgtattcattaccataaatcaaaggcactataagatttgcctttatgtttggaagaacaagctttttattgactgtctttcataattaatagcatttactctttaaatcaaattagtctacttttcctattaaagccttgctgtaggatcattttttaaagcacaaaataaccttgacaaaaatgaaggatcgataatatgttgattaggagtctatttgctctaatagcaaawgttkccttgttgttagttcctgttgcaacactctcagaggtcgtagttcattactatctcctggcagtggtattttctacatacagaaaagttgaccctactgagcaaaacactgatggattgacttagtcatatatatggattttcttaatacttctttaatcagctcatttttggattcaagattgtgttacaggatatccatcaattgggcaggaagaagagaacaatatgctgttgaacctagcatccttagaatatcttgagttagacttaatcaatgaggggtatgggagccatgttttatggcagaaaaaagaaaagcttaatgtgattgaagtttcagaaaataaaaaaaaaatggtcattgatggggaaatgaatagcaggaagaaaggtgaagatataacaacaacttacatggcattcatgttcgatgggttgaagctagaaaaggttatgcacagccactggatcccttgatgaatttaagagaatttcctatgaaatattgttatttttaatacaaagtggcctcctttccactgtggtttctgagcaaaagaacaaaaatatttaagcaacaattcatgtaatgaacagaaacaattaatgatatattctttgtcaataatatatgaggatgagctggtctaaaataaatctattcaaagaaaaacaaagtttgctttgagtagccaagaggaatgaaggaaaaatgagatgcaattaagcagagaacaatttagtataactctaatagcaaagtctttaacgatgctttggtacagataaatttgatttagaaatatctcccaagtaagttgtggaaacccatctctttagtcacttaaatttggacaggcaaaagttaatatgctgaaagagaaaattggaaccttggaaaggagctaaatgacctaattgatcttttccatcactgatttctagataccactgtgaattaaatgacaaaaggataattttgtgctatttaagataaaaagaaatgaactgaactaagtgcttactttttttytttctttttaaaaattcaccatacagccatgtccagctagctcccctcagattggatctgtgtcaccagactcatgttgttcttagttgcatggctctaaggtgatatacacaatcttcatgttatatgtaacatcagttcagagaggttgcttatggtttttctagaccaaatagtagacacagagtttctcgttcagatttagaacaaagaaatcgttagacactataaaaacattatccttgagggttctctaaccaaggtggattaataagatagttaaatagatggtgagatgaaggaagagaagataaaggcctaaagatgttgtatcagctaaattagcaatgtaaatatttcatgatccttcgagagcagtgtgatacactggcactgggattggcaaacttttcctgtaaaggccagataatgaattctcatactttgcagtccaagatgcaaaattaaagatatttatgtagattattacatcaaaagaaagaataaatttctacatagtatgcattaataacattaaaaatataatattgagtgcttttttaaatcatatggtatactaatgagaaagatggttatttgttttggggaagtaacattttgcttaatagtggttcaaaattggtgttcgttgtcatcaaatcagttacacatacacaagctgtataaaaacaggtctgttgaccgggcgcggtggctcacgcctgtaatcccagcactttgggaggccgaggcgggcggatcacgaggtcaggagatcgagaccatcctggcttacacggtgaaaccccgtctctactaaaaatacaaaaaattagcctggcaaggtggcgggcgcctgtagtcccagctacgcgggaggctgaggcaggagaatggcgtgaaccccagggggcagagcttgcagtgagccgagatcgcgccactgcactccagcctgggcgatagcgagactccgtctcaaaaaaaaaaaaaaaaacaaaaacaaaaacaaaaacaaaaaacaggtctgttttggccctcaggttataattggctgagcccttccctgaaatgcttttgatgtagcacagagctatttctgtagaagttttatctcctatgtgaaaggatgttagagaaattcttattccaaagctatcttggtatatagaataaatgtcttctagtcagtcgaatgtgactgatcaaattcttattttattcattgtaattgtttgttatagccactttttgcgaatgggatttggaatttccaataggatttgaccaaactcttttgttgtcaactactctccactttctgagtttagacaacagcaccaaaacagcttcactcagttaattcattctgtcaatgccactgcatgccctggtaagaccccagggacacacattaataaattgtctaagcttctgctgcagaaacaaaatagtagtcttaatttatagtcatatatattcatttacatattcatttatttatatgttmttttaacaatcatgtgttgaataaatagtacgttccattcactgataattatgaggatgcagaaataacttatgtttctcagaaaagtgattatatcatgttaacgcaatacaaaacaaaataaacaactagattctcactacctttttgtgttggcaacctcatccagtactgacaactcccagataaaggctataaccttataatcttgaaaggttttgactggcaaattaaaccttattgatataataatatttctctatatatgttagtgtttctcaaacatcagaataaaaatgaagctaatacagagaaaatttacatgcattcatacctccaagtcagttggtaagaaatgtttcctgacaagtaagagatagatacattttggtattgtcaggttatgcagacataacctgatttccaaattgttttggaaaacacatgaaatgtatattataaatgtactaagagttatagttcttatgtaaattttcacaccatttaagtaaaactttaatagggatgttgaagtataatcaaacatgaaaaatcaactcaattttgcaaataaattctatcatttctatctgattctcatttcatatgattagtaaagtctctcaatattatatcattccaacgcaattttagaatgagaatacagtgagcattttgcatttattttaactttaagcatgtgaacactactgaagaattaaaagtatgaaaatcaagtgtcaatatatctaaaagacggagaagagccctttgtctttaccattctttcttttatttttcctgacacagggtctcattctgttgcccaggccagagttcagtggtgtgattactgcagcctcaacctgccaggctcaagtgatcctctcacctcagcttcctgagtagctgggactatgggactataggcatctgccaccacaccgggctaatttttcctttttttttttttatttttttttcttttgtagaccggccatgttgcttaggctggtctygcctgggctcaagcgatccacctgcctcagcctctcaaaatctgggattacaggcataagccaccatgtctggcctcccttatcattcaagtcacctttttatctcctcctgggaagaacatcagccatcaaataagttggagaatatgaaaggtgatagtgagaaagttgacttggcttatgaggagcaaaatctgtcacagtcagattctcagcatagacttcttcaaaatacagcaaaaaccaaaatagataaaattctacatttccatgcaaaaatagttgttaactgaattcttaaaagtgaatttaatgtggcattaataatcggtaaagttattatttaatcacaaaatacctctagcaagtgtagttaacaaacgtatcaaattgaatacaaacttttaggttgatttttactgaatttaatttttccccataaaagatttccaaataattaagtattctctctaaaacaaactttctggcaattgaagaggtgagtccttgaagaaggcagcagtaaaaatctctacagaacaagtcagcttcataggctagctcaatattaggcattaatataataactttcattcctaaatgagtatatgttgcatacatattctaccttctaaattctattgtgactattttatctaaataattatatttccctttattaattctgttgtgataattttactttaaaaaattatgaaaacaatctctaaatgaaatacatgccaagacttaataagagacacctgggacctttggaaacactattgtttttgttttgttaaagaaatgtcttggataccataaatacctacatttgaaagtttcaagtaatcataattcatttttgtctttgtggctcttgttaagaaatcaacaaaataatataaaaattaagtgtataaaatagctcaaaataaattattcctacattatcacttcttcatatgaagccagaatacatggatggaatttaaaggagaattttagtttatcaagttgaaaggcaaggggaaattaatttcttcaaggaatggtcttttatccaggattcttatcttctaaaaccctcaaaaactgcattgccaagctgttagtacagtcatttttaaattattaaagtaaaattagtagaagtatgagattctccatttgctgacaaggagaggtggaagcatgttggtttgctacatcaggaaagttctgatagcttttactgttcagaatcacaggagtatttaaataaaaacattcaagaaggactagtaggaataatgagagactctctagcaaatacccttatgtatgtatcatagtatactcagaaatgggcaagtagcatttcctagcttgaaacagcagtatgatatgcctcctcatactcaaattactgcctcacccytacttagggtttttaggccatttgccaaccagtagaactttgaattataatttccccctcactgtgttggaagtgtctcactctaaagggggttgaatgggatgccctcaccctttaactttaacaagggctgctgatggatgtagtccatttaaatgtacaacagagagctgaactagataacgaacttattattcctctcagaggattataggctagtcccaaaggagttcagtaagccagagaaatccatatctactggctaaacaatagccagaaggctgactagaaatattgatttactttctaggccatttaggccttaatggcrgagaaaagctgaagtgctgtttacttttctgccagaatcgaccaaacaaccagtccattttttacaggtttttgattgatttcgcttagaggaattagaggtgatttatttttaagctgaaagcaacttgtaaatatcttcaacggcacaggttccctgagaggaaatgttaagtggaaatacttattgagaaagactttgttgcaaatcaatgggaacaggtaccatggctcgctgtgagccgtcaggtgtcagacaccctttccagagccctgtcaggactataatctcatcccttcagctactcttcttttgaaagctctcaagttcaccaagcttgaataaatttaatcgcctgactgaatttcagccagatgcaccctgctgactttcaaagggtcctagawgggacaacataatggtgtgcaaggctcacatggagcattttctatgtttgatgggtgaaaacagtaatttatcacacaagtggcaattttccatgattcctcggtcccacacaaagaaaatgtggaactccaacaaaggaataaagcagacacacaaaagaggcctcatccgaaatgctgccatattagtctgacttttcaaaatacatcaactcttwaatcagtgataatattgaaagctatacctcagcaatagcagcaaaaaaatgatttgtaatttattgttcaagctggcaaggtctgaggaggctatcatgaaagggcagtgactgttttaaatgatcattccaagagtgcttgtcttcatgcttagaatgagttaacaaaggggtaaaggacagcacttgaaattctatataaaagccctctgttccaggttggtaggagagagagaaggagttcaacaagcttctgattttgtctctgtgctctttcctcagttgtcaccaccacatccactatcttgtaaatgtttttggaaatggtgctgcttgggagagttgtcagtsttcttttttctccatcttcctgaaagaatttttaaaactctattatcaatagaagttaatgtttgaactttggaatttactaatttacttattcttacaattttaaaagatataatatcaatcatttttcataagaatttctcttcctgccaataaaagtatagttacctactgcagaaaatttcgacaatacataaaattttaagtgttgaaatgatgacttattatctcctcagactagaatcagcactgttgtctttttagtatttttaatttgtcttttttacttagatatatatattttatatataatatatatacacatatacaaacacacatctacatacatatatatttaagtatgtatatacacttaaatatatgtatatattaaaatatgtatatatatttaaatgaatatatgtatatatttgcttaatagttttaaacatagaacaactgcatatccactttttttttttggcttcacattatttcaggatcattttaccaaatctgcagaagatttttttttttttccaaattatggcaccaccattttctagcagtgagagtgaaaaggacatctcacgtctgtaatcctagcactttgggaggccaaggmgagtggatcacaaggtcaggagttcaagaccagcctggccaagaaggtgaaacccgtctctactaaaaatacaaaaattagccgggcgcagtggcaggcgcctgtaatcccagctacttgggaggctgaggcaggagaatcactttaacccggggggtggaggttgcagtgaaccaagatggcaccactgtactctagcctgggtgacagagtgaaactgtgtcaaaraaaaaaaaaaaaaagaaaaggacacttcaactgatgatacctgtactaacctataaaatgggaataatagtagattccacaccttataagattattgagataataaaaatgttgaaaaggaaaaaaagtaatatgactgatgacccatcatttaagtttatagctctaaacttacatgaggctaggcatggtggctcacaactgtaatctcagcactttaggaggctgagtcaggaagatcacttaagcccagtagttcaagaccaggatgggcaacatagtgagaccccgtctctacagaaaacaaacaaaacaattagctgagcatgttggcacagacctatagtcccagctactctgaaggcttaggtgggaggattgctttagcccaggaaattgaggcttcagtgaacccagattatgccactgcactccagcctgggcaacagaatgagaccctgtcttttttttttttttttttttgagatggagtctcactctgtcacaaggctggagtgcaatggtgccgtctcagctcactgcagcctccgactccctgattcaagcaattctcctgcctcagcctcctgagtaggtgggattacaggcacatgctacctcgcccagctaattttagtagagacggagtttcaccatgttggccaggcttgtctcgatctcctgaccttgtgatccacgcaacttggcctcccaaagtgctgggattacaggcgtgagccaccgcgcccagccaagacactgtctttaaataaataaataaataaataaataaataatcaaaagaaacaaacaaaactgttttacatgagcctcatatatatttttactttcacaatataataattagctccctgactgctttcggcatccattaataaaaatagcaagtaccatttagtacttaatattttaatgactattttaatagtcattaaaatagcaagtgtcatttaaaggaatcataagtgagaaagaaggcttctactagataattttaaaagaataaacttaaaaattactttaattgatgtaaataatgtttctctttcctttttcctcatcttttgtccttctgccacccaccctcagaatatttgatcatttagaagaggccaagcctcctgagagagttgtacctgaatatgctgataaacttaaaagaccattttgctagagttcatcagagggacagttatctacagctttgctgtaattactgtagactgagggcagcagtaatttatgggctgacaattttcactttcttactcacttatctcttgcatttcactaaaatctgtgcaactatttcagcaactggcacatggtagtgtcacattcctgtggcaaaaattaccttatcgctgcagggctttcttgatgaatgaggttgcttaattagaagggagttatacatacatgatacaggagtcacgtgttagggcaaagggccacaggcagcctagattttctaagtgtagaggtgtgagacaactcatttttattttcattctgagaatttaaatggagatatttgctaagaaaagtatgaagttcaaagaaatttttaaaaaatcatatctgaaagtgaaatacatcggtaaagaaaacaacagctgttatcatggagctgaactggatttgaaaacgctagcttaaaacaatgattataaatgcaatactgcatcattacattagaagcttycaggcgtacagcactagctcaaggcaacatttcccacatggcatgtgaaattatcttttcaaaatatattaaagtttctatgttcaaataagttcaaacaagtcccacaaccattacttctggaaactcacaagtaacataacattttaaaggctctacgatggtttaaaccttagttttcacttcactgaaatttagcattttcttccgtttgaatgaagacaacaagctgtagtaatattggcagtacttgtgactttgtccccaacaaaaatgacagatgttttcatatcacatcaccgttattgcagctgtcttgaaatattatttgtactcactactactttaaaagtatggtagttagtagacctactgctagatcttattatttaatgtgataataaagagatgcttacattcatatatcaccagtttatttttgttttgttaattacacttcaatgcaatttatttgataccctatacattttgctttatgcatttgatcacattaatttgagaagagatctgcgactgccaatgggatttatcacacacagaaaaagagggttaaaagcctttgctataattgaacttgttaaactctgtaaaaggtagtaatctccaaattcatttacttaggaattcttttatttttcactctgaggaccatgtttgaggaccatgtatgaataagtcatccatgaaaaactgtttagaagattctgccatgatatcttctcctctgacctagtacatcttccctggacctagtctacaaatagcagcctcatcaggttttacatttctacagttcctaggtttcttcaccaccagtcttctgagtgccattamtatcctggaggtaaacagtgaacctcccagatgatgatatgatgagtgttcttcctctagtacttttggccatggaattcatttttctccctcagaacaaaactcaggagttagcatacagcatgcgtgacattgtgtgtgaaacactgtgtcagtccgtttgaggtgattaatggaaaactttgagctactaattcagataaaaatggtgttttcattcggagaataaaaacaaggaaggagtacagcaaaacctccacaaccaagaaagaatgccacaattatttttaccgaatgccacaattatttttacctttaaggaaagtaattcctcctttttgttattgacaactacctattcggtcctagggagttctcacttaccatggagtttctcagtcttagcactagtgacttttgtgccagatagttccttgtgttgagtggcggtcctgtgcattgtaggacgtttggcagcacccctggcctctgcctatcaaatgccagtggcagccacctcccaaccccaacttgtgacaactaaaaaggtctctacatattaccagatgtctctggcagacacaattgaccccagttgagaaccacggaggtaaaggtttagtttgtgttaggaaggaatttgccattctttaggaacgtcagaatcaagttaaaaactgattaatctgctatataattaagtaactattaagcaacttttcaggtgagttctgtgggccctaacttctaagtatgagggaaattcattgtgtcatgtattttgctttgcctatgccaggggtcagcaaacattgtctgtatgaatccagatagtaaacacattgggtttagtggtgggggtatctaatacaattactcggttctgccgatatagagtgaaagcagccactgacaatatgtaaccatatgagagtaactgtgtttcaaaaaaactttatttacaaaaaaggaagtcaagacaaacttggcctgtaagctgtattttgctaatccttgccctaaatagaatgtaataattttaggtccagaattttaaaaatgctaaggtagaaaaagttatttatttgatatatttttaactaaccaatcattaaaccaaactgattttcaaatttatcattgtcttatctaaaaatgtacttacgtaaattaaattagcttggactgtttctcaaatatgttaacattttggtatcatgcacctaaaattaaggtaggaatgactaagtgggttgttactgaatgctaggcggtacatacctcatgtttaaaagcctttcagtccatgattgatgatgaccaaagtatggtcaatcttggtcctcataagcacactacatgctttattaaaacatcagtatgaatgccaattaacatgtcctctgttgacaggctgtgccaaatgacaccacttaataaccacgctctctttctcgcttactattagaacccagatttgaattccaggatgataatgcattcagctaaaagacaacaccttccagcctcttctgaaattwtgtgtggacacataactaagttttgacctgtgagacgtatgcaaaaatattgtgtgagaccttcaggacaaatgcttaaagaaagttgactcagttaggaaggagcctccttttgctctccttagtttcttcattctactggcctggtacattgatacgcgggctggagcaaaagaacccactttggatcatgaggttagaaaccacacattggagatggcagagcagaaagacaggaatctgggcccctgatgacactggaaagccaacacataagactacacacttcctgacttattctaagtgaaaaaataatagacgtctgttttctttaagctaaaatgatttggacttcatgatatatgctgcaaaatatgatcataattgattgcaatactctacaagtttaaaactgattctaaatatcatttgatgaaagtcaagtttatctaggaaacattgactttcttaggtattgctttaggaactggtgtaccgcagatataaccaggcatcagtcccccctaaaaaaggtgtgcagagacaagaactggtatttagagacccggtgatctcctcagatgttcttccctgagattaaaacaatccattataaacaggagatactattgaaaatagaaaaacaaaaagcagtattccagttgtaccttgttttttaccataggtctttcactatggtgtactccaaaagaaaaggagaaggaagttcttgttcaaaactgtcaaaatattaccaaattgttagtcagaacagggatgaggttattccgtttctcgcctggacaccacatttttatcatatttttatccttttcttaatttcctaaaggattccttctggccccttcctcaccttctgttccactgttgctgcccactgggcaccattgctgctgcacagttcactctggctgggggtcaccaccatgggccattcagagattcagagatattgtcctagccacatctattcttcaagcactctctgttatttcttcccaatctagaattacagaagaaaaccaaagggagtaaaaacaaaacttttatgttccttcatatcataaatacttctctcttaaaagttacctattgggttctccaaatgttcaatttcctgtgagttgctattctgacccttaatacagcagtaaattttctaagctggttatacctatgaatagagatgtctaaaaattacccctgtgaataggatcaagtgttttccttccataaggcaaactatagtttcacaaactttaggatatatgtgtgtatgtgtctgtgtgtgtgtgtgtacaggcatgcacatatgtaagcactgaaaagattattagcaatagataattggaaatgcaaaaaaaaaaactatgtatttgagtgaatagagaggcatcttcctctctataggttgtatgtgccttgttgaataatcctttggtggacaaaaaaaaaaaatgccactgtttgtatatctgtgcacaagggctgggctctactgattacggataagaaattcatggtaggcatatccccagtctcctcttctaattgtgctctttcttactgcatctacatgcagctactcgatccttcttggcgggactatccagacagctgctaccagcctatcagaggtgaaacctgagacaaaaactatttgcagtttagacttaattgatttgtgtaaatacaaaggagatgaatgataactgaacttgaattcatgtcaaatgcataactcagactccaaaaagaagtcatactgacaaaacaraagattttactataacaaaaactttgcagaatcaagaactagagctctgggttgcttgctgagtttgggtgctattcctccttaagtacagatggaaactgaaactgtagcaaatatcattactattcctctgggaccaatataatttaagaaaacttttgtgatttgtgattacagtgtggctagagacaggaggaagctgggcacagtggcctgcacctgtagttccagctactggagaagctgaggcaggtagatgcacttgagcccacgagtgcaaggctgcagttcaatatgatcacgcctgtggatagccactgcactccagcctgggcatctctaaagaaaatagacaaagcaagaggaaactggggaagacaactatttctaccctccctttagtcacacagatttcacaggaatgcttttctttggtaagattcattagttagatcactctactcctgtaatgtcatttactcatctctaaaatatgtacacacattattcctacctcaaagaattgttatctgaacttaaaaaaatagtacatgccaagcagtctgcatgatatccaacacacagaggacattcactaagccttcaataagtccgttattcaaattattatctcaggcctatgactgaaattgtcaggacctggagcaaaagtacaaatggagacccacatagcacattcctatgtattttaaaaagttttaaatcaccctgacctacttgcttattggcattaaataaaagaggctctaccttattgattaccttggcatgacaacattgaaggccaggttccaacactggagtttctcacctagagatggcagcacagagagaacgagcccctgagctctcagccaatggccttctctcttgttttcccgcccacagctccatcatgcactgtgaggagccttccttccaactacgaggtgccccaggcagcacataccttctgcatgtagtagttctttactttgaagaactccttggatttaatcttcctattttaaagttcttaaccttaattacatctgcatagttccttttgccatgtatcaaaacayaatcacaaatttcagggattgggtgttggtagctgttctgcctaacgcaatgtctgtagaattaaaatatagtccatatgctttgattgctaaggaaataagaaatcaacagttagaaagaaaaattggaaaaaatatatactattacagcacaattctttgcactcaacagaccctcagaaaaacatatttaatcaatgtgtgatgaaagcaatgaatactccttattattaaatttgttttctaataatcacaaaatatttaaagttaataagaataacactatgttgtgataattaaccacataattatatatttggatgatgtgtagagctggtatatatcctatttgaacacataaagcaaaatgaaaacaatatgagtgatatttattttctatgctaaatggaacttttgccaaaacagtaaaacaatgtgattatttaactgtatttttaaagcactctggtatgtttatatgatttacattgagaagaattttattttctttagaataaccactgattatcagacttttcatcctcttttcttcacctaacttccaaatgattttattcctttttcaattaggcataattaaaaacatgctgccattgtttatttttatttttattatttatttatttatatatttatttttagattgaaaaggggtttctaaatgtatacagtgtttataaatcttttagggctgggcagtgataactgttttaatcactgaagacaaatttctgccagttttggatatagcgaagtacgcaacatgtattggatcacttcaatggggacataactataattgccaagcacttattagtatagagtttccaccagcacttcagctggactttacaattaccaaaaccaattcctgactgcagcctcacagtgaatttagaagaggaattattgtattaaaagcaactgcttaaggccgggcccgctcgctcacgcctgtaatcccaacactttgggaggccgaggcgggcagatcacgaggtcaggagatcaagaccatcctcgctaacacggtgaaaccccgtcactactaaaaatacaaaaaattagctggcgtggtggcacgtgcctgtaatcccagctactcaggaggctgagagaggagaattgcttgaacctgggaggcggaggttgcagtgagccgagatcgcgccactgcactccagcctgggccgcagagtaagactccatctcaaaaaaaaataaaaaataaaataaaaaaagcaattgcttaaagccagctgaagtcatccactaaggggttactagacactagtcagagcgctccccactctctttccttattctctgaatcaccaaatttctcaataactagcaagaaacagaaagtggaaaaaaaaaaacaaaaaaactccataatttctttgagtcgcctaatgatggatttcatcctagaatttctagtagcagtggtgcgtgaactggaaagttggttcaacaaaaatgattttgtacatggttaagaacttacagatgatgaaaagaaatgggagctcttatttaaagagggtttcaaaacaaacactcgctgaattcagcataatgagacaagaaaatgaagccagagaaatgaattccatttacaaataacaaatttagaaaatgaagaagtctagtgtaatgggaaaaagtcttaaaaatgtgtatgtgacataattgtctgcagtactctcaaaaaaggatgttggtaaaaactgaaaaaaaaaaaatgagatttttttcctcagatgacattttccccaatctcattatgctttactttatttttaatcaaaatttcctcctatccatccaaatcagttttgctaacaaccactttcctgcttcaccaaaatgcgtaaatatttataatggacaagagcaaaaacatagattgttttttcccttttaaattctatttgcataatcatctagtataaaggaagcctgaagaaaatgagtaggtaaatatttttaagtacactgttgatttaaaataagggactttctgcacattttgaattttaagttttcagtatatgtcctgctgcagacctccttctaattctgagtgttttacacagaaacatatataggctgaggcatttgatgtcagtctctaatgcaaattaattatcaatgtagctaggagaggtgttggatcattttctatcctctacaaatattgattgtatcattctctgggatttaagtgactttttgaatcactgaggtccccttctatcatccacaaaytttttaaataaattttttattttggaataactttagatttacagaaagtttacaaagatgttccatagataaactgaatccattttatctacttttccctaaagttagcatcttacataatcatgatacacttttcaaactaaaaatgaatattcaaaaccaagaaattaatattatcgtgctttttgactctgtttatgtgggcaaatggattagaatatcatcttctcttccccttgaaatgactggatctcaaaagagaatcaatgttcgtaaagaggtcaacttcaaaattagtagcagaaaaaagggaccccatgagcctagaatcaaatgcatttgtcttccaatatgtcctgctttcagtggaagtctttcattttcatggttacgaaatgtaacaattttggctcagtcacccctggtaaagtctaatctatttcaagaatgtctgactaagtaactctgatgtttctactatactccagaatcacagggggattttagtaggctagcagatccagaaaattctgaacctaggaaaaatcctttgtggattagaaagacagaagttttaggacattatcaaaggagctctctgagaaagggagagtattatattgtccacaaagagtctttgatgggacaatcccaaaccacggctgtgaagaactgtgcaaaaggagtataacctaccctgggaactggaaactggatttggcaagaatcccaggaagatcccagggacccaggaaagtgatctagccaaagtaagctacatggtgagcaatggggatcagtcagggtatttcattgttcccacaggcatcttgggggccaagctaggtatacggtttggatatacactgtttcaatatgcaacctttttggctgcgtttgttaccaagttacaagtacacagtatatgtttttattaaaatcacttatcaagtgttttcatacctgtcctagaagttaagaatgattatttagaagttttaaaatagaagacagaagcatggccctcaagaaaagaaagtccatactttaaatcataaagcaaatcaaaaaaagtttaacaagactaccatcaatgcaatttttcattttaaattaaatcacgggaataaaacaattttcttttttctttctctcttaagagcttagtacattataatagatatgacattgagtgattgttaaattaatgaaaccattgttagagttctctacaagtttagagatagatttataaaaggtacatttggctggctggctgctcagccctatttttgtcccttttagctttgaaacagcctaatcaggaaacaattctgcactgtgggtcagaggaaaaaatcccttgagacagagctcagaatatcctgacacaaaacggtctcaaatttaggggttctcatggttcagaaccccccatcctataacccagatgctgtcacatcatatcacttaaatatataaaatgcagagacaattatactcacatttccaagaaattagctgaagttacatagtccacaatgtggccttgcagtatgggtctcttgaaaaacttgcccctggctttagggactgaaactcaaactctcactgtcagcaaaatttccctttcaagttgggtcctttatagaaaagcttacttctgcttcgaggaacaagattacaatttgaatgtcactaatctgcctctgtggaaatatctaggcacccttattcatcctagaaaagttatttagtgcaaagtgttcataaaatggcttctcacacgtttagtattcaaacaggcaacacatgtgctactgaaggggctggggggagtcatggttttataaggtttttataattctagttcctaaaatttaaagcactgtaacaatggtttcattaatttgtgaatcattcaatgtcatctctgctataaagtactggacttttaatgggtttagggagataggaaaattattcgtatgatttaatataaaatgaaaaattgcatagttagtaactttgttaattttgggggcatgacctagtaaaattttcatctgatgtaaggttatttttgtgatgagagtatacatctgtttctataatttctgagacaagaaggatagaaaatgtattttaaaaacagcatgatggatttaggttacttatataaattaaggcgaattttcagaaatataaaatgttaccagggtagattatcacagcaggtgatcttggtgaaccatgaaaaattctcttggcccagtctgattttggccacagctgctgtgggtgcctcgggccaggtcaaactcaaccctggctgacaggccaccaacacaagtgcaagctgrttgtctacctgctttctgcctcagggccttcctctctagaaattaactatggaggcaggagagagtcacttctagtctcttttaccctggattatctgtatgtaccctggattacctgtatacaatttgcatggtcagtattcttgtttctagaaaactaaaatgaaagcattcttgaaacaagtttgaaccaacatttcaccccaagactgtatgcctagttcaaatactaagaccttcatgtagaggattgaaatttactcatcctttattcaacaaatgtttatggtgaactcaccaagtgtgaagcatgtttcaggtactgaggatttagccttgcaagaaaatcactgccctcgaagaacttccagtctttcagaggagagaggcaatcaaagtaaaacagcagcatttcagatggcaggaagtgctatcgaagaaagcaaagcaggaaatgccagcgtgaggcatctatttataattttaaatagagcactcaagaaatcctacctgagaaggtgacattygaagagagacctggaaggtgaggaggaaaggcatgtggttaatagggggaagaaacttcccagcagagggaacagcagttatgaagaatcaaggcagatctatgaagccaatacctgatctgaaatgaatactttattctctctgaattgtgattttgtcttttgtcagatgaagctagctagtgctaattcattgtgaggactgaatgtattattttatgtaaagcacatagtacatgttcaatacctcttagctcttattattatctctcactcagtttcatccattctactcacaaaagaaacatcagcaaaggcttttgattcagccaatgacatatctaaaagagaaaagagaaaattaaaactgttacactgcctggaagcttctccaacgaggtctgggtgtttcctcagccttcagttgcattataaaggcctcatcctgttgtagtggcctgggtatgtggcatatgccataaaccaatgctccaaaagtatctctgtgggaggcggagagagggaggttgtaaaccacctgtgtagctacaaaggaaaagtaatgttgagatgctttatcaccagaagaactgacttagttttggaaactcattcagggataaagatgagtaggaaatttttaggtagagaatgagcaagatagactttgagacagagggaatatcacatatgaagtttctaaggcaacagacggacaatctgtgccctcctcaggagacattcggcaatatctggaggcatttttgattgtcacgacaaggttgggggtagtaatcacatatagttgatagaggccaggaatactgctaaacatcctacaatgcacaggacagtgccttataacaaagaggtatctgcccaatcaatgtaaatagtattgagattgagaaaccctgctgtacggcaagagagttctttcataagagaaacaggagactcatgcgactagctcttattatcataccaaagggttgttaagacaggcagaatttagatcatgtaggatttaattagattttaatcctaaattcaaatgaagtctctgaaggctttttatcagaatgtgtgcgggggctggtggtgagggtataggagacaggtggagttggcaagacttgatttctgtttgcaaatgattctaatggaagtttcagctgaggcacattgcaaagagagatgctaatgcagaaccagtttgaggactgttaaagcactctatcaaaccaaaaatatggaagagcgcccatggggagaggggaaaggtttttaagaggtgtctctggagggagatatgctgtcaggtccacttcatcgctcccagtggggtaacccctcctaaaccaaagtcaaaagaggaggtttaatgtctcgcttggaggtcttagtatccactgctttgtaggtcatcaagtatgagtcacatatgagcaagtaaaggttggggagctattgatagtagagtaggggattgcagttcgggaagtgttgtggaccctgagtttgccagggtgaaattcagcatgtgggctagagagagagattggaagaggagaagagaagaggagagcatgagctgctctgtgactgtcttagatctttcaggaagggcaaggggacctcagcagaggaaatgagaattaaattggcagatgcctaggggataaggataaactcaaaacatgcacttgactatgtcagcggactggttgggtgtaaaggatagggagaaatctcagaaaaatgaaaaaatgaaaaatgaaaaaatgaaagcacgggcccatcagaaaatgaattttaaaatatggaaaaagtagaaaatactagtgggagtcatctaccatggtaccactcaaggaagaactatcccttctctccttacctcttctactgcttgttctgaattggaggagtcagagaatatggatagccaagatagagcaggagaaaagaagtcctaggtgagaaatgagtgaagaagttgtcccttccctttctttttcatgggctttattcttgcatcagccaatagctaaggcagggaagtaatctcaactttaaattagattcagagctttgatgagactagcattttaattactaaactcagattttatttttggcaaagaactcactgtacggaataaatgtaagacaaattttaaaattttatttactttatgatggcatctttctgtcatttttatgcaatacaacagttactgtttcacaaatagaaacaaacaaaaatgtggttcctttctgaagaataatttggaagtggaacaactgtatttgaaaagacacattagtgaatgttttaaacatgttaggaagcgttacaccaaggtaacaaacagccccaaaataacaatgacttaaatccacaaagaattattctctgtcatgttccaaattatttgcaggggttgcagagctctgtttctgtatttattcaagggtccaagatgacacagtggccgttaactcgaattttgtcattcaatgtgcaagaaggaaagagaattccagtgaatctcatgtgggcaattaactattccagacttgaaattacccacatcatgtttcctaacaccttatggatcaaacgtagacttgtggccttatcccctccataaaatggccaggagatatactcccaccttgctcccagaaggggaaaatggaaatatttgtcagattgcattgattcaataatcaaggtaataataaactggataattagtaggactaaagaagtaaaacagatatggatgggcagattcaatggataaacttgaataaatccttctagagctaaaatgtttgaaaaaatagccatttatactatttatatatagttttccaggaaagtatatgagcccctaaaacaaggtgagtagataagagtatagattaataaatataaatataatttatatttagtaactaatcactttaagaartcatcatctgtaattctttctgttatacacatctctcataatgataaagatatcaaaaagcaagtagcagccaagtcaaaggatgtaaagatatttatcaaggtggtactttgccatgtgtttctttcacttgtcagctacttgttgtcacaagtgatgtacatgtgctcctcaacttatgatgaggttaagttcaccataaacccaccataaattaaaaatatagttccccccactacgcactcccaagatggcasattagaggtagcttgcctcagccacttggaggtagcaggatagtacataaagatcaactatgtgagctttaattcaagaaggaaaaaaggaatcaaccagaaccatgaaggacaccccagttcccggggttgttggcagacagctcccgtggtagcatctggctgataaacgtgattgaagcccsggtaggtgagagggacagagagtctccctctgtgactcacatttccactgaagatctgagcaacctagaccaaggaagagcattttgtttctcctgagcactggaactgccttggagagaggcttggaggcgctgaaagagaaaggcacttggaaaagctgcagacattttcccagacttgggaccaagagcaggaggccatttttaatccaggtgcatacaaagtcagtcattctttggagacccagcagcatggccatggaggcattttagtctcatgccagagattggcatgcctgctctggagtgaagtaggagcctccacagccagaactgtggaaaatacctcagcagtaggtgctggaattgtgctctccctcattgctaagtaatgtcaatgtaaaatttcaaactataagaatcctagaaggaaatctaggaaacatcggccttgggaaagaatttatgactcagtcctcaaaggtgatggcaacaaaagcaaaaattatcaagtgggacctaattaaactaaagagcttctgcctagcaaaagaaactatcaacctacaggatgggagtaaatagacaacatacaggatgggagaaaatatttacaaactatgcatctgacaaaggtctaatattttgaacacataaggaaacaaaacaatttaacaagtaaaaaacaaaactatttaacaagcaaaagacatgaacaaacacttctcaaaagaaaccatataagctgccaacaaacatgaaaaawtactcaacatcactaatcatcagagaaatgcaaatcaaaaccacagtgagatactatttcacaccaatcagaatggctataattaaaaagtcaaaaagcaacagatgctggtgaggctgcagagaaaagggaatgcttgcttatacactgctggtgggaatgtaaattagttcatccactgtggaaagcagcttggagatttctcaaagaacttaaaacagaataccattcaacccagcaatctcattactgggtatatatccaaaagaaaataaatgattctaccaaaaagacacctgcactcatatgttcgttgtagcactattcacactagccaagacatggaatcaacctaggtgcccatctgtggtggattggatcaagaaaatgtgttatatatatatatgccaaggaatactatgcagtgataaaaagaatgaaatcatgtcatttgcagcaatatatatgtagctggaggtcattgtcctaactaaattaactgaggaacagaaaaccaaatamcacatgttctcacttataagtaagagctaaacattgggtacccatggacaaacatggcaacaatagacattggagactactagaacayggagagaagatcagggacaagagttgaaaaactattgagtactatgctcactacctgggtgacaggatcatttttatctcaaacttcagcttcatgcaatatacccatgtaacagacatccacgtgccctccctgaatctaaaataaaagttgaaattatcttttaaaactcacttacaagggaagtgaaggacctcttcaaggataattacaaactactgctcaagaaaataagagaagacacaaacaaatggaaaaacattccatgctcacggataggaagaatcaatatcatgaaaatggccatactgcccaaagtaatttatagattcagtgttatctccatcaagctaccgctgactttcttcacagaattagaaaaaaacactttaaatttcatatggaaccaaaaagarcccctatagcccagacaattctaagcaaaaataacaaagctagaggcatcacactacctgacttcaaactatactacaaggctacagtaaccaaaacagcatatatagaccaatggaacacaacagaggcctcggaaataatgccacacatctacaaccatctgatctttgacaaacctgacaaaaacaaggaatggggaaaggattccctatttaatatatggtgttgggaaagctggctggtcatatgcagaaaactgaaactggaccccttccttacaccttatacaaaaattaactcaagatggattaaagacttaaacataagacctaaaaccataaaagccctagaagaaaacctaggcaataccattcagaacataggcatggacaaagccttcacgactaaaacaccaaaagcaatggcaacagaagccaaaattgacaaatgggatctaatgaaatgaaacagcttctgcacagcaaaagaaactataatcagatagttcttttcagatagatatgtgtgcatttacataattttacagaatgggataaaatttctgcagtctatccatctgacaaatggctgatatccagaatctacaaggaacttaaacgaatttactagaaaaaaacaaacaaccacatcaaaaagtggatgaaggatatgaacagacacttctcaaaagaggacatttatgtggccaacaaacatataaaaaaagataatcatcactggtcattacagaaatgcaaatcaaaaccacaatgggataccatctcatgccagttagaatggcgatcattaaatagtcaggaagcaacagatgctggagaggatgtggagaaataggaacacttttacaatattggtgggagtgtaaattagttcaaccactgtggaagacaatgtggcaattcctcaacgatctagaaccagaaataccatttgacccagtaatcccactactaggtatatactcaaaggattagaaatcattctactataaacacacatgcacacatatgtttattgcagcactgttcacaatagcaaagacttgaaaccaacccaaatgcccatcaatgatagactggataaagaaaatatggcccatatacaccatggaatactatgcagccacgaaaaaggatgagtttatgtcctttgcagggacatggatgaagctggaaatcatcattctcagaaaactaacacaggaacagaaaatcaaacaccgcatgttctcactcataattgggagttaaacaatgagaatacatggacacagggagggaaacatcacacactggggtctgtcgggggtggggtgctaggggagggatagcattaggagaaataccaaatgtagatggggggttgatgagtgcagcaaaccaccatggcacatgtatacctatgtaacaaacctgcaccttctgcacatgtatcccagaaattgaaaaacaaaaacaacaacaaaacacagcaccactgtccagaacttctttctctttctctttcacagaaatcggatctgcatgatggtctgagggctctcccgggctcttcctgtgcctacctacttttccctcacaagcgttttccctaataaattatcttgcgtatctaatcacatttgggttgcatctcattgagtaaaaactaacatacaaggcttgattctttgcacttagctttttttctctctctcccacatgtattcagtaactttgtcstagtgttttctgtgttacctctttttctttatatctgtttgtgtatttacatacaytacctttttcatacacacacacacacacacacacacmcacagagaaaataccgtttgcatctgtttcttcatttctgttgcaaccatttacttttagctcttaccagtcaactcargctgatgattaatgctaatgttggctattgttagtgggcactttctgtgtgccacgcctagtgctaaatactttacctatatctcatttgattcataaaatcaccctaaaaaaatctggatgagttggtggaacacagaggatttttaaagcagtgaaattattctgtgtgatactataaaggtgaatacctgtcattatacagttatcaaaacccacagaatgtataacaccaagagtgaactctaatgaaaactctggatttggggtgataattatgtgtcagtgtaggtccatcaattataataaacgtaccactctggtataaggttttgatggtggggggactgtgcatatgtgggggtagggagtatatgggaactctatatatgttctgcacaattttgctgtgaacctagaactgctccaaataaaatgaattctatttaaaaattaaaattaaaaaaagaaaatatcatgtcaaaaatgcatttaatatatgatatggttttgctctgtgtccccacccaaatctcatctcaaattgtaatccccataatccccacgtatcaagtaggaacctggtgggcggtgaatggatcatgctggtggtttctcccatgctgttctggtgatagtgagtcctcacgagatctgaagttttaacagtgtttggcagtttcccctgttctgtctctcctgccaccctgtgacaaaggtgcttgcttccctttcacctttccaccatgattataagtttcttccaagccatgtggaactgtgagtccattaaacctctttcctttataaattacccagtcttgggtatttcttaagagcagtgtgaaaacagactaatataatatacctaacatcatataagcatcgtagcttagcctagtgtattagtccattctcatactgctaataaagacatacctgagactgggtaatttacaaaggaaagaggtttaatggactcacagttccatgtggctggggaggcctcacgaccgtggcggaaagtgaaggaagagcaaaggaacatcttacatggcatcaggcaagagtgtgtgcaggggatctcccctttatgaaaccatcagatctcgtgagacttattcattaacaggagaacagcatgggaaaaaacccgccctcatgattcaattgcctgtcactggatccctctcaccacacatgggaattacgggagctacaattcaagatgagatttgggtgaggacacagccaaaccatatcacctagcctgccttaaacatgctcagaacacttacattagcctacagttgggcaagattatctggaaacacagtacactatagactatcatttgtttaccctcaagatagcgtggctgggagctgaggttcactgctactgcctggcatcgcaagagagtattgcaccgcatgtctctagcctgggaaaggatcaaaattcaaaacctgaagtgtagtgtttgttgaatgtgcactgctttcacaccattgtagactatgaaaatcacaagttgagccatgtaaattggagaccattgtccttacactacaggctataacgcaagttataggtttcttcgtattttgttattaattaattttctacaattttgacacaataaagtatataattaagaacgtatgttcctttgcagagaaaatctttgaagaaaattgaagctcaaatctgatacttagcttttactagcatctatatttaatattaatttttctttaaaaacatgcctaattataatattagatgccataaaatcccttctcagttcatcttatgtgttgaattgagaatcgattggatttggcttcaggtgcaataatttgcattacgaaacaaagatttgtcaatttttttgtcatgtattaagataaatgaaagagaagaaagcagtaaatgtgaaagtaatgtgttgtaggatgcgcatacacatgttcctctcactaacagcatgttagcttcccataggtcaaatgccaacacattcaggatacagcaatgtcagtttgcctggggcaggagtatgcattaactagcttctgagggttaaaacccactcatcagatgtaagcaactctaattttgtgaattctgattagtactgcataacattacctgaatacaactctatatatcatgtccagaaatatacactgaatggtaaaatttgtctgtcttctcagttttaaatgaaaagattcattattttgttttatgtggatttcatgtggatatatgaaaacacagtttaaaattgtaatctagcatgataaactctggtattgattaactttttggataagaaataaaaaacagtctacatctaaagtctgttatgtatgatgaattccacctaagatctttgttaatttctcagtttgcaaatacaactatagtcagaaattctgacctggatttacacagtcctgggtactattaatggatttcaagactgtaaaactcctgaaattttagccatatttctgcacatatatatcatgtgtttatatcagggcagacggttcacacctgtcatcaaattcttcaagtatctgtgatccacagaaaattaaaaactgctgctctaagtattaatatttacctaatacaatttataaagctatttacagactaattggctctagcaaccagatttcttttttgtgctaattatatttttttacagaaaacaaatgaaaataaaaggcttattaacacttgactaagatttctgcattcatggaaacaagtagagaataatgaggctaagtgaagtgtggcatggtatagaacttaggttggttcaagagttaatagagatatcatacctcttctttaccaggtctttgctttgatatgatttgccagtggctaaaaatataatgattaataattacgagatagatatgatctatgtattatactagcgtatagaaaaaggaaattattttgtcaagtccttagacttgcatcattttgtgacaggatttgaatttatactgtcggttctgggctgtcccttctccttctaactctgttctgattcttttacatatatcactccaacaatgagtgagcaagacgtgaagttaaggattataattactgagagacaaaaactcttagaagatataggtacatttattgactctcagaagacaaattctggtacaaattctactgcattaagacttggcttcctcctccactggagaaaaamattctgcaaaacttttctgccctaaaagtaggattccacaattaataaatttattctcattattcattctccaaatatcaagtacttataaggacaaaccactgtggaggcgataaaaattaaactggaatgaagagcccctacccccaagatgttgactatctaggaggacgtaaaaaaccataagtgatcataatatttgaaagtggtaagtttcaaaagaaaagtagagatttgatgtttacagccagtgtcataatgtggtattaggcctaccaaatatattcacttatgtgacacgtttgcagatggtgaccttctatatgataattttggtgcatttccttagaaaattctgtttttctgaggtctgttgctccacgacttttggttcttgagatttatgctcctgtgcagtctgggcctgagcttcattagcacctgatttaccatgagtgcagatggttattggaaataaaaagtcagccatttcctatgattaaatctctcatgggcggcatctccctcttagctatttccttactattgcatatgattcatttgcaagcagaacagtgattattatatgattgttaaatctaaagtggaaaggaaagtagaatattagaaaaagtctagtagcttattaatatatattatgtgctacaatgaaaatgattttacctaagtattagcaagatgatagatttatggatgatgagagaaaattactctattgtgacgattgaatgtaacaaaaagaatacagattttctcttcttttccctcccttccttcgttccttccttccttccttcctttcttccttctttctttttttttcctttgctttccctgtttgaaggagttattgtttaagccagtaatccccaaaaatgcctcctcattttggtcacttgccagcacttctgggcaataattttattgtgagtcttgcaggcaaaggaagggaatttcagggttgttcattgctatgtctgtatttttggagcttagaggaaagcaaatcttgtttttaacagaactatgcattagttgttttttttattggaaataattgttattttttcacttggcacatttatgagaataatagtagtgtcagaaaaatttcgtcactttcaaaattttgcatattctttgtattgtactgagtcaataaagtcggtggccacacagtaccgagctgacctgtactatagaaacttgttgatttgcctggttatatacagtgtttaattgacctatcatatttcttttcttctatgttaaagtctaattgttcaattgaaagacagtcacaattaccaaagctcatttctctctaattcattttcattattagatttatttaggttacttagtttccactctaagagtgtagatatgaaagaagccttagtaatgaaatttaagcactgcctctgctgatattttggagcatgttttgcttctatttcctgaatgctcttgtagcaaataattgctcaaaaagataaaatgcacatacacaaagaaacccaaattttctttttctttttttaatataagagctgctactaactgtatcctccatatatcaaatatgctacacagctaaatacctaaccgtaacccactagcacaatcttatctcttcataagctaaccctctatcgcaggctcaaatgccttctttctattggtttctggtatctgctgctttctccgacagggactttgcacttaaagtcacctgtaccagaaatgtgcttccctctaggaatcacaatctctcataaaatatttttacttttctttsttttatttgctaccatagcaatttcacaatatttgtgtgaatacttgaacagttcgtgtcttttctgctatacaatatgatagagactataggcaaagattatgaaagcttttgctgaattttgcataggtggtatttagcacagtgtctggtatatacgtttatgtgtcttttatctatttgttcttagcacaccagactaacacttagtggctttaatcagcaataagttactgtttctcatatttctgtcaattagyctggcagttttttagcaacagtaatctggtggatgagctggaggcgaagcccagccaggatactgtgtctccctctcctagtggttttccatcctgggcttattaacatggaggtctcatgacaatgctccaagagggggaaggtggcatttatgaaccccatgaagcctaggatccagagcttatgcatcacttctgtaatgttccatgagtcaaaataagtcacaaggttggtcctgattcaagagggcctagaaagagattcatgtctagaagggagaagcagcagcacagtctcactgcatagaaggaagcttacaggaatgggaagaactcgtgcccgttaaacagtctaccactgtattaaacagtacattgtaatacattaatatgcatgtaatacaatacaaaataatataataatatcaatgtaattgtcatttaattataaaacttagtccagaaattgactagattaactgttccatgttttgttgcattttttttgggtttttattgtatatacactctaagaatgagaagaggtggagagagtggtatattaattctaagttatataagcaatctaatctcacatttagataaataaaaattataagcaatatgagggcagaaactttatatatttcaattattgatgaatttctggcaactagaatagtgcttcatgcataacaggtattcattaaatacttgttgaatgaatgaattaatgagcaaaaataataggcattattttctgtggtcttcccttttatgttcattgggaagttgtcatttgttctcatctgtctcaaatgattaaattccaaatttttagagaaatggctaaataagaaatagaggtcctgctcgcatatgttgttcaatgaattcttgataatcaactgccataatgtaaggacactaaaacttataggtaagaacagtctttatgatttattttatgaacatttgatcacccactaaacggagcctccaggagattttgctttcttattgattggtacaaaacgacagtaatatattttccctaatctctgtaatctgttcagtatagaaagcgtatctaaatgagtcactaacctaaatgagtgaccgtaaatatccaataatattcagaatttgatttcaatactgtatctagattcagactgcagtactatttctctggacaagagtctcactttgttctgactcatgtaaaaatacaggtctttttaaaatttaaatctggtaaatgaatgctacatgttgctagtattttaatataggaaaaaagggtgatttggctatttgttgatggtaatgcaaattgaaacaagttttatcttgtaaaaatattcccaattggaattcgtctccatttattatctgtttatatggacataattttaaataggagaaaatggtataaaggtaggcacattttaaaaatagtagataatattggagagaaaaagagaggggatgtttcctttacgtacatcttagaattatctaacatgtacttgaatgtactggcaaaatgattaatccccaaatgacaattcctacatctgtcaattagtttatgtacaagtcagcttgaatattttatataaattatagcatcatgactggcaacaaaaacagatcatgatatttcagggagtcatctgagtccctcaagatgtaaatccatgacaaaaatgcaatctaaataataattgatttactgatttatgtgttaaactatagaattattcaatttgattaaaaatatcaatattttcaatataattcaagtagcccgattcttatttcttatcatttttatacaagataattaatgtgtatgtaaaaccactcttccatagcattagaaaaaggagaactgttctgttttttctgtttctagcatgagagaagttttaaggtgattggcattttcaaaatgcaaagttatgcttcttgttacagaattggaaaaagactgctgatgtgtgaagaaaaacaaaaggtaaaaaacacttaactaattttcagagaatagaaacaagttttattagaagtattttttttaagttgtgaagctgtggtagtcttcacagaatataggtaagggaaataatgtgtgaaggaactagagaggtgtaatttttttctcgatttttgcaagttttacaaaatatagcatctaaaaattggttaggaaaaacatatgtaatatgttctaatgttacataattactgatttaaaattcttctataccactgaagataattgaaaagtattaactggcctttcagtgatgaaagcaaatgtgtttttccaaaatatatgtatactccttttttctcacatgttgaactccctatgttgcattttgagattgctttgcctagtgatttggggtgtcattcatatttgaatatgccaagcaaatattattaaacagggttatctagtttaataatctgagtccacttcagatatttgttagatgcccaaagttaccaattaatgtctattctagttgtaaaaagttgcccatcattcaggatgggaaatctgagctgtctttgaagtctactgcaacacctacattaaattaacttccctgaaacttagtaggtgctccttaaatatatgttgaactctattaaaactaatgagctttatattctttatatatatatatatatactttaagttctagggtacatgtgcacaacgtattacataggtatacatgtgccatgttagcttgctgcacccattaactcgtcacttacattcggtatttctcctaaagctatctctcccccagcccccaaccccacgacaggccccagtgtgtgatattcctctccctgtgtccaagtgttctcattgttcaattcccacctgtgagtgagaacatgtggtgtttggttttctgtccttgtgatagtttactgagaatgatggtttccagcttcatccatgaccctgcaaaggacatgaactcatccttttttatggctgtatagtattccatggtgtatatgtgccacattttcttaatccagtctatcaytgaaggacatttgggttggttccaagtctttgtattgtgaatagtgccgcaataaacatacctgtgcatgtgtctttatcgtagcatgatttataatcctttgggtatatatctagtaatgggatcgctgcatcaaacggtatttctagtgctagatccttgaggaattgccacactgtcttccacaagagttgaactaatttacactcccaccaccagtgtaaaagcattcctgtttctccacgtcctctccagcatctgttgtttcctgactttttaatgatcactattctaacagtgtgagatggtatctcattgtggttttgatttgcatttctctgatgaccagtgatgagcattttttcatgtgtctgttggctgtataaatgtcttctttttagaagtgtctgttcatatcctttgcccactttttgatggggttgtttgctttttatcttgaaaatttctttaagttctttgtagattctgaatattagccctttgtcagatgggtagattgcaaaacttttctcccattctgtaggttgcctgttcactctgatggtagtttcttttgctgtgcagaagctctttagtttaattagatcccactttcaattttggcttttgttgccattgctttggtggtttagtcatgaagtccttgcccatgcctatgtccagaatggtattgcctaggttttcttctagggtttttatggtttcaggtctaacatttaagtctttaatccatcttgaattaatttttgtataaggtgtaaggaagggatccagtttccgctttctccatatggctagccagttttcccagcgccgtttattaaataaggaatcctttcaccattgcttgtttttgtcaggtttgtcaaagatcagttggttgtagatgtgtggcattatttctcaggcctctgttctgttccgttgttctatatacatatatatatatatatctgttttggtaccagtaccatgctgttttggttactgtggccttgtagtatagtttgaagtcaggtagcctgatgcttccagctttgttctttttgcttaggatggattgtctttgcaaggcaggctcttttttggtcccatatgaactttaaggtagtttttttccaattctgtgaagaaagtcattggtagcttgatggggatggcattgaatctataaattaccttgggcagtgtggtcattttcacgattcttcttatccatgagcatggaatgttcttccatttgtttgtgacctcttttatttcattgaacagcggtttgtagttctccttgaagaggtccttcccatcccttgtaagttggattcctaggcattttattctctttgtagcaattgttaatgggagttcactcatgatttggctctgtttgtctgttattggtgtataggaatgcttgtgatttttgtgcattgattttgtatcatgagactttgctgaagttgcttatcagcttaagaagattttgggctgagacgatggggttttctaaatatacaatcatgtcatccgcaaacagggaaaatttgacttcttattttccttattgaatatggctaactagaataagcaatgyagagaagactttaaatgacctgatggagctgaaaaccatggcacgagaactacrtgaggcatgcacaagcttcaatagccgattcgatcaagtggaagaaagggtatcggtgattgaagatcaaattactgaaataaagcaggaagtttagacaaaaaaggagtaaaaagaaatgaacaaagcctccaagaaatatgggactatgtgaaaagaccaaatctacatttsactggtgtacctgaaagtgacggggagaatgaaaccaagttggaaaacattcttcaggatattatccaggagaagttccccaaactagcaaggcaggccaacattcaaattcaggaaatacagagaccaccacaaagatactccttgagaagagcaaccccaagacacataattgtcagattcaccaaggttgaaatgaaggaaaaaatgtaaagggcagccagagagaaaggtcgggttacccacaaagggaagcccatcagactaacagcagatctctctgcagaaactctacaagccagagtaggggccaatattcaatattcttaaggaaaagaattttcaacccagaatttcatatccagccaaactaagcttcataagtgaaggagaaataaaatcctttacacacaagcaaatgctgagagattttgccaccaccaagcctgccttacaagagttcctgaaggaagcactaaacacggaaaggaacaaccggtatcagccactgcaaaaacatgtcaaattataaagaccatcaatgctatgaagaaactgcatcaactaacgggcaaaataaccagctaacatcataatgacaggatcaaattcacacataacaatattaaccttaaatgtaaatggtttaaatgccccaattaaaagacacagactggaaaatcggataaagagtcaagacccattggtatgctgtattcaggagacccatctcacgtgcaaagatatacataggctcaaaataaagggatggaggaagatctaccaagcaaatggaaagcaaagtaaagcaggggttgcaatcctagtctctgataaaacagactttaaaccaacaaagatcaaaagagacaaagaaggccattacgtaatggtaaagggatcaattcaacaagaagagctaactatcctaaatatatatgcacccaatacaggagcacccagattcataaagcaagtccttagagacccacaaagggacttagactcccacacaataataatgggagacattaacaccccactgtcaatattagacagatcagtgagacagaaggttaacaaggatatccaggacatgaactcagttctgcaccaagcagacctaatagacatccacagaactctgcaccccaaatcaacagaatatacattcttctcagcaccatattgcacttattccaaaattgaccacatagttggaagtaaagcactcctcagcaaatgtaaaagaacagaaataacaaactgtctttcagaccacagtgcaatgaaattagaactcaggattaagaaactcactcaaaactgcacaactacagggaaactgaacaacctgctcctgaatggctactgggtaaataataaaatgaaggcagaaataaagatgttctttgaaaccaatgagaacaaagacacaacataccagaatctctgggacacatttaaagcagtgtgtagacggaaatttatagcactaaattcccacaagagaaagcaggaaagatctaaaatccacaccctaacatcataattaaaagaactagagaagcaagcccgggcgtggtggctcacgcctgtaatcccagcactttgggaggctgaggtgggctgatcacgaggtcaggagattgagaccatcctggctaacacaatgaaacccatctctactaaaaatacaaaaaattagctgggcgtggttgcaggcacctgtagtcccagctactcgggaggctgaggcaagagaatggcataaacccggaaggcggagcttgcagtgagccgagatcgtgccactgcactccagcctgggcaatagagcgagactccgtctcaaaaaaaaaaaaaaaaaaaaaaaaaaagaactagagaagcaagagcaaacaaattggaaagctaacagaaggcaagaaacaactaagatcagggcagaactgaaggagatagagagtcaaaaaacccctcaaaaaataaatgaatccaggaactggattttgaaaagatcaacaaaattgatagaccgctagaaagactaataaagaagaaaagaggaaagaatcaaatagatgcaataaaaaatgataaagaggatatcaccactgatcccacagaaatacaaactaccatcagagaatactataaatacctctatgcaaataaactagaaaatctagaagaaatggataaattcctggacacatgcaccctcccaagactaaaccaggaataagtcaaatccgtgaatagacaaatagcaagttctgaaattgaggcagtaattaatagcctaccaaccaaaaaaagtccaggaccagctggattcacagccgaattctaccagaggtacgaggaggagctggtaccattccttctgaaactattccaatcaacagagaaagagggagtcttccctaactcattttatgaggccagcatcatcctgataccgaagcctggcagagacacaacaaaaaaaaagaattttagaccaatatccctgatgaagatcgatgcaaaagtcctcaataaaatactggcaaaccaaatccagcagcacatcaaaaagcttatccaccatgatcaagttggcttcatccctgggatgcaaggctggttcaacatacacaaatcaataaattaatccatcacataaacagaaccaacgacaaaaaccacatgattatctcagtagatgcagaaaaggcctttaacaaaattcaacagcccttcatgctaaaaactctcaataaactaggtattgatggaacatatctcaaaatagtaggagcaatttatgacacatccacagccaatatcatactgaatgagcaaaaactggaagcattccctttgaaaaccagcacaagacagggatgccttctctcaccactcctattcaacatagtgttggaagttctggccagggcaatcaggcaagagaaagaaatgaactttatattcttatattctcacacctgtgcttaaacaattgattgacttaatggattcaataaagaccactaaataggatggggggttggtggagaaagagagagagggagggagggggagagagggagagagccaagaaagtcaactggtgaatggcagaaagaggatgggggaacaagcaattcttcygctatttgctgtctagctcaacatagtcaactagtataatccagctagttgtttctgctgcctaggaaggttattcgggttttccagtgggcactaccttgattatgtgatcatccatagtccagagtctcactctcatcttggcaaatggggaaacataattgaatcatgacacccagaaatggtcaggctcttaytcacttgctcaactttatctactataaaatttatataccacttaatatataggggaggtgatgataattcctttccagggattcagatacacaattccataatttaagacatcctattaattatatcaaaatccatagaaagccaaattaacttccagattgcttggtaactatggaatttcagcaaaagaacctttggaaggcctggycaatttctttttaaagaaggctctcaatttgcttttattgtatacacacataccatcttgtgtatcttctttatagcacttgatctcaatttatattaaataatttaatgtattttttctaatacaaagtaagtgttatgtagagatctcttcttttcttgtataaacataattccaattcttataacagtactggacctatagtaaatgctcagattgttgaataaatgaatttctattctaccagaaagagggttatgctaacctcccctgatacccaaagtcaggagtggaaacatgctaatatctgcatttgtagtgccctcttattttttaaaacttattgaaaacaatttttgtttgttggacactttttatttatgaatataattcaattaaataaactacagctttttgtgtatacaagaacacataccttattacattttgctatcaattttcactaggctgtacatgttcctatttatattatagagaaataccatatcttaaatatttttgcagataatctcagacatcagggtatattttattaattcaaacaccacaaggtgactgtatttttaagttattggatgtgggatgggggaagaagaaaagtgtcaacttaccactcactggtctatacagacttcattgacagtgataaaatatctgatgcaaattgggagcactccaaaaaagcagtgtttcatgttttttaaaaaaattatttcatgcatgtaagtgtgaaaatgactcttagaaaatttagggggacagcaagtcagatgaggaaagcatattcagtgatatctgcatatcttggcacaagataaaaacaagcaattatggtgaacagaaattctctactttacctcctttatttcagccactaccaagtttcacatttagaaaaatagtattgtmtgaaaaatattcatttaggttttctaatatctcaataatatatgtgaaaattcttttataaaacatagtgagttatgttttgagtgtgctttggctgcaagtgacagaatatgcaaaataaataatgattctatttatgtatctctcacgagtaaaaattcagagactatttcaaggttgctgatgagccagttcagctctgtccagaatctgggtcatctctgggtttcccttgtcttttccttcataggggcaagaaggctgcttcatctccagttatttttccttgagaacatgcaaaaataggaaaagaggggcaaagcttttactttgtatgtgtcttgatcagagaaaaaaatctttcctagatgcccacggtatacttccctcaggttccattagtcagctctaggttacattgtcttctttagttggcttatttcagaagagggaaataaaagcacttaaacagaaatatgaacaaaggtgtcatctaatgakgacctttctggcctataacattttccttatggctcaggaaaaaaaggttcaagtgatgctgcattcattattgtatataatgagagacatttgggaaaaaagctagggtttcttgagttagattttgctacttcccatgaaatgttggaagcatcacttctaagctcatttgagacagtgctatgatccgtaacaacagcaattattactatcatacatttcattaaatctttctaataaatttcttagggacacttttattattatgaaacatttattttttttatttgtttggttttttttgtttgtttttgagacagagtttcgctcttgttgcccaggctgaagtgcaatggcacgatctcagctcactgcagcctccgcctcccgggttcagacgattctcctgcctcagcctcccgagtagctgggattataggcacgcgccaccacgctgggctaatttttgtatttttagtagagacagggtttcaccatgttggtcaggctgctctcaaactcctgacctcgtgatccgcctacctctgcctcccaaagtgctgggattacaggttgtgagccaataatagtaaagatttaattattattgaaatgtattcaattcttaacatgattggttattgtttaaacattttacatgtttcattttacgtttcaaataattatgaatttatcactgctcttagggacttactttgtgtacgtttttgtatgactctgcaatgtgggatcactactgcttatatactttttccatttttgctctgtaattagttctaatgtacaatacaaatagagaactagagaacatttaggtaagaaataattagtattatgatagaaaattcttatacatcaaaatacttaaataaccactttttttttccatagggaattgttgaaatgattaaaaactaaaatatttgatctttgggtgcatccttttcttacacttacatataaaaaaagtttctttagtcctgtaaaagtaattcaggttaaaaattacggttttagaatatccatcttttcttttataaactaagatggagtagcatatgattctgtctgaagtttctgtagcttatttcattgtctccctgggacttaacaagcacgtcttatgaatgagcattagatacaagcatttttatctgtcatttgaataaatttatatctctacctgttgtctagaaatatgaaaaatgtttgccttcttcggtgtgaatattaaatgtctccactgcagtgattatagctgtgtttcttccttataaaataatgttgtcaacattattctcttactccaaaaaaaagtacacatttctgtgaacaaaaaagcctgagtttagcggtttaaataaaatggagttctttctataacatgtgtagaatttcgggtcacttccaccactaatgtgttcatctgaatagtaattgccacaaaattgtagtttcaagtttctacaagcaaatacctaactttttatacacttaaatttgataccataatttttacaaatttgagtaaaagttcccattcatgccactattacatactttgagcaacctttttcataactctttattggtgaatttatagttgccaatcaaaaaaaaataaattgctgattttattcaactgggccaggacttagttcctaacaaatacctgtggccatagttcatacagatgacatttaatttcccaggggacttcaagaagtgatgaaaaacaaactacaaatgtatcctccctttccctctgcactgacctagggctcgtttgccgaccaggctccctgtgccctgccaacattctgtctgctgcagctactctgggagtgcttttctctccctgaactgcagctttcagacrctcctcattcactggtgaatcaggtcccaccagggcccttccatttgacttgtggtgtattttttaaagtaatacctcactacgtttaggaataaatgagtaaccctataacccatgtttagtgtaatgtttcttggcaatgaaaaagtgaataaaactgaattgattctatgacataaatgtacccactttaaacacttactctgcagtattactataagtcaayctttcccattaaccagcatagttaagcaagtccaaattccggctatgccatagaattatgagactgttttagtattaaaataaagttactgaataacatagttaaaaactatgttctccatgagaaaattattttaaaaccagatttgaaatgacacataaaatattttaataacaggacaaaagtgaaaacaactaataaaaaagataggatttctgaaacatccttagtaattaaatatttaatttcattttaactaagctacttaaaatattatgattttgtttttatttgaaaagcaaagatcaaaagagatttattttctcctctgttgagcatgttatccatacaatataggtcaaatcgcttagttaacgatgcttgaaaatgggttcagtatctagtagaagtctttctgttttctacataataaattatcttcctgtgccacctaaatccccactaaatacatgaaaaataataaaacaaatgcacctgtaaaataaaaatatgasctctcagagtagtttcactaagtcaaaacttttttgttgcttatgacttttgagtcttccacagtaagacaaatgagataatttcatcgccctctgtatgttgcatctttgttagaaatgagtttcatgtctaattaggttactttttattcttttcggaaaatgcactggtactttactgtttcgtttgtttgttttgttttatgtttacttcgttaatgttactaagccgatgaaagccaaaataaaagacatgtaaggcaggaagaaaaattccaaggaaaatatattgctggaaattaaattacccatttgaaagttaaaaacttgaagaactgaatattaactaaatttcatagcaacaagaaggattttgcttgaacaaagtctctgatagttcacattactcaggatacgtaaaagaagcaaaattacagttcgtatgaaaattccaggtaaatgggagccaatttcttcgtctttacctggctatctggtagccaagcactttgagcattaaatagaaacttgtagatttacaattacattcattggcatagggtttactacgttaattcaaataataattacatgaataacttttgtgaggtttacagaacctttgttactttccttggagtcacaaaatctgtccaggaatacgataaatttgactttgctgtgaccatttcacaataggttaaatgtcgagttaccatattcttaaagtccaaagctatgttttcactgacaaatttgagtttgaattatttggatcattttctaatgtgaatcataaaagtagatagcataaatgcttaaatgtgcttttttgcatttctacaacctaaaaccagtttggttgaaaaaaataaaatttaacagccttcaatttgtcatgtggaatctgataccatgtgcattttattacctccatatatttatctaagtgaaacataaaatggttgtaataatggagaatttaaagtagcttttgcacatgagcagtaatgctaactaatatggtgaataagggctgaatgtaaattctcagaatttctgtttcttgtgatatgtttgctaaagtgagcatatcttggataactgatagaaacacacataatsctaattacgctgtgaggaactttgatggacataatggaaatacagggaataatcatttctatacaagccaaaacctcgtatatatattttttaaattttcaaactatgatacagtgtacattagatcacagaacctgccaaaatataaacccatatctctttttaggctggatttagactctggtattctcgtctatgcattcagagataatctaggtatggcataaatcagtaaaatcaaatatcaccagttcctattgattctacctcatttatagctcttgaattgagcccctcttttccatttctgttgccatttggttaggccttcaattatattttatatgaattattgcaataactacagttctcttaatgacaccagcatttcaacactccagcccatttttatgtttctgccagatttgtttgcccataaaacaaagttcacsatgtcacccctctgctaataaacttctgtcagcttcttcttaatcataagatcaagtctaaaaccattaactttgtttacatgttctgaaacagaccctaccacacttgttagtcggtatttagcctactctaaaatcatacagcactcccaaaggtgcacagaacttgtctcttcttccttctctgcttgccttctactacttatccattcacatgctaccttttattctaaagcttgcaggactcttgagataaaattagytgaatcattgaagtatgttcctacaatacttggctcatatttcatttagaaactcaatttattatttttcataatagaccagtgtttttatgttcagcttcattgaggtacaaatcacatgaaaattatatatattcaagattttttttacttttttwaattttagtcattctgttaagtgtggggtgatatctcattgtggttttaacttgtatttctctaaacgctaatgtcgttgagcatctttacatttttttttccatctgtatatctattttggtgaaatgtctgtttatgtcttttcttgctttctaattaaattgtttgggttgcttttactgccgaatcatcagagttctttatatattctaaatactagtcctttgctatgatgcattcataccatgtactactactcagtgataaaaggaagaaactgttgatatgtgaaacaacctggatgaatctaagtgagaaattcaaatgccaaaatttgcttattatatgagtccatttgtatccattcttgaaataacaaaattatagaactagagaacagattagtggttgtcgaaggaaaggagggagtgggggcaggtagaagtgggggtggttataaaagagcaacatgagggaaccttgtggtgacgggactgttctgcatcttaactgtatcaatgtcagcattgtggttgtcctgttgtactacagtttgcaagatattttcattgggggaaactgtaatgggcacattggactcctctgtgttactttttacaactgcatgtgaatctaaatttatcgcaaaataatgtctatttattattccccagctttattaagktataatttacaaatttttaaaaattatacatatattcaagatgtgcaacattatgttttcatatattgtgaaataattatcacaatgaagctaattacatatccatgacttcacatagaaacttacaatctactactctagttaatttcaaatatataatacattattttcccccttgctaccatacattattattaactatagccaccatactgtacattaggtctccaaaacttacttatcttataactgtaagtttgcatcctttgaccaacatttccttatttcccccaattcttgacccctgataaccacagttgtactctttgcttctatgtatttgactttttttgattctgcatataagtgagatcatgcaagatttgtctttctgttctggcttccttcacttagcataaggtccaacaataccyctttgaggtattgatttcatttctttggggtatatatacagaagagagattgctggatcacatggttgttctattttttaattttttgaggaaacttagtactgttttccataacggctgtacaaatttattttctcactaacagtatacaaatgttcccttttgtccacacccttgccagtgcttgttatctgaggtattttgaaaatagccatcctaacaaaaaggaggtgatatctaattgtggttttgagacagtgtagggaagagactcagtcctggcagataagggccataataaccaagatcccagtgggcctcacatgtccaggcatactccctccattaccttcctgcctcccttaacaaactgatatgcccataagtttataacattctgagcttcttggggacaaaggtaattgcatttatatttgtgtctatagtacttaacagagagagtgttctcattaaacttttgttgaatgaatgaatsaatcctggaaggtctggagaaaagaataacacaaaaatgttattagaaagttgctgaatatagaaagactattcyaatagtcataaaatattcattaagaatgtcttcagacctctttgtataaaccaatatttttctctccatctgtagaatgatatgtttttcatcagaatgataaatctcaatagcaaaatattttaattttacatgacttcagtgtgtaaatttataaaagcctaaccattctataaaatagacatttacattaatttaatatagacacatctgtagatacaggcccacaaatcttgtcattaaatgtttacctctaacctacttcactatcatctgtttatatctgctcacatatatgaaatcaggccataaactaagtcaaatattctctggaaaagaataaagattcatggtgctagaatcctatgaaacttatactgaccttcagattactggcctgaatatgactgattcatgaagggattgtgaattttttaagcaaataaaaccttgtgagagcctaaacattattgactatgtttagatagataatataacattgctttgtattttataattttatatcagagaactctgcataataataagcactctattggatttaacatagcataataataagcactctattaggtttaatgtcattttccaaaccaataataggcttgaattaagtagtaaggcctttgccaaatgtctttttaattgtcaaaatgttttacattctaatgtaagaagcagatatcaatatttataagtcaaacagaatactttaatttgatatragagacatactcgaataccataacaaaaacttctttgtttcatttctatgtgtgaaaatgtctgtcacttacatgtattgtcttctaattgagggcatgatcactattagaattatgcataatcaaatactgcatttttttcacaagaataaaatttcaaatccaatactagataatataaaaatctatttgacctttgtaaagttacattaagtgataataaatttaattacctggtacaaaaagccaaaaatatcaagtcatagaagaaaataaattttgagtcttttactttaagattaaatactgaaattattttaattatatttctttgcaacttttattgatataatattgttattactttcttagttattttattctatattattagttaattcttgaaagaactaaaaaactttatgctgtatcataatttcccactattgtacattcttcactttttgcctaagaacaagctaagaatcatgagcattaaaaccgttttttaaaatgtgatgaacccacaaaaaactaaaggtgtacttgagtctgctagatcaacacattcttataattccctcaaggccatcatacagtttggcacccacatttaagctttgaaaattatatgaccatctattacattttagatgtcacatgtcctcagaccttttctattataacacaagacagagttrgaccattttttaaaagatccctctgttattgataattgcctaaggtgcttcttccttttctttttcagaatgaagaacaaattttggtattttgagtttggcacatctgaaactttctcagccacctgcaagaagctacaygaatctgtagaaatagaagtaagaaaaaaatgaattctcttttgtaatatgatgaaatggcttgagctttgttgttagtatatttgcattggagcccatggaatgaaatatrtattagcaatccacagagacttactcaagattttaaattgtcattcctttcactcatttggaatacagcactatctgacatactaaagttaagtgtagatatgggttattttattatagtataaaagaatgagaagtggaacacaactttggaaattgatgcagttgttactgggcatagtgcagatagaaaggtaagataaaagtagttgggaagaaaaaagttgcagaatacataaaaaatattattttcgggtctcaatatcttgtaacctttaaaacacactttgctaaaattgtacttacttttatgaataaaggttaaaaagtatacttttccattccattcccattcattaactaggttttctcagttcccaaggttgccatttccccattacatttatagaaagtggaaatgccaagaaagagagcaaagatagcaagaaaagacacattttaaaaagacttggagcaaataggtctgtaaaaaaaaaagacactgtaggactcaaaattttggagaaatattataaaagaaaatgacttcgttatattgagagatttttaggggttaaagaaaaaagaaaagttatattttgacaaatgataaagacaaaaccagaggaacagaattatgaaacatgaacacttaatgactagttgatatgaattaagaaacattggcttcaacacttttcattttaaaaataaatgcaaaaatttgctactgatacctaaatcattagttccttatattcaggtaataagtttggtaaacagaagtagttatggaccacacaatggcctggctaagttcttcattatcctaaatttctaatttgctgttattaataataccaaaaaatgatactactctcagtgtaaccttttagcacttttatctcatcatgattggtaaatataattaagtattagaattgatggtcatggaatggraaaaaacccttcataacaggatcagatcataacctttgaaaggaacataattacagaggtgaaggatttgggttcaacgtggactttctgttattactatttaggatgatatatctgtgtatatgtatgatatatgcacacaaataactgtatataaaatgatatatataacacatatataactatatgcatgtatatctatataataattgtatatgtactacagttatatatttagttatatattattgtatataataatatatgacatctgtaactacatttagttatatatttagttatatatattatatataataatatatgacatatataactacatatatagttaaatatatagtatatatggttatatatgtgtcatatgtattgttatatacatatacatatttatgtgcatatatattcaataaaacatatacatacccctttactcttagaatcattatttttttwaaaaaactgctttatatactagattttgaatatttcttatcctcaaaaattatgctcaaatacaatttgcagcagaagctgaaaagttttagaaaaattagaagtatggctttggttgaatgtaggtggagatcctgaatcctcctgcacctccctttactttatcctacccttgagcacagatttaaaagctgttgatctataaaataagattctatgtgtcacaaagtacaaaaaaaaaatctttaagaaaagtgttgtgtttacagcaaaagattttgaatgaaaatatatttgaaaacggtgatttgtaatatgctaaataatgataaaattaagtggttttgatccacagagcttgagatctgacagaaaaactatttagaatgttctccaagaaatctgggctactagaactaagttatgtttcttggagtgctgtttctgcttactctctcagcctgaccttctagctctgcatccctggcttattttgggagctattaaaataatatttataaatcacagccagcactgtgtgcatgcccccttgtatttttgcatatcttgttgtgtgtgtgtgtgtgtgtgtgtgtgtgtgtgtgtgtgtgtggatagctaggcaaaatctgcttctctgctcactttttaatgaatcctgtctatcatattagcagaatatgcctttctaccctcaaggttattttataattaaatataacaaaaacagaaattcgaaaatttgattctgtttgttgttgcttcctatttgtcctaaaattatacctactatggtttgaaaaatatataacagaataaactacttcagtaaaaacagaacctccagcaatagatacatgttttattggcagctttttcaaaatcaaactatcttttgtgtgtctttttatttaatatttctctttcacatagtgagcaccttcaaaagagggcaaatatttgggttgatatgaatatcatggaataatagttaagatttacctattattaactgtctcacaggtgatgctaaacaatgcacatatattatttgatttagtctttatcaaaaccttatgatactgttatatctccattgcagagataaacattttcttcagtaatttaagagaaataagaattatgttgctgccacaatgtttaaatctaatgagcaaattgattgaaaaatatatgtatttacacatacatgtaaagatttaatgatacacgaagtagaattttttaaagatattcatttatcttctaactttattacaaaagataaaaataaattctttaaaattacaagaaaatattttaaaaccaatgtttatattaaagtatttggaggggtgaaatgtgtgcctaagaaactcaggtcagcatttggaattgaagatacagagttcatgaatgttcagtttgctcagagtaccaggcaaagttaatgagagaataagaaagcctattctayagatatttcagtcttttggttgacagggatactgggaaagatggtaaattttaaagccaagaatttccatcccaaagtactgatttattgtaatgattaaatacccctagaaacctaaatgatctcaagaattaatgaatggcatgactagcatcaaaaacacaaaataaattagcaggattcaaaagacaatattcttattgctcagtaacctggaaaacagagttcttagaggcaatagccagagttcccaagcatagtctctgccccatgtgtcctaatactgaaattacctataaagtaatgttttacgtttcattgartaaaaatagaaataattcttatctgatatagacatagaatcagacctactatggaaaaaaattacagtttatcattaattgtatctcatcacatttaccatccacacttagagctctccaaagttcttcacatgttttgaatagtcctatcaactgacatgttaagtggatctgaaacactaaagtcacatataaagcttgtttttaacacctctgtacggtgtgacccaggactcatttatttatgaaggttaaaacacattggcagaaaaattgaaaccgtcttcttttcttttaattatatttgtctctggaataagatcctctattttaaaactgaaaagagcagacaatggcatcacagccttgcactctataaatagctcccatagtactatatgttaacgaccttttttctacctaataaaaatattcaggatttattgactaactgaggctgttagcttttaagcttttatattcttttcctctgtagctacctttttaaaagtcataaatctcaaagggaatgaaaatattatctgacacagtactataacttgtttatatttcatagccttcacctcagcttttactttcatgcactcaactggtgtgctacaattactggtctccatcagaaccagcactgaaattttccagactaatgaacataacgttaaagcaaacagaggaaggtagcctagggtcaagaacaagtggaaacaaatcattaataaatagcaatttatttaagtacattgtcctgctctcaaaggaacatcaatgttcttcatcagtccttgttctttgcgactgtttgagaattttttttcacttctcagagagctacttactctgtttccctaaaactacacatgacaaaactctgaagagtgaaaacatgaataatagcatacactcatgtttttcaattgtcacatgtaactcagctggttcaattcttttttttwaaaaaaaaagaagcctctttgcaacatgctctccttttctgcagatgaacaaaggaatcctccttcactaattctgaaagtaacttgtcacagtggggttctaaggcctagtcaaataattgtcttagtgtactacctgctgtgttcaatattgagtgaaaatggaagccaggccctgactccagcttatttcatgattcttctgttatttaaatgattttagtcagtttgggggaagccagacctttataaattaacagcagggaaataccaaaggtgtcagattgcatatttatcatctttttcgtgtaatacttaaatatgtattaagaagtgactgacataaattaggcagatttcagaagccacaggccgtggcttgtagaggacccccttctgcttgacatttcatccttgtcaaagatcaaattattttaatttaggctgcaaattataaggaatgaagacttctttgtgggaattccctgtggtaatctgacttttgttgttactgctgcttgtcagtgtgcaaaagatataatatgcatgcaaataaggttaaaaaatatgtactatctaattatccagccagtacattccacttgaagacagtgggaggcctgacacacagtatgtgtttgattcattgaggcctgcagggtatttacacaagattacttttaattatgaaattaatatctgtttatctagaatatatagcggtaagtgagtatacacatgaccagaattctttagtaaaaagaaatcatcttaatttagtaccagaaaaggargaaaaaagcactgctttctggaaaaaaaaaaaaaaaaaaaaaagcatcatccagatcttggtttcgccctcattgaaacaaattaaatgaaaacttggcactttctctagaatttgtttctacccctgccaagtagtctcaagatgtgtttctttatttcacagtttttatttttcagtgaacaagatgcaatcctagcttcagtatgatgaggcgaatgtggaaaaagagagggcttttttttgttttgttttgtttgtttttcatcrttttcatggaacactgtgtcttctgagttcaaaaatcatgactgccatgagaaatgatgaagttagtgtcaataattttttctgtactaagacatggcaaatgaaacaacgccactgtaaatatatttcaatttaggaaatgcatatccctcacaaagttcttttaaaaacaaagcgcttatatctcttttcatattcacttataattgaaaatgggataataatttctagaatgtataataataactagcattttaaagaagtcaaggcaaatgaataaataaatagtaattttaaaaatacagaakagtcttgtcactgtccacatatgtccagtagtggaaatgaatggaaaattcaaaaaactaagaagtgaccactctgaatataacaaaacattgtttgttagtgaattttatatttttcataatcaccagggtgttttgtcaccaggaaaataagaaaaattgggctgattaaccttggtttttttttaaccatttttgcagcagctataaagtcatgctggattgaaggtcttttgactgctactcctatttccctcaatcaatctacccggccctccatattcatttggacaactgtgcctctcatggcctttgacatctccttaggacttcatctagtccaagaaaccacccttggtaaattcagtgtgattgaaatctcttagaatctctgctttgaattttactttttttttttttagcaaaagtcttttaagctacttctttctctgccccaaaggtgtgagaccatgaggcatcaatctgctttctgtactttcccccartagtaccttgcagtgtgttctaaacaggggcaatcatcacaatttcttcctaaaatttgaccatagtttccagaattaacctttttgtaacacattggaaatttgcagctggttaaatatatatgcagatgctaacgagtctctcccaaaggttttctacaaacaaagatatactggtgatttaatttgatcatttttaaggacttctagagataactggttaatgttaggggctgctttatcttttatattgactcagggtaagtgtttaagtgttcttgaaaggcttgtttggaaatgacaacattatggatttcaacgcacttattaaaagatgaggaaatgaaaaacaagaaatcagggaaataaagataaaatattccgtttctgtttctttctttttaccgatcagtgtgatggagtacagatagatttaataaacatctctctggaaggaattgctattttgaatataccaagcatgcatggaggatccaatctttggggagagtctaagaaaagacgaagccatcgacgaatagagaaaaaagggtctgacaaaaggaccaccgtcacagatgccaaagagttgaagtttgcaagtcaaggtcagttttctaacaattagttgttaaattgcttgttaacctgttttcaaaggcttctttaaaagtaaasagtcttccgttgcactataataatttatatatttttacagttgtatttttcatattatgggatacccatgtgtgattaacttatatcacaatagwttctaactcaagtataaattggctacatttttcgttattcttcttcgtatatagctcttcccacagaaaataaaatacatttggggtatttcatggataataaaatagaagatattgtatattaagctcttctgaaacgtgattgtcttaaataggacatttgagttgctggaataaggacgtagttaaggcttttctaaggttgtgttataagagattttgttctttttctgctttggtcaggctatgagattgaagctattttacagagctgttgttctaagtaccatatataacagaatgtttaaatatcccatgataaattttggttgtctgctgaatttttccagaaagttagtaacaacaagtaggagacctgggaaacagaaagcaaagacctaaaaaaagtagactagactaactatgggtcagaattttcaactctattgtaatatagttctcattgggacatgatacctaattcttagagattttataaactagagatatcaatgtgatattctgataactaatcatgtcccaatagtttatgtatgtaattctataatatcatttttaccttctagaatttacctaatactactgatgacattgagaaatcaaaacatgttgtctcagctcagtgtagcaaggacaaaatatgaagagatttcagtgttaatggactaatataaataaattactaaaaaatgaaatagaataaagtgagaagatggttggtgggctttatggtggtgggcaatagctttatgttttggtgtctttgagtacctggttcaagtttcagtaacaagcagtgacttcttttatataaaatttggtaccatgaaagtggaaaagattgatggagaaagtgttaggtattctcttgaaagaaatgcttatcacaacctgccaatgacaggtggttttgatgcccttaaaatgtgtaagtaatcttggagaattgtattagtacaagcatgtttataacaaatcaattaaaaaattacatactcaaaatataactgtatgaaaatatggaggaaaataatattttgaaggagaaatatatagaaaaaatgaggttcgtgctatatgaattagaggaggaaaataaatataattattagtttctagaagttattgaaattaatttatatttgtatttaaatattcatttaaatgtaaaattagtagatttctaaaaagggtagtgaaaaattctaagtattgcaattagcttaaggaccatactaaaaccaagcttaaaaaacccttttgtaattgtatagcctgtattattaggtactacgtatgtactccttgcttccttccttaaaaatattttcactaaataatatatacaaaataatttccaggttaagttttctgtttggtcactacatctcaatacttgatatgtcttttgcatctacacattcccgatacttatacaaattgattctcaatggctcagctgccaactacattcacccactgggttgttgaacatctcttagatacagcactgtgctccacccaaacacacgtctgtacactcgctctggagctgctgcatacatgtcatttacctgggctcactcaccctccttcgtatgattttttttcaggaacacacatttggaagaaactacaaacaaaccagactcaaatattgtcataggctgtcagtgcctgtaactgttggaaaagcgctctcttccctttctgtcttcttgctttctactgtggaactattagaaccaatttcccataaattctgggaaatgaggaagtgggaatatataggccttgtgacttagtaatacatttttctctgtacacagatgggaaatagttaaaaaacagcagagctcagagaggtttcaaaggtcattctatgagcaaaaacagaagtatgttaggctcaattctgttccctgacttaactgactagcttatagttttgatttagtattatttcaggataaatayaatctcagaaccaagaatgaccttttgagctgaatattttttaaaaacctgttatatattagtcttttctttttagtgatgatttcactattgttttcactttgagatactttgcaacagaataccaaaagtatctcaaaatgcttctaagttttgatttcatatttattctgctaattcttcaatgttatacttaatagccaaaaacaaaatttactactgagatagttacatttatccctttcctaaatagtaatatttctattacttgattttgttttcaatttcttgacataaaaacagcaatagggcaggcatggtggctcacacatgcaatcctcacactttgggaggccaaggcaggaggatcacttgaagcagggagttcaagcccagcctaggcaacatactgggaaaggaggaagtgggaatagcacctggtgggtggcacaggcctacagtcccaactactcagaaggctgaggagggacaatcccttgacctcaggagttcaagactacagtgagctatgattgcgccactgcacctcagcctggacaatggagcaaggactctgtctcttaaaaaaaacaaaacaaaacaaaacaaaaacacaacaaagcagcaatagtattaaatgtgagtatttcaaatttatatatatttcaaattcacacaaaatcattataagcactgactttagaatgaatatggccaatatggctctagtccaacacgtttttaacctacagtcaaattaataactttcactgttagaaaatacatgaaatgaaatgaaaaacttaacgtaattttcttcttgttctttcttaaaatattaactaacactgtttctcatatgcctctgtaaaaaattatcagaagtttcaactaaatttttacactgttgaaatagatacttgctttcataaactttagatagtttcttttggagggggagaaaatgggggacacatgtaactaaattcatgtaataaaggtaattattttatttaataaaaggatttaatttgttttaagtttacccttttattttaatttaaagtttactcttttattttaatttaaagaaatatcatagtccaaaggtatgagatcaggtttggagcattaagtccttatttatattaagctgtacataatctgggacttctgcataatttatttgcttgcaatctttgaagacactcacataataaaatcagaatatcttcaataagttcattggttggaaattttactgttgacttactttagagttgacaaaattgtgagtaattcatgtaattacattattccagcaaaatattctaaaatagttggatgcaattctgaaacataatcacactcacactcaactaatgcagtagacattttctttgtgtgcatatgtgtttataaatacaaataaatgtattatatatagatggcatagtcttgaagcaaaactgtaaactaggccaaattagtcttcagttctcctagcgttaatattcgacctttcccatgtctttcagtagctgagttcatcttttcctccccctcttctgaattaaactcagaaagatgtctaataaattcattcacattaatgtacaaatgactgattgcagatgaaagtagaggtttttgcattttaaaagatataaagaccttcagctaaaatgttatttttcaaactgtgttccattgagttataactgcaattcctctgcagttctgtaataaatgtaaaaaaaaaaaattcattgccagatttgcggacaataaaaaaactataataaaaatatatttgtcatattaacagttctcaaatcattaacttgtgttaccagacaaaaacaacttctcctccttctcttcctcctcttttttctttctatataggtagatgcatatatagatagttatacatacccacatacacgcgcgccacacacacacacacacacacacacacacacacatatgtatatacatataagaaataaataactgtggcattgactggaaagtctatagatctgcaatggacatttaaaaatatgtctttgcatatctcatgagaaatattgtgcaaatgggccacaatattgtgcaaataccaccacagtgcatgggaaccacatgcaattaaaaggccagcaaattcaggtacttttgcatggcacaagcaccaaacaacatatggcaatcagtggacatgaaaacaaagtgatgatacctaaatgaaaatgcagaccaccataagatgtatttttcctcataaagaaattgtatcagttaattaactcccccaaatattaataataattttgtactggcttatatatcaagcacacttttatcagagaagattttaaacatgctcacaactgcgtgtaagcagccagcaatgaaattggagcttttcaggtatgtacacagaataaaatatatttgactaattgaagctttgcaattcaattcaattcaatgatacagcaagtatcattatgtcatgaatttgttttgttgaaagtgaaaaattctgttaaaaagacacttttgaaaggtattttttaaccaagagtgaggacctctcaaggaatatgaaccattttagttactctaattgatttagctttgaagatccaagtctattccagtttttggtagtggagacagaatggttcaacatggctgagaagcaacacattcatactatttgattatatatatatgtctgtatcaggatattgccaataccacaaaaccaaaacaaaatgcagaaatctatgaaaaataagatactatcgcattgcaattgtcttcctcaaaatagatccattattctcacagattgattttttttttttttttttttttaagacggagtctcactctgttgcccaggctggattgcagtggtgggatctcggctcactgcaagctccacctcccgggttcacgccattctcctgcctcagcctccagagtagctgggactgcaggcacccgccaccatgtccggctaattttgtttttgtatttttagtagaggggtatttcaccgtgttagccaggatggtctctatctcctgaccgcatcattcaccatcctcggcctcccaaastgctgagattacaggtgtgagccactgcccccggcctctcactgattgattgtgttgagagtgttagcaattagaacttctaaaatggatttgcacaaataaaatttcaattttctcttttacttactggtttataaaatgttgctttgtttaaaatgaagttgttgactgctttaaaaagtttgataaccactgagcgaaagtaattatattcaaattatggagtttcaaacatttgccagaagctaagggagcagctggactttctgcttgaaacctcattaataggtgactgtctaccctgcatatggatacaactgtccaggtacccatcatgcaaaagtttatttaaaaactaattaacatattatattgtccagacagttttcagtgatttcattcacatttaacaatgatactcttttcttcgggcagaatttcccaaaacccagcaaggactccactgatggaaaatgagatgggttagtgggtacatggatgaatgttttaaaagtttaatggttttatatttactrttacagttgtcttctctttgtggtaagaaatgctgaattttttactatcatttataatgttaatcaaaattttcttttaaaaattaattcaagtaaaaatagagtaaaacatcctacctaagtgataatttagaagatacttagatgttgccaaaattgtgaaggtgaagccagaaagactaaagtttagaaaactacactcagctgctgcagttttcaccaccttgatagtgtttgcatagccccatgtggaaatacttaagcttaatcactcctacacattccacgaaggcggcatagtgttcgtggttcttggtgcaggcaccagattccagctggctcaaaccccaactctgctgcttatctggacaactttgggcaagtaacttcatgtccttgtactttaatctccttatctctaaaatgggcacaaagaatggcgccttcctcatatggtgactgtgagaatgagaaaagcccagattagaagcttagaataggggccagtacgtagcaaatgcctagttaatgctagctactatctttcatggaaaaattcaggccaaaaaaacaaaaaacaaacaaacaaactcagataagtagccccatgtggaaatactttactgtaaacattgtttttattcttcatcatcttggataaaatttactatgtattatttcccccagaataagcttttcyatatactttgcaccaaacatatcctcatctcaccctatttgatctctctatgcactgttgggagagactgtgtatctgattggctgtcaaggagtmtctctactcaagtgactttattactattaattttttaactcccagaaattatgaagaaaagcaaaacaaagcaatacaaacyaaattgatcaaagagaataaatgagctgacgtctgtgaaagcttggcaaaacttaaatttcttttgcctctgaagataaatatgatttctagctcccatgtcttcatctttaaagatgagttttggaagagctcactggtggtgagtgctggaagaagtaagattaatctatgtgtgctttacattatatttcccagataattgtacactttgtataccttgtaaaagttattcttatttgaaggttgatggcaatggacatttgtcatccactattatgaatttttctagacatttctatgggttatttagggtaatttagaaagcagtgttttaagttgtctaaatataaatgcaatattcattttagaactgtagatgatgtatttggcgttcaaacaccggcaagcagaagaatttccaagcatttaatttcagtgattaaatcaattaaatttggaaacaagaaaaggatttcatgcagcattattacacctggttgttaaaactgttgaaaaatagtatggcgtttgagatgttgcatttcacaaaaatatatgcatacactaataccatgatattttcattggttgaaaatagatagatccaaacatttgctatctagtaacctttaagtagatgtctcccaactatgtttttaaactgcctcctttgaaattttttagcaatggtaatgcaaataatagcatatgcttaataagactaaatatcaaaattgctgttaaatttaagattacatcatatacctgggtatcttaatgtgatggcactaagattttttttaagttataattttgaagtttgtaaaaagtaataaaaagttagagaatataaggcatatttctaaaatgtaaaaataaaaaaattttcaatatataagaccaggtactcttatcctttgtttggctatcctataaaagcacatgcattatcgagaagcattaatgaaatttctatttgtcatagtactgtagaaactgcagacactggtagctcctagaaatttaaaaagcacaaactagaaatatgaataatattttggaggaactgagccactagatgacaatatttagaatattctcatatgtcttctgaaggtatacaaattaccttttcatgaccatcattattgccacctttccccttgttcaacagtaaaatttaaaaaatctggtgtgcagtataattttaaaaacaaaatctgacaagaagtataatgctataactttttatggtagaattggtaagactgcaaagccattttaaattgaatataacaggtaagtaatcatttaaacagaaaagtggtattttctaatayataaatgaaatcatcaccattgatcatcaatttgttcattcctgaaaagaaattgaaattaggaaaatgggcaaaatccaaaaaggtacacagggatggcagaataatgagcaactctctatcacctaatgaatgtagggaaacaagaaaaatgagtttttagtaccagtcgcattttgaaaaatatatggtttattgatcaatttaatagttgcaagggaaaaaggaaatgaatgtgtttactcaggatttttaattaaggctcagattgttaatcttatatgacttctgaggaagaatacattgtttattttcaaaattctacatgctattctaaaacccttctatatttctagctattgatttttgcaattgcagagaagattagaaaatacaaatgctttaatgggtatgttctgtagaccttgatatctgatatcagtggtaaaattatcatcttatttgtttctgtggcacagttgtccagtcctctgtctattgaaaatagtggcagatcacctacctagagtaaagctgcatcttaactttaagtcaatttaacgtacccagtggtagacatataaaacagatttccaaactaaataaatattgcctgataatataacgctcaagtgattaaataacacatgtagagtataccttctaatagtagacacataaagtttccagatatgaggctatccatacaaatttcctaaatataaagcctgatagcgatcttgccctttgagggtaatgatttgaagctaaggtggtagatagctccycaggaaattacaataatttctttctatcatcaggatatctgacaatcagttggggaggattttaaaaaattataagcatgaaagaactattaaaaagacatgaaatcagctacagaaagtatgaaacagaagtyacagttacttatttattgatattaaaaaccattttccttgttcctccagatagagaataataactgagaaaaactacaacctaattgagaataaaacttcaattgtaccatttcgtgaaatgatatctcactagcaatttaaagttataccagaagagatatcagacttttattttaccttctttatttatattttgttttctaataactttaatggatgtgatataatggccacactctagcacttgattctgcttgcacactttttctaagaagggtgctaggagggtccagtgaactgcaaaggaacttgtttcttgaaaaatcagatctcatcatctacttgtatttgagctgtatgaatttgaattaaacaaagcaactagccattggagttccattgccatgagtttagtttccatgaatatactcttttattatatagagctaattatcatgtgaatagtagctccttggaagtgtgcggccactctgttttgtggaaatacatagaatctcatgtagttcatgagtcccaccacactgagagtaatcattctcctggcttaatgaaaatagttctattgttcttcttttaataaattcgagtttgtcaactcaggttattattttaatgtctgctttcggcaaggtttgttagctgttgtacagtatcagatattaatcagattaagtattgaggtctgaatattataaggtgacagacatttgcagtaagattacaaatctacatggataaacatgactaatttaaaagagccctggggagcattttttagaaagttcaaatacctgctgaatgctgcactgttattttaattatcccataatatggcacaaaataacaatctcatttcatccttttatttacaaagctgttcccattatcattatattttacctgctcaagctctgaaagattgctcctcgttgagagattcattaaaagagaataattatattatatttcacagattggcagaaagaaaatgtatctttgaacaattccatttccctgagcrgctgttcatttcagagttgaagacaggtctattacgtactttctaccctttttaaacatgtcaaagctaactattaatactgaaattagtaatttggctctggtttaataaaaaatcagctgctatttgtaaaactgaatttctgtgaataaaacacaaacataacaatattttcaaaaatattgaataacgaagaacattaaataattttattttaccgaatatataaatgtatgtctcttcggataattaaagcccttagcacactgacttgttttcctactaatgcttcttaacccaaaaagctacataaaacatattttcttactaagtctatgatattcaaattttcagagtatcctgttagaagaatagtaagagatggaaagtcaactagtatcatagaacattccatttttagatttactgaaagaaagtttcatggaatttgtgataaaacgtcttttcaaaattaaaaagtcatgtgcacaaaaatgtgacttccatataaaataggtttgagaagtcatttcatattttaacatgtttttgccatgaaataagctaaccatggtctcttgcaaggaactgaaaatgctacttatacatttctctagtaagtaattgagcaaaaatgaaataatgtattaatcagtgatggctttacaaaaatttttatacttggtgataaatacttttttgcccaaatgtcctcggtattgttgtctttttttcacaacctcactctggccagctcaccacgagtgcagtatcagaatgtctagtgagtctagtgggaagcaaggagtcaatgcatcttttactcagtctaaaagtaggaaaatgctcttttgattttaaaaagacagtaattgtatcaaatttaacaatttaaaatgtgtgtaggatttgaggagctctcagagatatgcaatgaagtaatctgtgtgtctcattttaaaagtatgttaactaaaatatactgacatattaacagtgctattttgagttagatattttatacatttgtgcagttagatattattttcaattatttgttaatatattttctgtttatttttaaattactggaaacagtttcttccaaaggtttttaataaattctttattgtaattgttttgttaagacaaactattttaaatttctgtttgcttttttttgtttctcatttctgctgtttgtcttctgaatattttatatatgttatctttgtaaacattacttttcatccaaatgttcatttaaaagtcagcaatcaaaaaggaactataacaggtgttttcattcttgaggaatgaaatgaatgtgctgtttatggtagatactgaaatttaacttccgttgcaattcaagagccattctgttatccaaaacatttaaaataatcaaaaatgaaataaatgaattactataggtataaaagttgaattaaactaaaaaacacaactgacatttgaaacccctgtggtagactttagtacacatgagtatttactagtgagtactcagatatgtcttgtgtatatgtgttgtaatagagagtgtatgtgtgtgtgcatgtgtgtgtttgcatgtgtacttaattggttaatggggacaggctaataatggacatgtagatatcaaaatgaagcctggaataaaaacatacttgaacacaaattattttgaaagccctaatcagaaaatcagggaaccaaagtattacttcaagaggaaggcgggttcaggggtgtttttgttttgcagaggaagctgataggaaacaacaaaacaaggttctctaagaaacaaatcattatgccattcccgcaaaggaaaggaggttgaaaatgtatagacaggagaagggaattccttcttctctgtcttaattttctttccttccactacatattatctcttgagaataatgttttcttcagatttcattacaagtcctcctccaggtgagaatgtccattctatggtgattcctgccacagtagttgaacaacccactctcttggttgaccttgtagcaccgctccacctgactcatgcaccagaacacagtagcttgggtgggaagacattagttctaatactgtattgacttttctttcatttttttggttttcaatcttcccaaaggtgcatgataaaaatgagttatcatattccatgggcaaggaaaaaaaaagagcaaattagtatcataccaattggtttattagaattctcaacttacccaggctgctttccttcagctttcttttccacttagcagctgctaataggggagacttttgacatagacattgaaggctactgagtttcttacacacaggttttagtttttagtttcctagactataagcacatgaatacaataagttgtatggttaaaaaaaaaaaaaaaagaaatctgtgacctaattatctttgccaggtctgtctcataacctatataagtagacataaacatttctgacttttstacctccttgtgtgatttttacagctcaatacattttaaacaatgattaaatagaaatgtaagattgtattatttttctataaaatttaaaatatgcacaaagctacccatctagaatatttgaagcacatccaaacatatagcccacatttaccacagaggtgaaggggccattttctaaccgtggaccagtagcccttctagaaatgagtcctggccccacagaagaataaaaataaatgtgatccatattttagtttatggaaatttttaatttttgtaaaaaaaccatattatgattaaagtagtagagtcctcatgactggacatctttaaacctgttctaatgaagaattaggttctgattgcttttctggtccagctttgattgatgatgttttttaatcatcctttctgaagaaaggggcaattcctattagaatatttatcccaacgaaagttgactagagtacagttcactcttttcaggtattgggatgattagaatgccttctttatgcaggtaatttcttgctgtcttgtctactcatttgttgctttcttcttcatggtgaatcgtggaatatcgtattttcttgctgctttcccttcagttgcacatctaccatcgctcactttcttaagattgtgttggccaacagcactgattccctcggaaccatataaccaaatcaccatgatgaccccccactgatctagcaacagagaccacatcacctcagcaaccagttcaggttgtacctgctgctcttaaatttctgatttccttctagaggtgcaatgcatttctggtgatgcacagagctgtttataagagcactctctaagtggctgtaagggaaagtacaggctgactaagaaattaatgacattgtgaggtgctgcctgctggggtgaaaataaatactaagagaagacagagaacaggtaatgggccctacctatgctgcaaaactcttttcaaacagatgctgactgtgtgccaatagatgtggcagtaactgtcaacaagatttatggcactttaacrtagactcaatacgagaagaaaggttgaaagagttctatgattttgtttaaagtttagtgtctcctgcttctgcagcaactctttctaggcagaagcgtcattgtctcattgcaggacacttgcaactctcagggaaactgtgaggtctcaggactttgaatatgtatcttgttctcgcgtgtgttattgttttattcttggtggtgattgctgatgctgctatttttaaattaaaaaggaaaacatcacagggttaaaatgtagtatgtctaggttcttataaaatgtagaaagtataattattgtttttttgccacctggtaatgagcttccatcaccgcaaatgacattgctcattcttcatggacaatcctaggtaattatatctttaagagaaataagtccttgaaagaatgattttctattgttcggtttccattgctgctggtgtcgggtcttaaatctgacattctttctttttttttttttttttgagacagagtctcactctgtcacccaggctggagtgcggtggtgcaatcttggctcagtacaaactctgcctcctggggtcaagcaattctcctgcctcagcctcccaagtagccaggattataggcgcatgccaccatgcctagctaatttttgtatttttagtagagacaatttcaccatgttggccagactggtcttaaactcctgacctcaagtgatctgtcggccttgacctcccaaagtgctgggattacaggcatgagccactgtgcccgccaaaactttcatatgcatatataaaatttgcgtatagctcttttcccataaatgatcagtaaatgaagagattatgcttttatcaacatatttttccctcaacttaactaatgtcttgattaactgctggtttctgtctttttccttcattaggaattgtgtaggatggacaaaacattttctctagactttgaaaatttagtgaaatggaattcagttcttgaactaagtaaagtgattaccctggtattaaatctgttgttttctaaggctaatagacaggttttttgaaaaccattttacaatgtttcatgtatatttaatggacagataacaagaaataatcatgccaagaccagaaatgtgaatcttcatataagtcattcactcaatagtttaatatgtgtcagccaatctaatttatgacaactcttctcactctactcaagcccaagtaggctttcggatactcatcaaacacatcaagcatgacatcatctcaaagcctttgcattgatattctctctgcctggaatattcttatctcagatcttaatatgactttccatggcttcgcatggcttctcacttgcttctttcaggtcactgaaaacaggtcattgttaaaatatgctctcttaagagaagctttctctgattccctgtctaaaatatcaccccatctcctccgattccctactccctctctatgtgttatccttttaatgaaactgaacgctgtcataaactacaacatatgtgcagaaaagtgtacatgtcttatatgtaccgtcaatgaattttgatagtcaatacacctatgtaaccactctctctgatcaataaatagaacacrgccaacaccacagaaacccctagttcacttgccctactcaatatgctgacctttttcaccatgaataaatgtttctggtttttatattttatagtagaattatatggcatatattgatttgcatctggccttttaaattccatattttcattattttatagtattaattttatgagtacgcagctttttccagtgggaagctrttactaattgtacttctatgaacattatcattgaagattatatatttttctgggtataaattgagtaataaaaattgctgggtcataaggtatgtgcatgttcagctatagtagacgctactaaaagtgattgtactgatttgcgctatgatcagcagtgcacaagggctatcactgctctacatcttctccaacactttgaatgatgagtctttttaatttaggcatcctaatttattgttctgtaaatatgcattttaatgatgactaatgatgtgaaacatcattttatgtgaccagatcatttggacattttcttttgtgaaatatctgcccaagtcttttgcctattttttaactggtattatatataatttatatttgaaggaactagaatcttttgttctctatgggttgcaaatatattctttcactgtgtgccttgcctatagtttacaaagtcttaaacatcagaatgtcttaattttattaaagtccaatgtatccatttattacttttttcttattgctttttatctgtagtttttaaaaataattttgaacatctgctatattatttttgagaagctttattggcttaactttaacattaagatggaattgatttttgtgcatggtttaaatttagatcaagaataatttcttttttcatatcattatccaactgacccagcagtatttattgaaaagactcctacacccactactcagtggtaacataatcttaatcccaagtttctgtttatgagtttatttatttctgaacactgtattccacagtaggggtcagaaggctttttctgtagtgtcagatagtaggtattttaagctttgggtcatatactctctgtcatacctactcatccctgccactgtaccacagaaacagccaaaaacaatacctaaataaatgggcatggctctgctccaacaaaaacaggcagcaggccagatctggcacaaagccacagtttgctgacacctgttctaccctatgggtcgattcatcagtccttacgccagtactacagtttcctaattaatgttttgttaatcagtttgttaatgtctcccctctaaaataaataaataaataaataccacagggattttgaataaaattacattgatcagtttagggacaattggcatttttacagtctgagtcttctaaatggtgaacatggtatagctttccatttttttcattttagtttcttataatggtttataactttctatgtagctgtcttatgcctagatatttggtgtttaacagtgctattctaaaaaatatattttctaacttttactctctaattgtttttgttgtaccaaaatacacagctttctaaaatcacttatcaattctaatactgtatctatagactgttggactttaaataaatatcatgccatcaataaatgatgatggttcattccttctttttttacccttaatccttttcttttttttttttttttcttatttctctgtttaaagtctccagtgcaaggctgaatacatggggtgaaaatggacgttggtgtcttgttcttgatattggaggctgtgggggagatttcaatagttcaccatttctctaatgttccttgtatacttttatggatacaccttttcaggttaaagatttcttctttatttcaaatttactatgttttgttataaatacatgttgatttttataaaattattgtttttcatctattgagagaatcatactttttattctttatcctgtgaatgtggagaattacattgcttaattttttttctgagacagggtatcactctgttgcccaggctgaagtgcagtgatgtgatactggcttactgcagcctctgcctcctgggctcaagagattctcccacctcagcttcccaagcggctgggaccactggcatgtgccatcatgtctggctaagttttgtattttttgtagggacagggatttgccatgttttccagaatggtctcaaactcctgggctcaagtcatccgcccgcctcatcctcccaaagtgctgtgattactggcatgagccacctttcctggctgctgaatttttaaattttaaagcaaccatgtattccttaaataaatctaacttggaatgttgtattatcttgttatacaacactggattttatttattaatattacatttaaaattttgcatctatgttcatgagaatggtcatgaattatttttcctatcatgtcatcattaggtttatttaataaggttatgcaaacagaaagggcaaagttggtaggcagtatgacctgcacttgtgagtatggctctaactactttatctaataacagaggcttatagctttgtgtcagatgcagaccataaaatgattctattataggtcaatctgaaatgcaagcagccctgtaacttaagttataggacagaccctacaggactatatatatatatgtaccacatatatgtactatatatatgtactatatatgtacacatatatatatgtactatatagtacatatatgtaccgcatatgcggtacatatatatatgtggaaaagatgctttgtggagttgatgacacacttcaataagagaatcacaatgtagtctaaggctgtggagcaaggctatggcattggcagcagaaaactatatgtcaactgagaacaagctctggacgtgctacttggactctataaatatggaacatctgaccatagcaagtgaccataatgaaatcacagggcccaccatatgctgagttttgttagaccaaccaagtcataagctcagaattcattgtaagatagaagtagatagaacacctggatcagacatgtagggccagagagcgaggaaagctgcatgagtgtctgttgttcccaccactgctggacccccrcctccccctcagctcccacctatgactcttaggaccaaatgtcagagaaggaaaagctttaatgagagttcttgaatagtttatcttgctttgttagtgtgcttctaaaaaagggctgctattccagcagtgctgcttttggggtagtggaaaggagaaattcccaatgagcagagctctgggagcctgcccagttatcctttgtatagagagtagcccaaggtgagaatacaaatggacctgtagatcttaacaaagtgttccaaagaagatgcttgtggatgaacttataggaatggggacaaggtaccaacattgcactttttcttagtgctgtaagtataaaatacaatactttatcttttattttggagaacatgtcctgacatactatagaccactggatgcataatacaaagatgaattgactctttagaggatttatctttcacaccctggcaagtcattatcttataagatctacagcctacatatcatttattgctcatctagcccaattagccaaagagtacactggttctcaaacttttagtctcaggatcccttcatactcttaaaaattattgaaaatcctaaagaacttttgcttatgtgaggtacatctattgttaccatataaaacattaaggctgagaaattattaaaatatgtattcatttaaaagtcttaataaacctattacatgttactataaatatatttttaaataactatatttaaaaaacaaaaatttagtaagaagagtggcactgtattgctttttataaatctctgtaatgtctggtctaatagaagacagctggattctcatatctgtttctacattccatttattgcaatattttttttttattattatactttaagttttagggtacatgtgcacattgtgcaggttagttacatacgtatacatgtgccacgctggtgtgctgcacccactaactcgtcatctagcattaggtatatctcctaatgctatccctcccccctcccctcaccccacaacagtccccagagtgtgatgttccccttcctgtgtccatgtgatctcattgttcaattcccacctatgagtgagcatatgcagtgtttggttttttgttcttgcgatagtttactgagaatgatggtttccaatttcatccaagtccctacaaaggacatgaacgcatcattttttatggctgcatagtattccatggtgtatatgtgccacattttcttaatccagtctatcattgtgggacatttgggttggttccaagtctttgctattgtgaataatgccgcaataaacatacgtgtgcatgtgctttattagcagcatgatttatagtcctttgggtatatacccagtaatgggatggctgggtcaaatggtatttctagttctagatccctgaggaatcgccacactgacttccacaatgggtgaactagtttacagtcccaccaacagtgtaaaagtgttcctatttctccacatcctctccagcacctgttgtttcctgactttttaatgattgccattctaactggtgtgagatggtatctcattgtggttttgattagcatttctctgatggccagtgatggtgagcattttttcatgtgtcttttggctgcataaatgtcttcttttgagaagtgtctgttgatgtccttctcccacttttcgatggggttgtttgtttttttcttgtaaatttgtttgagttcattgtaaattctggatattagccctttgtcagatgagtaggttgcgaaaattttctcccattctataggttgcctgttcactctgatggtagtttcttttgccgtgcagaagctctttagtttaattagatcccatttgtcaattttggcttttgttgccattgcttttggtgttttagacatgaagtccttgcccatgcctatgtcctgaatggtaatgcctaggttttcttctagggtttttatggttttaggtctaacatttaagtctttaatccatcttgaattgatttttgtataaggtgtaaggaagggatcccagtttcagctttctacatatggctagccagttttcccagcaccatttattaaatagggaatcctttccccattgcttgtttttctcaggtttgtcaaagatcagatagttgtagatatgcggcattatttctgagggctctgttctgttccattgatctatatctctgttttggtaccagtaccatgctgttttggttactgtagccttgtagtatagtttgaagtcaggtagtgtgatgcctccagctttgttcttttggcttaggattgacttggcgatgcgggctcttttttggttccatatgaactttaaagtagttttttccaattctgtgaagaaaggcattggtagcttgatggggatggcattgaatctgtaaattaccttgggcagtatggccattttcacaatattgattcttcctacccatgagcatggaatgttcttccatttgtttgtatcctcttttatttccttgagcagtggtttgtagttgtccttgaagaggtccttcacatcccttgtaagttggattcctaggtcttttattctctttgaagcaattgtgaatgggagttcactcatgatttggctctctgtttgtctgtggttggtgtataggaatgcttgtgatttttgcacattgattttgtatcctgagactttgctgaagttgcttatcagcttaaggagattttgggctgagacagtggggttttctagatatacaatcatgtcgtctgcaaacagggacaatttgacttcctcttttcctaattgaataccccttatttccttctcctgcctaattgccctggccagaacttccaacactatgttgaataggagtggtgagagagggcatccctgtcttgtgccagttttcaaagggaatgcttccagtttttgcccattcagtatgatattggctgtgggtttgtcatagatagctcttattattttgaaatatgtcccatcaatacctaatttattgagagtttttagcatgaagggttgttgaattttgtcaaaggccttttctgcatctattgagataatcatgtggtttttgtctttggctctgtttatatgctggattacatttattgatttgcatatattgaacctgccttccatcccagggatgaagcccacttgatcatggtggataagctttttgatgtgctgctggattcggtttgccagtattttattgaggatttttgcatcaatgttcatcaaggatattggtctaaaattctcttttttggttgtgtctctgcccggctttgatatcagaatgatgctggcctcatcaaatgagttagggaggattccctctttttctattgattggaatagtttcagaaggaatggtaccaattcctccttgtacctctggtagaattcggctgtgaatccatctggtcctggactctttttggttggtaagctattgattattgccacaatttcagatcctgttattggtctattcagagattcaacttcttcctggtttagtcttgggagagtgtatgtgtcaaggaatttatccatttcttctagattttctagtttatttgcgtagaggtgtttgtagtattctctgatggtagtttgtatttctgtgggatcggtggtgatatcccctttatcattttttattgcgtctatttgattcttctctctttttttctttattagtcttgctagcggtctatcaattttgttgatcctttcaaaaaaccagctcctggattcattaattttttgaagggttttttgtgtctctatttccttcagttctgctctgattttagttatttcttgccttctgctagctttggaatgtgtttgctcttgcttttctagttcttttaattgtgatgtgagggtgtcagttttggatctttcctgctttctcttgtgggtatttagtgctataaatttccctctacacactgctttgaatgcatcccagagattctggtatgttgtgtctttgttctcgttggtttcaaagaacatctttatttctgccttcatttcgttatgtacccaacagtcattcaggagcaggttgttcagtttccatgtagttgagcggttttgagtgaaattcttaatcctgagttctagtttgattgcactgtggtctgagagacagtttgttataatttctgttcttttacatttgctgaggagagctttacttccaagtatgtggtcaattttggaataggtgtggtgtggtgctgaaaaaaatgtatattctgttgatttggggtggagacttctgtagatgtctattaggtccgcttggtgcagagctgagttcagttcctgggtatccttgttgactttctgtcccgttgatctgtctaatgttgacagtggggtgttaaagtctcccattattaatgtgtgggagtctaagtctctttgtaggtcactcaggacttgctttatgaatctgggtgctcctgtattgggtgcatatatatttaggatagttagctcttcttgttgaattgatccctttaccattatgtaatggccttctttgtgtcttttgatctttgttggtttcaagtctgttttatcagagactaggattgcaacccctgcctttttttgttttccatttgcttggtagatcttcctccatccttttattttgagcccatgtgtgtctctgcacgtaagatgggtttcctgaatacagcacactgatgggtcttgactctttatccagtttgccagtctgtgtcttttaattggagcatttagtccatttacatttaaagttaatagtgttatgtgtgaatttgatgctgtcattatgatgttagctggtgattttgctcgttagttgatgcagtttcttcctagtctcgatggtctttacattttggcatgattttgcagcggctggtaccggttgttcctttccatgtttagcgcttccttcaggagctcttttagggcaggcctggtggtgacaaaatctctcagcatttgcttgtctgtaaagtattttatttctccttcacttttgaagcttagtttggctgcatatgaaattctgggttgaaaattcttttctttaagaatgttgaatattggcccccagtctcttctggcttgtagggtttctgccgagagatccgctgttagtctgatgggcttccctttgaggggaacccgacctttctctctggctgcccttaacattttttccttcatttcatctttggtgaatctgacaattatgtgtcttggagttgctcttctcgaggagtatctttgtggcgttctctgtatttcctgaatctgaacgttggcctgccttgctagattggggaaattctcctggataatatcctgcagagtgttttccaacttggttccattctccccatcactttcaggtacaccagtcagacgtagatttggtcttttcacatagtcccgtagttcttggaggctttgctcatttctttttattcttttttctctaaactttccttctcgcttcatttcattcatttcatcttccattgctgataccctttcttccagttgatcacatcggctcctgagccttctgcattcttcacgtagttctcgagccttggttttcagctccatcagctcctttaagcacttctctgtattggttattctagttatacattcttctaaatttttttcaaagttttcaacttctttgcctttggtttgaatgtcctcccgtagctcagagtaatttgatcatctgaagccttcttctctcagctcgtcaaagtcattctctgtccagctttgttccgttgctggtgaggagctgcgttcctttggaggaggagaggcgctctgatttttagagtttccagtttttctgttctgttttttccccatctttgtggttttatctacttttggtctttgatgatggtgatgtacagatgagtttttggtgtggatgtcctttctgtttgttagttttccttctaacagacaggaccctcagctgcaggtctgttggagtaccctgcagtgtgaggtgtcagtgtgcccctgctggagggtgcctcgcagttaaactcctcgggggtcaggggtgagggacccacttgaggaggcagtctgcccgttctcagatctctggctgcgcactgggagaaccactgctctcttcaaagctgtcagacaggggcatttaagtctgcagaggttactgctgtctttttgtttgtctgtgccctgcccccagaggtggagcctacagaggcaggcaggcctccttgagctgtggtgggctccacccagttggagcttccaggctgctttgtttacctaagcaagcctgggcaatggcgggcgcccctcccccagcctcgctgccgccttgcagtttgatctcagactgctgtgctagcaatcagcgagactccgtgggcgtaggaccctccgagccaggtgcggatataatctcgtggtgcgctgttttttaagcccgtcggaaaagcgcagtattcgggtgggagtgacccgattttcccgattttccaggtgccgtctgtcacccctttctttgattaggaaagggaactccctgaccccttgcgcttcccgagtgaggcaatgcctcgccctgcttcggctcgcgcactgtgcgcgcacccactgacctgcgcccactgtctggcgctccctagtgagatgaacccggtacctcagatggaaatgcagaaatcacccgtcttctgcgtcgctcaggctgggagctgtagaccggagctgttcctattcggccatcttggctcctccccccaatatgttgttttaattgaagtctatgaagaaaatcaagcctcacacagatatgtagttgggaaaaagagtgatatgttaataatctgttcaaatacttttggatattattctttgrcattatatcaaaattcaacaagtagtagtttcttaaaggttacttgcaatgtgaaatatagaaacatcaatcaattttttgtactcttttgcattaaaatctacaggtatgtcttgaactttgaatggatttcttaactatgagtgatttttaataccatgaattaatcatttgaaaataatatcagttctgttatgcaggctttcaaatattgacacarattattatacaatatcaaaaatcatacttgttgatttcaagctaagactagtaaatacaaaaagtttctaaattcctaattttcacttggaacattgaattttatyattgggaacaaatactgtcagttgttttccatcaaactgaaaaactccttccatttttaagaaaatatctgccaactaccccaagatacccaagtctgaataaccataattttaccatcagtacctttgaaggtgttccatgaacaaagtggctgattttgttctcaatcacacaagtgtttttctttaaacaagtatcacagtttgttatgcagcacaattgctttatgcatattccccatttcaccacaaacaatactaaaaaattgtactcaagagtaaatatttaataaaatttttactgcttcatcaaggacattttaaagctttgtttaaaaactgtaattcatagcaacgaacaaggcattaataacaagtatagttaggtgctacttgtttcatgctagagatccagcaattttatacaacattgttttgcctcatcagtgcaaatgttaacacaatgcgtataaaaataattttgacctcattaatctcttgaaagtgtttcagggaccttcaagattcaaagaccacatttgcagaactgctgatataatggaccagtgtggcgttccacatactgtgtcaatgtttcaggtctctatactgcattataataggggtcaagagagttaacagaactcaagttaaaactctataagtgtattctttttgttccatgtggatctaaactgattctgacttttctttttgaaatggctggaaataaatgcattttcattttgatggctttatatctcacactgaaggctgtgttaatctgcttcagaaaaaaaaataacatagctggtgcagcaacagcaattggtgttactgtctggataagtttacagttatccactgtcatataccattatctatccatatttttatagttgctagactagtgtcataaataggaatattccagagaccacctcccccgccttctttaagaagaaaatggcttaacccaaatgatttactatagaagtattttgatattacaccaaaaatacggaaacattgtaaaaaattgtttctgacaatataaatgttaggaaaatcaataaagattaaaaaaatgaccaggcatggaggctcatgactttaattctacaactttagaaggccaaggtgggcacatcacttgagcccgggagtttgaaaccagcctgggcaatgtggcaaaactctgtctctacaaaaaacacaaaagaagttcgccaggcatggtggcatgcaccggtcatcccagctattcaggagactgaggtgggaggatcacctgagcccagggaggtggaggctgcagtgggccatgaacatgtcattgtactccaacctgggagacagagtgaaaccttgtctaaaaaaaaaaatgatgaaaaatgaataaagttgtgggtgaagcgacagttgatggctgttacatatagaacaaaaaaccagtgtgggggatctgccaactaccaaggatgtataatccagtaataccttggaagatcttggaaaacaccatctggttggtctgtggacccagtgattacaccgtgagccaaatgccagccaaaactctacttactatctggctcccatatgccttcattctattaggastatggaatcagtttggatatcaaaggatgaatttcagtatttttgttttgtttcattctgtttggagatagggtcttgctctgttccccaggctggagtgcagtggcgtgaccttggctcattgtagcctcaacctcctgggcttaagtgatcctcccaccttaacctcctaagtagctggaactgcaggcrcacaccaccacatctggctaatttttgtatttttgtggagacgaggtctcactstgttccccaggctagtctcaaactcttggtctcaaagcatcctcccaccttccccaaagtgctgggattacaggcgtcagccaccrtacctggcctaatttgagtttggattctgaatcaagcaaacctcagaagttctggatgttcctcttacctagtacatagtcacttgagtaaagagtctcaggtcctgttggaaaaggactgggaaaattacaacttcatatgttcctggtattattaggttctttccctgaaagatctgttatctactttatcagtcatcttcaattaaaagtctgagaatcaatgcaggtctagaaactgggcaaaagatagagagttgtggaggaagaagaagggtgcctggccttaacctcctgattatccattcttgattggttttggttgtataaattaatcaaaatccttggtagctgtccatctgtcttgcctataggaactccatactctatttattattctactgttttctaaattttagactccatgtttgccactcctgtcttccttctcattgcgaaatctacatctatgtttcttctgtcaatgaaatatcacctcttggtatctattatttagagattctatcgttcccatttttattcaagaatccctgttctgtaatgtgatctcctaccagctggccttcagaagacagttaccactgagcttctcaacaatactgatgtccttctccacaacacactctttatattttggtaaatggagtgtccagtggtccatcctttggattatatttatcttgcgggatttctagctttccatatatattttctcaggcatgctcaatacactgagtcctttgttcccttcttccttcatcttctgtggcagttctggaatttctacctcactcaatgtgagccataaattttccaggtaccatcctagcagctgttaacatcatctagggtatgtgccaggattttaaatcttaatatcatagtagagtgcttccatatccattagctactgtatccaaatgtatattctttcaccctttgtcagagccccttaggctacatactctgtgtactcttcctgcacctgcagatccttcagtaacttcaatgatagcccttcttctctcttagaaatcccatagcatctttgtcccagttgtgctggtatttgacattcagtatttgtctggttgtcagagggagtgatgagagtaatccctgaagaacaagaattatcctataagaaatctaccctttgtcagcctctgtatgacttcaagtgggtagaagatactatcttgtgaaaagaggaagtgaacaacttctgcaggcccagagaaaatctagaaatctagaagttcaaacttttaaattgcattgctccagatattcatgtatcattataacaactatcagggttctgatcatggaataaatcagaattctttgaaatctgctgcttttatgattagattctgagcctggtcctctgctgtccttgctctttggctgcagaatcttgtataagaggacttttggcttttgctttttgctttttgcttttaattagtgattaatcagtgtggtgtttgcttttacatagaaccattcacataaatgtattggagatctactatgtgctaaccactgctgatacatggtgacaaagacagacagggctctgattgcaaacaaaacagtattttactttttttttcttttgagacagggtctcactctgtcacccagactggagtgcagtggcacaataatggctcactgcaacctggacctcctgggatcaagcaattctcccacctcagcctctcaagtagctgggactacaggcaagcaccatgacactggctaaattttttgtattttttgtaagatgaggccttaccatgttgccgaggctggtctggaactcctgggctcaagcgatcctccttcctcagccttccaaagtgctgggattacaggcgtgagccaccatgcacagcctattttaacattttcgaagctgaagaaactcagactatttaactcaaaggctgtaacaaaagaacatcgagattgttagaaacctacttgtggaactgaaaaaaatgtgtcccattgtttcacttattttacaaaggagacctcattctwtcctggcataatctctaagggctttcttcacttaagcttcccatcaggtttaatagtgcctagtccctctttcaggtcctcaatatagcccacacatttcccttttatctaccttcatattgacaaattcacacttgtttttaggtttagctgataactttctgttgtttaatgtttgtggtcttgtaactaattgcatatccccattcactcatataatattaaagaagataattatgcctcaatattactttctctattataaaatttggcaaagatatttctgataaaagaaaaatttcatttgtaatttgaatattcttttaaacatgtttttataccatttaatagtatctaaatagtagaaatatcctattagaggtrtatgtgttttaatttcataatcattatagaaaacacctattacaaattgctaagtacagaaaacaaattatatacaaatatcttcattgcataaggataaataatgaaaatgtccaaatttaggggtattattaaattactcatggcatagccattaaaaatctgaggttaaataattttaatatcatttgaaaatgtttatgacatgaaattacatgaggaaatcctgctataaaactatacgggttatctttatgattttcttttaaaatatatacattcttgaagtacataaaaagaaaagcaattatctctaaaacaggataatataatttttacattattttaattttctcagattttctgaaattagtttgcattacttttaaaatcaggaaaatgtgttatttcaaaactttttatttaaaaaggttcttactgatatttgttcttgaagtcctaagccagtaagatctttagataaattcattgacacatgtgagctggggagaaggaaacttccacataatttaagggagtcaatgtgggaatatttgaatgacagaaaaagctagagcttatatgagattttgactaagacattatgattctaaaagaaaaagaaaaactctatgtgatataattctgtgttcagggaaaatcacactatatacttagcaatgtataagtgaaacaaattacctgctttaaattgtctaacattacttttattcatattaactacaaatgttatatttctccacagattagtccatttgtaaattgacattcaatacaatatgtggtaaagatctgcattttatttgtacagttttgagcatatttctttatcctaagagaagtcccagctgttctttgcctatatgcatatacagcagcgaactgctcatctttcatttagaacatcctctaatctttaacctttactgttatttaacgctattcaattaatatgcttagtcatacattagaaatatgttaaaacttgaattaaatgtcttggatgaaagcttataacaccacatccttttctatgaaagactttaattaattgaagtcggaaaatattaaatgactatcagcattttctatactattaaaattcttttgttttagaaattagaaagaggtatagtttgagatagtgatcacagttattaggcattggattcttactatagtccagacacaattaaatgtaaccctcaattatttatccattgtctactaatattattgkgctagtattatatgccaagaaatgtggtagattcaaatagaaataaggtggaaaagaaaattaagttggtaattataataaagtatgataagtgctataatgagaaagtactgatgataaaggcacactaagggcaccaaatctgttgaaaagattagggaagtaagagaatacatgatattaaactgagacctgaagaacaggaacaaattaggtaagctaaggggaagaggaatgctcatgttattccaggttcctggtggggcaagaggacacatttgaagagccaaaagcatcgtagcatgaaatcacaatgaaattagctaattattggcccctgaagcttttgtttctttctttcctaataaactttaagcaccatgagggctcataaagttggtgtatagtgaagtgaaaataagaactcaattgtcaaagctgatgtggtttccagcacaacattacgcctcttaaaagaaaacccatggcccagttctgaagcgcagagccaaaggatgcagggaacactttatttcaattatctactgtaccgactggactatccacagattctcrgaaaaaaagaaaaaaaacttcagtgactttgtgaaagcccaaatatgaacgtggaataaccatttaatggctaatatcatattaggcattgattttattgttattaatattgaccagaaaaaaagagtgagcatttaaaaccccagctggctcttgtgaaatcaattagctcctccttaacaaggaaatgtagaatcatgtatccctctcctaacttacctgcttttcccctaatgtttttttattttgttcctttcttactttctttcggtgttatgcattattaagctgattgattccagtctatttaacttctaaaatgttgctttattgaaaatattaattcatatatttaagtatatgtgtatctgtgtatatatttaatatcactgggataaaattaaattagtccaaataagtagatagctactcaagaattttagctgctttagaatgaacttaaaaatcttatttgggaatattatctctgaggaaaaaaagaaaaaaaatcacttagatttcagaccaactagatgaataaatctaatcttcaaagttctagaattaacctaggtctcatgaattctttttattccttgaaagttcatctgctttcactgtcttctattctcatgctaaccaacattaatcttttggaaaaaagcttaaatatagacctctgaaaaaacaaattcaagtagactggtagtttagtcatcctgtctgttaagacctggtcaagctatgatgttaatatgaacctgctttctaatgtcagtcttataaaatgagaaagctaaagagaatatagggatcattacaatgataagatcattggcaaatcaaggccttgaaattacactggtgcaatctgtgggaccactgccaggaagaccgtcaaccctgaggccagtagcaattgtgccatttgatggatcgcaagccactagaactataaataaatgctgttgttaacatgtttagaatgctttgaattccagccctgaataggaatcccaaatgtatatccatgtacattagagagttcattgtctttaaaatcatttcagcctaaatatgactgtcttattctcctccatgtcaacctcaaacttgaccactaggtgttagacctttatttaatattatcaaaaatgaagcaagaaggcacggaaagacgtatatcacatgttcccactcacatgtagaagcaaaaaaattgatctcatggaggtagtaagtagcatggtgtttaccaaaggctgagaagtatatcagagagaaggggtcaaaaagaggttggttaatgggtacaaaaatacagttagaaggaatacgttctagtgttcaatagcacagtagggtgactagagttaacaataatttatcatatatttcaaaatcactaggagagaagatttttaatgttccccacacaaaggaacaataaatgtttgaggtgacagatatcccaattaccctgattggatcattacacattgtatgcatatgtgaaaatatcatatgtacctcataaatgtgaacaactattatttattaattttttaaatggtggcaatctcaaatggtgtctttatgagatatgtatgtactttgagtgaatgaaagtcatagataatacagtaataatctgtgtaaactccaaagctaaaactgcttctgtcgaaatggttttgtaatactatattgtcaaaaatagtcaatatcaagaatataaactccttaatagttttcattaggattaaaacaggcatgctgaacaaatttttgcttcactgaacaactgagaaattccacaaaatttccattaaaatttacagaatattgaaagaaacattgtatttctcaggttaaaaattgaaaatcagatgacatttatgaactgtaaacatgctactggacactaaatcggcaatgcttacctaccaggggaaatatctgtgaactgagcattggctagttatcgaaaagaaaacaatctgtttgggctgtaatgcaaaaaaactaaaccagcaatttctttttctgaagctcagctcattacctagccttctgaggcagaaaagtagatgtaagtgaatgctatgagatttggcacaaagtgggactgtgggatgttgtgtattatgacaagaaaatctgggaatattgcagaaaacaaaatgctcttaatggtgcaataaaaaaatctataaaacaccgcaatataaaaataagctgtcttacattaactgggtgtaatgatgccaaatgtggaactctgacagcctaggtggatctcaaaaaaaataaaaaataaaaataaaaagataatccatctgaaaggtagtaattttaacttgaagcaaacacataaaccttaccgttagtgtgaagaattacaggttgatttgttatttttgagaaaaagtgttgcaacctcctttgcttgaggtaggggtgagagagagagagagagagtgtgtgtgtgtgtgtgtgtgtgtgtgtgtgtgtgtgtgtgtgtgtgtgtgtgttctataagaacaaatggtgtataatagcagacaggtaacattaaaaaattaaataaaagagagaagtgcattatctaatccagggtttcattaaaacactaaattatctgcatctgtgaacctgttagctttctctcctctatacttgatagacttttcaatccttgggtaattttcatggtggcgataaatgcaagcaaagtgcatgaaaactcagcagcaagtgctgggccaccttcggtgaaaggctcctgggccacatcactgttcacaactaaagagatgactaagtgtttacttggagtgaatgttgcagcacaggtggcagggacctttggaatttctatccctgttctggctgatttactttgatgcctgtaaggtgatagagagtactgccatgattcattagatgcatttgaacttcaaagaaagcacagtgcaactagatcaagactaggtttggtctgagcaaagaaacaccaaagagtaaagaaaaaaattaaatgggaaaataaattagtattcagataataaatatggcaggtaagttatttaattttaatgaaatggaaagagatacagtatcaaaaggaccaataataacaaaaacatagtttattaatttaaggctaaatattgattttttactctggaaaggtgaatatggctttaggtgaaacattctttcttaaaaactaactacggcgggaaatacagtcatacacatccaagtaaagtttctaaaatggcatatgtaattcctcaagtaaaaatgaaacgcaataactttagcattacaaataacttgtatcattacgaaaactttgtcattaccacctgaactaaaacatttactttcctttgtgtataatgtccctgaaagaaatacttcacttaggtgttgccataaaaagacgtcattttgaaaactggcactggacacatatgaaaatttgtctaagataattctacatatctgggctaaataaatatttgttttgcttagcagcatagctaggataaccaaattatatgatgagatcctaagcttctcctaccacccatggtataatagactaatttttaggaattgcacaaagtcttttctcaaaataattttcgttggcctatgattcatttagtgctgagaataaaaaccaaaagtatacctcccatcatagatcttacattacagcaaatattttaccttggataaaagatatattaattacaaatcaaatgtcatcatctgctttccaatatgaaggaaataaacaaggcgatatggagcatttgttgggttttcagttgtcaatttagaatgactggtcaagaaatacgtctctaagaaggctacaattaatagggggctgaaggattgggaaacaattatggatcaagtcaataaaagtgtattgcaggaagagaagaaagttcaagtccaaagactaaaatgggcaagatttttgtccttttgaacaagagcaaggaattccatgtacctagagtaaaacgagcaatggggccgggggcaggctgtttccagatgagaacagggaggtagacaatcacaggtaactggaatattttcaatacagagtaatatgatctaacttacaatttaacattcttagtataaatacagcacacaggtacacaaatttcaaaataaaatatacacttgctgatttatcacaaagtgatcatatgtgtacacatcactccaaaatagaggaagattggcagtaacacagaagattttcttatgttctctctcctctgtacaccagaggaaccattatcttgccttttattataaatactttcttgatttttcatatgaccttaacacctaagaatacattcctaaacattatatattgtgtgttgaaataaataaaataacttagtatctattcttttgtgtctaggtacatttattccatgctatgtttgtggaatttgctttttgttggctttggctttggtttgttcatcgtccttgctctgtaggattacagagatggagagaatcaaagcaaagctgtggtccttgtgagagtgcctgattctgattttcttttattgctaaagcactgccatttggggtcccaacccaagaccagggacatttgccaagccccatactttggtagaccctggactcagtcccatgagtctgacaaaagcactgtacacttgatcaaccaaccctcctgaaatgagtgaaaacccataaggcaagagtagcccacctctccagatctccatctttagccagatggtaacaccatttttttactctcttattagtcttctaagctttcaaatgtgtgtgtatgtgtgtgtgtgtacacacctattcatgtatatatacacaaagatgcatctggagatgtatatgtatacagcagcacaagttgtccacattggtaggattggcccaaattaccaagttcttattacaataagtaacattccctaatctatctttttaaaagattactgactgctcttatgaggattaatttaaacagtaagatttgaagatggaatgcaaattagatcagtattgctgttgtctctgcagtacatgaagatgtcttgactgggtatggtatttgtgaaaatagaatggtttttcttctaagtagaaatctcatgacttgccaattgttagggtgtgtaggatatagaaaatagaaaagatagagacaccaatgcccaagaaaagttgcactgtggatcaactattctatcccactgttactatgtagcctagtcaaatgagattttcttctttggtgttattgtttaacattttaatttaaaaatatatcccaagattttaggctttggaaatatatttataagatgatgcatgttttaaaacccataaaatatcaaatactgcaaacagataaacttcagaaaaagtgtaatcttttatttttaaaaccatggctattaaaatcctgtcaaatatatacaaatatattacaggctgtgtgtgccatatgaaacagtgatgtttaatagtgtaggaaagctaaaatccaatccagttagaggatttcctcaagaaaacccatctggctcaaaacaaatgtcatctttgactgataaaccaatgtctaatgaatttctatgctgagtgagtcattgaattcaacagccatttgctctagttgaaatgaggtaccttaaagttcattgttgatgacagaaataagactattcaaaaccaggaaatggaaaaagagtacagccatataggagacatttttgtgaacgatacacttgttaaaactggattcttcatgtccttaagtaaatcaatatgcttaatattaagatcaaaagtggcatgtctttaaaaaaccaacaaaaagatctaatgtagagagraaatataaaactaagagaatatttaaatttgactgcaggtattcagagatttataagaatacataactccattaaatggctttataatgattaattactaataaaaataagcagtcattttcacacagggcttttaaatgtagagtaagtgatacactgggtgattttaacaatatcattgtatgtatcaatgtatgagtcatatcattaaccatttaagaaaagtctggttgttccagttgcacagttgattagtacacggtatttatgatgcyaaggctgtaagttcatgcctcacctagagcactccctacaaaaacaaagtcagattgatgagggaaaaaaatgaaataggaaaaatgaggtgcactttgctattgtatgttaacatttaaaatcatagtgacatctaaaataggaaacattcctcgagtcaatttttaaagaaactctttatgtaacgtaggatttgaaaatattggtggactttggaaactacacgggagctcttttatagtattttatactattttttggtagatatctttcagaaatcattaaagtatgataacatattcttccgtgtatgtctggaagtagttgctatacaaatatagtggccatatatcccgtgttatagaggatcatgccattttaaaatatttttatatggtgctacatacaaggtttttgcttttttgtattttttttgtgttttgctttactttaaaggtttttttttgctgaataactttcagagaaataataccttgattaatatagctcactggctagtgcttctcagaaatgaggagtgaagggcacgccttacagggatgtgtaacaaagtgggagggaagcggcaggtgtgaaagcattcctcatgagttgatgcactgtggcttctttccctttcttccaaaacctcttcccctcataccctttccttttcattcagtcaaatgatgtgattcarttttttattaagaaaatgttatcactatgggtatacattgtgggtgaggggcggctaaaacacagaaacaggttttcaactgttaactattgttcttgttggtctgcatgaagcatctttgtagtgtyaagttaatttagctttctgtattgcaacaaaactgccttttcttcaaaacctctcactaatatattctgtaatttatctatccattcatttgatattgagtctttaaaatttatcaaaagctgttctagaagattgtgatacattggggaagggattcttgttacagaaatgtaattctacatattaaacaggcttttctatctaggcatttttatgtttacttttcctctgaaaactatacattatagacaacctgaaatgattatgaaatgcctctttttctatctgcttctacttacctttcctccaatactctccttctactgccatgcctcactataatttgatagatttggaatagagttatgaggattggttactattatataaaataacattaaagtattggaacaaatttacactcccaccaacagtgtaaaggcaktcctatttctcgacatcctcttcagcatctgttgttttctgactttttaatgacaccattctaactggtatgagatggtatctcattgtggtttttgagttgcatttctctaatgaccagtgatgatgagctttttttcatatgtttgctggttgcataaatgtcttcttttgagaattgtctgttcatatccttcacccactttttgatggagttgtctgtttctttcttgtaaatttgtttaagttctttgtagattctggatattagccctttgtcagatggatagattgcaaaagttttctgccattctgtaggttgcctgtttactctgatggtagtttcttttgctgtgcagaagctctttagtttaattagatcccatttgttaattttggcttttgttgccattgcttttggtgttttagtcatgcagtctttgcccatgcctatgccctgagtggtattgcctgggttttatggctttaggtcttacatataatgctttaatccatcttgagttagtttttgtataatgtgtaaagaaggggtccagtttcagttttctgcgtatggttagccagttttcccaacatcatatattaaataggaaatcctttccccattgcttgtttttgtcaggtttgtcaaasatcagatggttatagatatgtggtgttatttctgaggcctctgttctgttccattggtctatatatctgttttggtaccagtaccatgctgttttggttaatgtagccttgtagtatagtttgaagtcaggtagcgtgatgcctccagctttgttctttttgctaaggactgtcttggctatacaggctcttttttggttctatatgaaatttgaagtagttttttctaattatgtgaagaaagtcaatggtagcttggtgggaatcacattgaatccataaattactttgggcagtatggccattttcacaatattgattcttcctatccatgagcatggaatgtttttccatttgtttgtattctttcttctttccttgagcagttgtttgcagttctccttgaagagttccttcaaatcccttgtaagttgtattcctaggtattttattccctttgtagcaattgtgaatgggagttaactcatgatttggctctctgtttgtctattattggtgtataggaaagcttgtgatttttgcacattgattttgtatcctgagactttgctgaagttgtttttcagcttaaggagatttggggctgagatgatggggttttctaaataaacaatcatgtcgtctgcagccagagacaatttgatttcctctcttcctatctgaataccctttatttcttcctcttgcctgattgccctggccagagcttccaatactatgttgactaggagtggtgagagagggcatccttgtcttgcaccagttttcaaagagaatgcttccagattttgcccattcagtatgatattggctgtgggtttatcataaacagctcttattattttgagatacgtttcatcaatatctactttattgagtgtctttagcatgaagtggagttgaattttattgaaggccttttctgcatctattgagataatcatgtggtttttgtcattggttctgtttatgtgatggtttacgtttattgatttgtgtatgttgaaccagccttgcatcccagggatgcaactgacttgactgtggtgaatacgctttttgaagtgctgctggatttggtttgccagtattttactgagaattttggcatccatattcatcagagatactggcctgaaattttcctttttgttgtgtctctgccaggttttggtatcaggatgatgatggcctcacaaaatgagctagggaggagtccctcttttgctattgttaggaatagcttcagaaggaatggtaccagatctctttgtacctctggtagaattcagctgtgaatctgtctggtcctgggctttttttggtttgtaggttattaattactgcctcaatttcagaacttgttattgatctattcagggattcgacttcttcctggtttagtcttgggagggtgtatgtgtccaggaatttatccatttcttctagtttttctagtttatttgcgtagatgtgtttatagtattttccgatggtagtttgtatttctgtgggatcagtaatgatatcccctttatcattttctattgtgtctatttgattcttctctcttttcttctttattagcctggctagtggtctatcttgttaatctttaaaaaaaaaaaaaaaaaaaaaacagtccctggattcactgatttttttaaaggttttttgtgtctctatctccttcagttctgctctgatcttagttacttcttgtcttctgctagcttttgaatttgtttgctcttgcttctgtagttcttttaattgtgaagttagggtgtccattttagatttttcctgctttctcatgtttggcaattcctcagggatctagagccagaaatacaatttgacccagcaatcccattagtggctatatacccaaaggattataaatcgttctactataaagacagatgcacacatatgtttattgcagcactattcacaatagcaaagatttggaaccaacccaaatgcccatcaatgatagattggataaagataatgtggcacaaatataccatggaatactatgcagccataaaaaagaatgagtttggctgggcatgktggctcacgcctgtaataccagcactttgggaggctgagrtgggtgggccacaaggtcaggagattgagaccatcctggccaacatggtgaaaccccgtctctattaaaaatacaaaaattagctgggcatggtggcacacacctgtagtcccagctactcaggagtctgaggcaggataattgcttgaacctgggaggtggaggttgcagtgtgccgagattgtgcctctgcactcaagcctggtgacagagattcttgtctgaaaaaaaaaaaaaaaatgagttcatgacctttgcagggacatgaatgaagctggaaaccatcattctcagtaaactaacacaggaatagaaaaccaaacactgcatgttctcactcataagtaggagttgaacaataagaacatatggtcacagggaggggaatatcacacacactggggcctgtctgggttggggggctagggtagggatagcatcagaagaaatacttaatgtagatgatgggttaatgggtgcagcaaaccaccatggcacatgtatacctacgtagcaaacctgcatgttctgcacatgtatccgagaacttagaacataataataataattttttaaaaagtcttggaaccaggtggatggaggtttgaaggttggcatatttatttactggaaagcaagagtatgctcaaaattttgagatagttgtattgaaaataaactatcacagaaaacctatctattaaaaaaaaaataggtgagtctccaggatccatagctccaagctcaggcaggaaacagatataaggaaagatttaaagtacaaaggactttgaatagactcttgttaaacaaatgcagattttaggctttggagaattataattcaaacacacttttggcccccgaagctcctttaagaactaaaggaaacaatgtttattcttccataattataaataaagaaatctaacatagaaagctctgattgaataaacatttatttgagattgaatttctgtcaaaatggttatcagacaatgatggttacatattgctaactaaaagcaaacatgttaccaaataggccattttgtatgayttcctttctataaagtaaaattgcatattttgtatacatatattattctcatattcagtagatatcgatagagaacctactatgtgccagaaaccagtctacatgctggggaaacagtgatgaggtgagagaagtaagagcctttcataaagctgcttctaggggaaggaaaaatacaacaaaggaagaagtttgatacctgttgatggatgcccttcctcaattgttggttcatctccatttggaaaaatttcgggaacctttctaatttagactgcattaggtcactctttctgcttagcctcttttgaactccaacaagactctccaaaacccaggctaaatcctatgtagtctgtattttaaatggtcacttatctgattatctcattaaactagtgagtcacttgaaaggcagttctagtctcattcaaaactatatccccagggccatcccatataatatattcaataatctttgagtggtcagataataggttgcaacaaaatgtattaactgtttttgaggaagttctataaaaagaaaagaaagctaaagtctatatttggttaattacaataaactgatgtcaggacaatgaaacaagtatttttattagccctataaactttagctgaataaacttgcacttcctccgaatgtttctctcaccttatactgtttgcaatattccaacagttctgacttctcaatttattcatttggccaagtatggtaatctttatatcatagtggctatcactgggccaatgcagggtctccatgcttggtgaagttagggatagtggatagtcatctttgactctctaaggaatgcttcagaatgtgatagaatatggcccctctccaaagatgactgcatcctaatcttcagaatctatgaatacattatgttacatagtaagggagaattgaggttgcagatggataaggtggctaaccaaaagattatcctggaatatctgggtgggcccaatataatcctaagggtctttataagtggaagacactcagaaggaggaccagacagatgacagggtgacactgagccaaacattgctgcctttgaagggggccatgagccatgcaatacagatggttactagaagctggaaaaggcaaaggaatggattattccattgagcctccagaaagaaatggagcttgccaacactttgattttagccgagagagacctcttgttgacttttgaactccagaacaaaaagataagaaatctgtgttgctttaagccactaaattagtagcaatttatttcagcaatagaaagcaaacaaaaatgaggagggcaagaaaatcagactgtacaaagtcagagaggaaggttgtaaaagactcagcaagaagaacataaggactttgaaatgtattccaagtgcagcaggaagccattggagggtttcaaactggagagtttttaaaagtaaactccatctagcctgtgaaggatggattataggcatgcctagaggatatcacctagaaaaagaatgcggatagaaaagagaaggcagccaaggaagagatgaggcacagacacagaaaaattaccggaagggcaaaccatatgttaccattagttatttttggtgatgacatgacagatgatttatgtgttttttatttatttctttctgtcttacaagtttctttattgagtacattttacattgtggttttttttaaataacaataaatggcataacatatggagaataaatcagacacaggtatgttagttcctattttgtaaagaaagaagacaaagaataacccagcaatgcaatagaaaacagaagtcattggaagatcttagttgcatttgtttaccttcatctaggcaggtacaaatagaagctgggcactgggatatttttatcatgcacctgcaaattcaggtaaactgttcttcttgacatgatttctgcagagctttcctgcttttatgtgagtgaatttataaaagaaactttattcccaaattattcaataattgaaattttgttaacataatgcatgtattaaactgaccatgttcatatttaacaaatagcaatatctgtaagtaaaatataaagaatataatttttatacatgtactcaaaggatatgtcaatatgtatccagtgaatctttcttttccctctttctctctctcatcctaagaatgatttacaggcagtaattttagtttcctcagtctctgaattggccatccagagaagcccagaatactgaatgactcatttatgacctggcattttgcatcatgtagaaatggccaatatgaaacaggtagtggtcaaacctctgtttatttgtcttgttctttctttaataaagagtagccactgtcaaagccagcacctctgaaaaactgatttcaaaaacagaagcctctcatttcatggcttcaaatcagacagcagcaggtacacagaggcactctgtaagtgcagataggttaaatggttttcttggggtagcagcacaattcatccataagtaagaccaccccaggatctgaattagaatgagccatttaataaaatgtggtctcacctgctggtttaaggattgatactcccaaagacggaatggtatagatttctataaaaattagtttcctatttgggggctcaaaaacactgctaaaatatgccttttattttgtgacaattgataaagaaacaaataaccaggtttgaattgtagtcaatycgagatgtgaatatgagcagatacagttcagctgacacagaatgggagtattgctgtgacacttttcacagcttgaatacacataaaatactgtgagaaaggcagcctcaccttgttccacattctgagtcagtgctgaccatgcagcgccattttgcaagagaagaccccgtaggaaggagaaaagatgacataaataatcatgtcatatccaccatagatgaaaacgcgtaaatgagaaaagttcttacagaaagggacacttgaatttaaaccttaaaatttgtattttcccaaaagacattcacaattatttctttaaacccaaaaataaaatcacttttcatgaacagagcaaataaattgttgtattttctgctgctttccataccagtgctaaaaataacattcacactttaaaaggaagcatgtgtccttcagatattgtgccttttttgtgaaaaaaaaattgaaaaggaggtaaacagtagaagctactaacagcttccagaagttaccccatctgaaactcctgatattacctcctgcttctctatgccaatgtttgccttgttgtctaaaatgacaactagagctgatgattaaagaagcaaaatgttcagggcaacaagatctttgccgcatagggttcatgatatctcactcataatggtggtattttctgctttcattgaataattctgttggatgcattcctggtattcactgtaaaaatctataaaaattttctgagaataaaattttaaatttgggacttttgtctgggtcctgtaaaagtgattacattgaaaaattttcccatcaaaacaaaaatgtcagaaagagttcaagcttctattagagatcaggtcctcagaacctcaaaaactgtagattccctataataaagataggagaattcactgatttctgaacgaaaccaattttgggattaccaaggaaagagccaaaatctgagaagatattttagacctcattttacttcaagcagtgcagtctcatggctacttaaagcataaataaaattctttcctatatctgggtcaaaaatgaagaaatcccttgaatttgcaagaaaggaagttgcttaatatttcatctccctatacttaactttgaatagcatctgcctgtttttagatagcatgatactttgccaattcctccctaatactttaatggtagcaccatggatctgctgttcatggccattgtacttggccttacttacgtcatagctcatccaagtatctatcagtctaacattctcttttttttttttttttttttttgagacggagttttgcttttgttgcataggctggagtgcagtagcatgacctcggctcactgcaacctctgcctcttgggatcaagtgattctcctgcctcagcctcccaagtagctgggattacaggcgtgtgccaccacacctggctaatttttgtatttttagtagagatggggtttcaccaggttggccaggcttgtctcgaactcctgagctcaggtgatacacccacctcaacctcccaagtgctgggactacaggcgtgtgccaccatgcctggccaacattctctacttaagtccgtaatagcaggccattcctctacctaactctcagaatatatggtgcctgttgctacctgtggtaaactatattattgtccacagagatgttttcttgacaggagacagttatctttgcttgtatgacctgttgacattcatcatggcatgagactcttcacctaatagcatgtgaagagtagttagtgtctcctctgggaagaagctttaagagctaacatgtggttggtatgtcatttccttccacatcacaaccaccaacaataatcaggtagagggtaccgaggcagcctgagtctgagggaaggaaagatgaagccaattgacaactcagctttgatggacgtgagcatcagtgaaaaataaaactccatggttgtaaaccacaaacacattggggttctttgtgtgcaggataacctagctttttgtgagtggtattgtatctctctctctcataatttataggctttcaggctatatgtgaagtctacactagataagcaaattggaaaaaaaacaaataaaaatttcaatcagtcattctctggaattcaattatatgtctttcatcaagagggataagaaatgttatttttactcttttattttccagatctctttctaggtcttaaatccattgaaactctgaagttgcttggaatgaggcacacagcttttcctccagagcctggttgggctttgaggtcaggttcctgcagtttgtctgtgaacayagacaagaagttggttgcaaccctttaaactggtggttgcatgttgcccatgttgtatgacaaatctgtagacttgctacatatattttgggttggaatatagcatttgattttgcctacatcttgagtgtcaagtaatgagtttgtagttcaggttaaccacctgaagtaacaagcatgaaaggcagaaatatgctactgttttttcctcttactaatgatgatatttgatttgcaaagttccgtttgcctttaycaaggtgtttgtttagaataggctaaggacatgtttctcaaaccacatttacccccatagaattgctttcattagggttttgtgttttttttttttttttggtccatgtctgatttatgtttgccttatttattttaaaacaatagtgataagtaaagaaagggacttttaaaaaatgaaaccaagatggttattttttaatagtattattcttctttattatggcatagtgctatgaattaggtagaaatttataacacattattctttcaaatcactgatgacaaaaatatgtactgatttaatgtgtgttattagacaatatacatcatcttctaaatagaatgtgtaaatgttatgcttattttttaaacaagattttagtgtagtgtataacatgaatgtatactcagcaaatatgttattattgttcagaaactgccaatattatatttgtgaaatgtctttaaatatatttgctttaggttttaagcattttacttttattgataaattttcactgtatttctctaattagagtcaaggatcactctatttgtctcattactaatgttgcccttttcacaccctggagaaatatttaaaattaggtggtttttttcaagcacgagtcaccaatgcaacatttcaaaataaatttccaagatatgtacactaaatattgagtttaatattaagtcgatcaattgccttcaaatctatagtcatttttaaagcctcattctataataaacaatatgtcttgggaaaattaggagaaatctgttcttacattctgaaaaagtatgccaaagaacagcatgctacaaacagtattccaaaactctgtcgttgtcacatcattctgtattgctgtatgtgctaaaggctaagttttggctgaggcccagtccatgtggatgctatcacaagccttccactcaagagcaacagtgcatatgggtgtgggctgttctttctgatagcagaaccagactgacccaccacaacacgtcaaggaacctcctgtttggatgcgtctgtctgtggggaggtttccagctggtctatttgctatacatttggatgctttcatgtaaacaatgaaaacattgagggaattgcccatggagtctgactaacaatcaaaggctgacttgagctactctacaaggacaaaatgatgaaggcaaagagtaggaataaggggtgtaaggtggatggccaaggggaaaacaaagaaaatcaggaaaaactttgcaagggaggaaaaggagagagtaatgaatgattaaaagtgaaagaagcactttattcctgggactcttaagttggccagaagtaaatgacagcaattgtcaattaggcataactactagaaatatatctttgcaatcaatacctgagtgagttctttttaaattgaggaatttgaattcagtatatgaaatataacacagaaatgacactaaaatttatttaaaaataaacactgtgatccttctctcccaggttgcagcagtatagagctatatcagtaaaaaaaaaaaaaaaactcagggtagtttgtttctttttttttttttttcttttaacaaaaaaaaaaaattaaaaaaaaaaaaacagattatcaagaattctagaaaccctgaaattctgcctgatcagttcaggtagttcaaagtataatttcttatatacaagaaaacatggtctttctggctccaataagatactacttgccattgcttctagttctaattttaacaatataagaaccataagcatctcaagaagctatttgcagagaaaacttgcactattcctgaagcatcatagccttggctggttctgtcattcctctccattatatggtccagtgtattccaacaggactaatgtggaaatgaggcagtatcaagggaataattatgtttaaaaatctcaccttttagataaacttcacaatgacttctgtgagggcaggctgtccttctattaattaaaattgttaaaatgtcttagatctaaacatgttcatgaaatattaaatggtaattggacaccaacttctggaaagctccatttcaggacccatgtgttcagagatacttttctattttccatcttcatgactcctcacctagtttaagaacatgcttaactttaaagctttgattgaagtctatcagttgtctgtgtattcctgttgagggtctaatatcacattaaccacagatactactcttgtatttatagtgacacagtttcattatcagtcatgtagaccrtgcggtagaaataagtaaaagacaactataggaaaataagttcatattaattcaacaaatcttcattgtgcatttaccaaatgccaaccatgataaaaatcatttagaacaacttagaaattcctagaaattttctattaaaaattctagatataagaaaaagtagcatcacaaacccgatttcattgagataaagctaatcttaacagaagagatacactgaaatgtagaacccgagaacccattaaaatgttttaaaaggacagatggtagagggatcaataaaatcttaaaccctctagtttcaatttttaaaatcagatatattcaacatgctcaaaacctaaattttattctgttatgttggaattctagagtctttagggtctgattaataattctgtaataataagttcacaaatctgcttttctaatggacaaaaatactgtagtttacatcacagtcacagaattttaatgctgaaagaaatggtagagatcacatgggcctgcttttcccccacccccacatacaccaaaaataacacgttttgttgtaaaagttaatatgtgtatatatatcaccttatataggaagatgtgaccaataggaaaggtaatgtaagtggcgaatgtgttggttgcaggtgaaaaaatgtcatattgttcatgcctttttgtccattgaaacatttttctaaaaccatcttaggttgttggcacatattttataattctaataataaccaaaatatgttaagttataatatgcttatgtatttataactacagttattgaaacacagtctggaatctcagaaattatccagacatttaatgttccataaacttaggaaagtttcctatccagaaagacttgaaaaacatgtattttatagcatatttaaaggactgcaaaaatgagaatttagggcaaagaaaagtactgagtataagtaacaaagtcagatataagttcacaagcaaacttttccattatgtgactatttacccaattcctaattcagacatatttcccattttaaaatagcaatagttaaccataagagattctaacatccaattccaaatcttgatttatcttacatcctttagagcagactttagtacccaagtaatacattctctgtattctttcactattcaaagtttagatgccaaaaaattgatatcgtcaccatgctaacatgtgaagctatatggcgtgtcttcagttataaatactctgcccttccaaagtattatgccctctcagtgaggcacatttttcagacagataggaagtgaaatgacatagccctgggcaaggctgactcacaggtgttgtgtgaaatctataagatagatttcatgtagggcttccctaaaatttctttatggttacagacagccgctggttgaggagaatgcttggttgtacactggcattaattataaataatgatttctgacattgcaaactttgtgagtcaataggcaaggagatctccagcctttaatttctgtcaccttctaaagggagttagaaaacaactacaacaaaaacctatactgatctattgatgcatacaatttctagtaatagagaaaaggtagatccaaacacagggttttctttgtatttttttaagcacaaagaagatgtgatatttaagtatttgaacctactccaaaaatgctgactgccattagggattttaaggccaaggatttctcaaatatgctaaatatggatttgtctcataactgtgttctttgtttctctaaatcatttatataacatcttcctacatacatagatgtaccttccaaaaatatatttcataattgttttcaaatataaaaagcatttcatatctatcctttggcacatattagtgtccaattaatatacaatgtgaattatcaggtgcagtttagtacaaccttcagtgagcccagcccaactgatacttcatccatgaagtagtctgtgagactttcagctgaaaataatattttattggcttttgctaaatcagtgtatatttaattttaggcttttttgtcttcactcagacttctgcacttgtaatgccttgagaaagatgaacaggatgagcagctgaaacaccagtgaaaagggcatttctgtatgagacatttacttactacatcctcccacctctttgctccaatagtaatttgtagcccctctattagagcagtaattgtggcagactcaatcagtgacttgcctctgcacaagctagtaagttgcacgtctttttcaactttgtagcacccacctaatggcagtatattttaggagccctgctagggcagagtatacctatatggtcaaatcaatgagatgcatatattaggaaataggagtaaatcatgttatttttgattcaatgtaaagaaataatggtctctaaggatgcagagtgagaaaatatcactcactaagtaaggtttagcagtataattttccaatacatttctttttttattatttttttatttttttattatyatactttaagttttagggtacatgtgcacattgtgcaggttagttacatacatatacatgtgccatgctggtgtgcttcacccactaactcgtcatctagcattaggtatatctcccaatgctatccctccsccctcccmccaccccaaaacagtccccagagtgtgatgttccccttcctgtgtccatgcaatctcattgttcaattcccacctatgagtgagattatgcagtgtttggttttttgttcttgtgatagtttactgagaatgatggtttccaatttcatccatgtccctacaaaggacatgaactcatcattttttatggctgcatagtattccatgatgtatatgtgccacattttcttaatccagtctatcattgttggacatttgggttggttccaagtctttgctattgtgaataatgccgcaataaacatacgtgtgcatgtgtctttatagcagcatgatttatagtcctttgggtatatacccagtaataggatggctgggtcaaatggtatttctagttctagatccctgaggaatcaccacactgacttccacagtggttgaactagtttacagtcccaccaacagtgtaaaagtgttcctatttctccacatcctctccagcacctgttgtttcctgactttttaatgattgccattctaactggtgtgagatggtatctcattgtggttttgatttgcatttctctgatggccagtgatggtgagcattttttcatgtgttttttggctgcataagtgtcttcttttgagaagtgtctgttcatgtccttcgcccactttttgatgaggttgtttttttcttgtaaatttgtttgagttcattgtagattctggatattagccctttgtcagatgagcaggttgcaaaaattttctcccattttgtaggttgcctgttcactctgatggtagtttcttttgctgtgcagaagctctttaatttaattagaccccatttgtcaattttgtcttttgttgccattgcttttggtgttttagacatgaagtccttgcccatgcctatgtcctgaatggtaatgcctaggttttcttctatggtttttatggttttaggtctaacgtttaagtctttaatccatcttgaattgatttttgtataaggtgtaaggaagggatccagtttcagctttctgcatatggctagccagttttcccagcaccatttattaaatagggaatcctttccccattgcttgtttttgtcaggtttgtcaaacatcagatagttgtagatatgcagcgttatttctcagggctctgttctgttccattgatctatatctctgttttggtaccagtaccatgctgttttggttactgtagccttgtagtatagtttgaagccaggtagtgtgatgcctccagctttgttcttttggcttaggattgacttggcgatgcgggctcttttttggttccatatgaactttaaagtagttttttccaattctgtgaagaaaggcattggtagcttgatggggatggcattgaatctgtaaattaccttgggcagtatggccattttcacaatattgattcttcctacccatgagcatggaatgttcttccatttgtgtgtatcctcttttagttccttgagcagtggtttgtagttctccttgaagaggtccttcacatcccttgtaagttggattcctaggtattttattctctttraagcaattgtgaatgggagttcactcatgatttggctctctgtttgtctgtggttggtgtataggaatgcttgtgatttttgcacattgattttgtatgctgagactttgctgaagttkcttatcagcttaaggagatwttgggctgagacaatgggtttttctagatatataatcatgtcatctgcaaacagggacaatttaacttcctcttttcctaattgaataccccttatttccttctcctgactaattgccctggccagaacttccaacactatgttgaataggagtggtgagagagggcatccctgtcttgtgccagttttcaaagggaatgcttccagtttttgcccattcagtatgatattggctgtgggtctgtcatagatagctcttattattttgaaatatgtcccatcaatacctaatttattgagcgtttttagcatgaaaggttgttgaattttgtcaaaggccttttctgcatctattgagataatcatgtggtttttgtctttggctctgtttatatgctggattacatttattggtttgcgtatattgaacctgccttgcatcycagggatgaagcccacttgatcatggtggataagctttttgatgtgctgctggattcggtttgccagtattttattgaggatttttgcatcaatgttcatcaaggatattggtctaaaattctcttttttggttgtgtctctgcccggctttggtatcagaatgatgctggcctcatcaaatgagtgagggaggattccctctttttctattgattggaatagtttcagaaggaatggtaccagttcctccttgtacctctggtagaattcggctgtgaatccatctggtcctggactctttttggttggtaagctattgattattgccacaatttcagatcctgttattggtctattcagagattcaacttcttcctggtttagtcttgggagagtgtatgtgtcaaggaatttatccatttcttctagattttctagtttatttgcatagaggtgtttgtagtattctctgatggtagtttgtatttctgtgggatcggtggtgatatcccctttatcattttttattgcgtctatttgattcttctctctttttttctttattagtcttgctagcggtctatcaattttgttgatcctttcaaaaaaccagctcctggattcattaattttttgaagggttttttgtgtctctatttccttcagttctgctctgattttagttatttcttgccttctgctagcttttgaatgtgtttgctcttgcttttctagttcttttaattgtgatgttaggctgtcaattttggatctttcctgctttctcttgtgggcatttagtgctataaatttccctctacacactgctttgaatgcgtcccagagattctggtatgttgtgtctttgttctcgttggtttcaaagaacatctttatttctgccttcatttcgttatgtacccaacagtcattcaggagcaggttgtttagtttccatgtagttgagcggttttgagtgagattcttaatcctgagttctagtttgattgcactgtggtctgagagatagtttgttataatttctgttcttttacattagctgaggagagctttacttccaagtatgtggtcaattttggaataggtgtggtgtggtgctgaaaaaaatgtatattctgttgatttggggtggagacttctgtagatgtctattaggtccgcttggtgcagagctgagttcaattcctgggtatccttgttgactttctgtctcattgatctgtctaatgttgacagtggggtgttaaagtctcccattattaatgtgtgggagtctaagtctctttgtaggtcactcaggactcgctttatgaatctgggtgctcctgtattgggtgcatatatatttaggatagttagctcttcttgttgaattgatccctttaccattatgtaatggtcttttttgtctcttttgatctttgttggtttaaagtctgttttatcagagactaggattgcaacccctgcctgtttttgttctccatttgcttggtagatcttcctccatccttttattttgagcctatgtgtgtctctgcacgtgagatgggtttcctgaatacagcacactgatgggtcttgactctttatccaatttgccagtctgtgtcttttaattggagcatttagtccatttacatttaaagttaatagtgttatgtgtgaatttgatgctgtcattatgatgttagctggtgattttgctcgttagttgatgcagtttcttcctagtctcgatggtctttctattttggcatgattttgcagtggctggtactggttgttcctttccatgtttagcccttccttcaggagctcttttagggcaggcctggtggtgacaaaatctctcagcatttgcttgtctgtaaagtattttatttctccttcacttatgaagcttagtttggctggatatgaaattctgggttgaaaattcttttctttaagaatgttgaatattggcccccagtctcttctggcttgtagggtttctgccgagagatccgctgttagtctgatgggcttccctttgaggggaacccgacctttctctctggctgcccttaacattttttccttcatttcaactttggtgaatctgacaattatgtgtcttggagttgctcttctcgaggagtatctttgtggcgttctctgtatttcctgaatctgaacgttggcctgccttgctagattggggaaattctcctggataacatcctgcagagtgttttccaactcggttccattctccccatcactttcaggtacaccaatcagacgtagatttggtcttttcacatagtcccatatttcttggaggctttgctcgtttctttttattcttttctctctaaactttccttctcgcttcatttcattcatttcatcttccattgctgataccctttcttccagttgatcgcatcagctcctgaggcttctgcattcctcacgtagttctcgagccttggttttcagctccatcagctcctttaagcacttctctgtattggttattctagttatacattcttctaaatttttttcaaagttttcaacttctttgcctttggtttgaatgtcctcccatagctcagagtaatttgatcgwctgaagccttcttctctcagcttgtcaaagtcattctccgtccagctttgttccgttactggtgaggagctgcgttcctttggaggaggagagtcgctctgatttttagagtttccagtttttctgttctgtttttttccccatctttgtggttttatctacttttggtctttgatgatggtgatgtacagaygggtttttgttgtggatgtcctttctgtttgttagttttccttctracagacaggaccctcagctgcaggtctgttggagtaccctgcagtgtgaggtgtcagtgtgcccctgctggagggtgcctcccagttaggctgctcgggggtcaggggtgagggacccacttgaggaggcagtctgcctttgaggtcgggttaccctcaaagggaagcccatcagactaacagcggatctctcagcagaaaccctacaagccagaagagagtgggggccaatattcaacattcttaaagaaaagaattttcaacccagaatttcatctccagctgcgtactgggagaaccactgctctctccaaagctgtcagacagggacatttaagtctgcagaggttactgctgtctttttgtttgtctgtgccctgcccccagaggtggagcctacagaggcaggcaggcctccttgagctgtggtgggctccacccagttggagcttcccagttgctttgtttacctaatcaagcctgggcaatggtgggcgcccctccccccgcctggctgccgccttgcagtttgatctcagactgctgtgctagcaatcagcgagactccgtgggggtaggaccctccgagccacgtgcgggatataatctcgtggtgcgccattttttaagcccatcggaaaagcgcagtattcgggtgggagtgacccgattttccaggtgccgtccatcacccctttctttgattaggaaagggaactccctgaccccttgcgcttcctgagtgaggcaatgcctcgccctgcttcggctcgctcacggtgcgtgcacccactgacctgcgcccactgtctggcactccctagtgagatgaaccccgtatctcagatggaaatgcagaaatcccccgtcttctgcgttgctcaggctgggagctgtagacctgagctgttcctattcggccgtcttggctcctcctttccaattcatttcttaaaataataaacattttacccactgttaattgggttatttattttcttcctattgagttgtttgtgttccttatattattattctcattattattattttgcttattaactccctatcagatgtataatttgcaggtattttcttccattgtgtaggctgtcctttccctctgttatttcatttcccatgcagaacatttttagtttgatgcaatcccatttgtctactttttgttgactgtgctttgggggtcatatccccaaaaatcattgccagaccaatgtcatgaacattttccccatgttttattctagtagtcgtatagttttaggtcttgtgtttaagtgtttagtccatttgagttggtttttgaacatggtatgagatagggatcaagtttcattcctctgcacgtggatatccgggtttcccaataccatgtattaaagatactgtcctttccccattgtgtgtttttggcatctttgcctaaaatcaattgaccataaatatatgggtttatttctagtttttctatcccattccattggtctgtatgcctgtttttatgccagtgctatgctatttttgatagcaattgcttcataatattttttaactcagggcatgtgatgccccagttttgttctttttactcaagattgatgtggttattcagggtcttttgtgggtccatgagaatttaaagagtgttttttctgtttccaaaatggcattgggattttyataggaattgcactgaatctgtagacatttctgaaaagaagacatacaaatgaccaacaaattcacaaagaacattctcagcattacctatcattagggaaatgcaaattaagaccactgtgagatacctcatgtctgttaaaatggtgtttataaaaaagatgaaagataacaaaggttagtgtggatgtggagaaaacggaacccatgtatactgttggtgggaaatgaaaattagtgcagcctttatggaaaaatggtatagagattcctcaaaaaaataaaaatagaactactatatgatccagcaatcytacctcgggtatatatccaaagaaattgaaaactgaaatcaatatgtcaaaaggatatctgcatcctcatgttcattgtagcactatacacagtggttaagatatggaatcagcctaaatgttcaacagatgaatggataaagaaaatgttgtaaatgtatacaataaaatactattcagccttaaagagggaaaygctgacattagtaacaacatgaatgaagctggaagacattatgataagtgaaataagccagacaaagaaagacaaatactgcattatttcacatgtatgtggaatctaaaaaagttgaactcttgccaggcacagtgattcacgcctgtaatcccagcactttgggaggccaaggtgggtggatggcttgtggccaggcgttcgagaccagcctggccaatatggcaaagactgtctctacaaaaaaagaaaaaaaaattacctgggcatggtggcatgcacctgtaattccagctacttgggaggctgaggtgcaagaatcgcttgaacctgggaggtggaggttgcagtgagccgagatcacatcactgcactctagcccaggcaacagagtgagactctgtctcaaaaaaaaataaaataaactaagaaaatttaaaagttgaactcatggaagtataggaaaggaataacgagttgttggtcaaagggtataaaatttcaattagatattttttagaaatgaattttgagatctattgcacagtagagtgactatagtcaataataatatatcttatattttaaaataagcaaatttcaaacatctcaccacaaaaaagatatgttaactagcttgatttaatcattccacattgtagacatatgtcaaatcatcacattgtacccatatatacgtatacaattataatttttctttaaaaagaatattaaaagatgtaaaattataaagcaataataataattttaaaaatataaatgttttcttcctttatctgtaaattaaaggtcatgatagtatctacatcatgtggttattgtgttaagtgagataatccatataaaatatcttagcaaagtagctcacatatttgctaaatatcaataactactatttttataatacttaaaagcaccaaaaaattagaaaccattcatagtaatgcaatttaggcatgattgctctaataatttactatatatattccagtaatttttctaacatgyatatgatgtatagtctacaaaaatgtagaatagtgatgtatatataatattgcagaacaaaaattttctcttatgtactctgggtatttcctttatgtcrgaaatgtttttaaaaatatgatggcaatggcattacagtattytatcatgtagacatactgtaattgatttaattcatattttatcatgtctttattggttgagaaaatactttttgaaagaagtacaatagcaagaaatattaaactattaaaagatgttggcttgcgtggtgtcgatacaatgtaagaaaatatatagttctgcaatgagaatgatgcatagatttacttgcctttttttagggaatggagagctgtgtggtatcattggaaatttttctgttaccaaatactgaggctgaattcttagcagagcagattacatggaactgtgctaagttgagaataaagcttcagtgatttgcctcatagtgatatgaactttgtaccatctaatttttgaatattaaaagcccccaaatattccctgtatacgaataggtctatcactatagtatgtgaggctagcaactaaaagcaagaagaggatttcagaaatctgtstttatgttagtaaagagtaatttctttactctatgaattagataagaattaattaaacgctcacctactgtacaaagtcaggactaaatgacagcttattctgttatttaaaatttgcattgtgccaaaatttggcctcatcatcatatcatggcaattatgaattagttttagagatgtttccaaacttggaattcttctaatctgttactggtgggacatcactgacattatgtaattgttaaacctaccactattaagaattgctagttgatttgtttaaagacagtatttgtttcagctgttgcttgtcttctgtcaaatatctgaggcagaggaagcatggcctttctagcgagcagagaccctatgtgaattggcgctattaaaagttccacacatgaccactatttgactcattcccacatgttgcaattaagtgcttgttaaatgttgctttcctctgtctgcatgaaaagctattagaaggaaaaaaaatgtggaaagatttaaatgtaagcctggattagttgaagaagtaggctcatgtcaaattgtgaccaaggactttgtgtttcattcttggtgaaaagaatgctcataatccaatattatttcaagaaatattcatacaaaaactttttattgtgtgtcaaccctataccagggcctgtattaggagttgggactataaagatgtatgaaatatggtaactgccttaagatgagaagatatgcacatttaaaaacaaaacaatacaaagcaaaacaaatctataatgtcatgagaataaacayagaacttaagtatattcaaggcaatggtaacataaaaactgtgaattatttctgcccagaggtgacagagagatgcttcagagaaagtgatgtttaatctgtattttaaagaaggaaaatactttcatctaggacaacagagaaggccatttcaaacagaagaaatcacatttataacacgcacacacaaacacacacacacacacacacacacacacamtgctatggactgaagtgcaccccccaaaaaatgcatatttgaccttctaatcctcaatgtgataggatttagaggtgaggccttttagaggtaatgaagtgtagatgaggtaatgaaggtggagcctctatgacgggattagtgcctttataagaaaaaaaaagcagaccagagccctctccctctttctgccatttgagaacacaacaagaagaaagtgtacgcaaaccaacaagagagccctcaccagataccaaataccagataccaaattcactgtcaccttgatcttggacttcccagccttctaaactgtaagagatgaatattttattgttatgtcattcagtctatgacattttttaatagcagcacaaactaagacacacataaagttagaaacaatacagagtgagaaactataagtctgatgttaatgcggaaaggtatcaagtgataaagataatataaaagcaagcagggagggccttttatgccatgccaacaattttgagtttggggtaactaggattcattgaagagtttagtagaaagtgacttgaggaggtctgcattttagtaagaaaactccagccaggtggattaaggtaggattagtcgttgccgagagaaaaaataaaataaaatttggaggctgttgccaaacactgaaactatcactgcgtatcaccttcaaggaatctcctgagtacagtgccaagagcagaggaacatgtggatcatggggctgtcacattcttttgaggagctattcaggagctaacagccattcattgaccaaactggcaatcacctgctactgtaaatcctggaaccgtcttgcagttgagcaaagcaacttatgaactcctattagccaaagcccctcaagtgtatcaaaaagggacatttgtcatgaggtctagaataatctcccacaaaacaatgaaatacaaatatgtttctaataatttaaaatcctcaaaagagtaattcctgaagtaaagtttgtaaataawcttaggtattgtcatcttgattatctgttagtacaatgagaaattactgatattcagacatcttttttgcacacatatatacatactcacctcaatatgaactaaattttaaaaaagtaaattacacaaagaatgaacttaaagctacttactagtaacaactgagtggtatcatgtctgtatagttttagaagacaccttttcaaaagaaaaatgagcttagccagtggagatacagccagtatttgtatgtagagttgtcattcagttaaaatctattttctgaaccttatcacgtgaaaatttaccattcaactaatatcccaaattattctcaaaactagcacttctgccttgtgtcaatacaacaatgtaataaatcagaaagcccacagtacttgatataaatatcttggctctgactatagaacaatgaccctgaatccataaactacatatgtacatcatttcatatctttactgttacatctgaaatgagattgccaaacatattatcatgtatcctgtttcagacctttcttttctttctttctttttatgtattttttattttttataagatagggtctagctctgtcacccaagctgcagtgcagtggtacgatcatggctcactacaacctccacctcctgggcttaagcaatcctcccacctcagcctcctgagtagctgggactaygggattgccccaccatgcccagctaattttttgtattttttgtagagttggggtttcaccatattgcccacgctggtttcaaactcctgaactcaagccatccacctgcctccacctcccaaagtgctggaattacaggcatgagtcaccatgctagaccccactgtgatctttctaatgaattcagaactaatagtgtaacaaacacatttggtcacattgtcttcatttcctggtccgggtatatcagatattattaggtgcatcctttcactcaactattccatgtattcccccaaatagattctctagtctcaacatgcaaacctacacattttatatcttttttttcctttcaaactcattattcagaaagaatttgcaattgaaacttatctttcacttaaggatggtagggcaacagccatttctgcaagataagtgaaattgctaaatagttaaaaaccaacaatatgcattaagatcatctcctagttcttacgggattcacttttttatgtatgtctcatagacactaatgggtctatgagaaaatgttttcagtcatgtaggacatctgctttaagcaaaaaaagtagagtgaccatagatacagttaaggaggtgctaacagtatggcagataaagataactactgtgcaatgaatcttgaagtcattatgtgcatagcttcttcaaagatataaatctcaatagaaaaatggttggaaaataggtttttctgaactaaatcttcaattttttatagtttatgccacctataaagatttataaaatgcatttcttytttatcatatgagatttttcttcaaacctataattttacgtatatgtattgctaataatgatgcctggcatttgtgtagaatttttcaaaaagagtgttagtaccaagaatctatgaacaaacaccttgcctacctgactggggatgctaaaagattttacatgttttatattgtcttaaattgacacaccattaacttacctagttcttcaaataaatacactgtcatcttgcattgtttatgaaaaatagcatataaataacagttggttagcatgaagtgttcagtttttaatctcattttgccttgcacatcagattattaagttgtatatgcatatatggtactgtatggttatctactggttttaaatcaaaatatcaaggaaaggagacaatagaagatatgcaaatatagtgctaacatggtacaattattgtgtgaatgatctttcaatacccaagttagtaatagcacaggaatatcagttttactgtctttatcctcattagcaaaatgttgggttttgttctaaagaagaaacataattcagctaggttttggaaaatcacgctttgcctgtaccctcgcccccttggcaccagcacacacaaaaggatactggtaaaaccaatttattgggagctattttctttttcccgtctaagtcccaactaaaagcttttgtgtttggggcatttaagctgagaataccttttttgtagtgctctctttcagagcactcagttcatgtgctttgccattattttagaatggtaatgctttccttttaaatgatgcttcccttgcccctcaaaggctccattgtctgcctgggatcctaagtttggttgctttcagcccctgataaattagtaatggaacagaatcaggaggctttgcggcctctgtgccctgttattaaattgtgtttggtgctaaaatgtatgtgtacaccacagcctgtgtaatgacaggtaactgtttgactaattggctcaggctcaatagaatcacagggccacagggacctttaagatgctttggtctaatcatctcatatttttaaggaagactgaggccttggatgttcaaagacacgtacatgatcataaaaatagtgagcaacacagtttggaccactatatattctgcttctcatgttatctctctttgaatggaagttcagatttctgttaaaatacaagggaaagtgaacttaaatttggccacattttattgaaaaagatatgagtcttataaaaatatgtgattcaagtcagtttaaaaaaattgccctgtaaacgatttctgttattatttactcataagacagcttgtatttctgtagaactctgttctccccaaaatcatccttctaggcttgtacctgtattgtaacagttaacacgttagtagttctgtaagatgggaaagaagatattattatctgtgatttacttagttttaatctggactccagtaaccatatgtttaagttttctctcttcttgaaaaatcactttctacatcatattttacttgtttgcttgaatacctaacccttctaccccacccccctacagaaagctttcgaaggcaggaaatctccttaagcaactttcaagacccgcaaattccagcacagggcttcacaggcaataggccttcaggacatctatttagtaaatgagcaaatgagtttctgtttgacagatgagaaaatatttcttatgtatatgttttcttaagatcatcaattagaaaagagaaccaaaatatagtttttaacttatgcacctatttatttatcattgcaccacatggacaaagactcagattgcctgtactaccaataactgacatttgaaaggaatgaatgtgaccacagcccttcctgaaaaggaagtgctttgtaaaccccgtgcccctgtctaccccatctagagctgattggttgataggataagagggaccctgacccacattacacactacagaccataggctgacyagtgacttagaagctaacaacaaggtataaagagaggcaagagaggctaagaaggttcatatgccagctaacattgtgacagagcagaaactatgagtaagcagaggaaattggttaggagaaagaagagaacgyagcatatgtgcactaaaaatggagatgcctcgagaaacggagagcatagcctatgagagagaaactgagtaacctaaggctagaactgcatcacttttgacaattttacttttctgtttctactaccatcttacatgcacattatatataaaactcccttatcgtgaagtrcattcaggaatctctctctttttttttttttttttttttttttttgcaaaaaaagccttataataaacttagtgaatggcacaggaatcaatgaccctcaattgagaaaggtcagtacrttttaatcttgccaaggtacctacttattaattccttgtcttaattttatgaagtgttacaggcttttaatacagataattgaatatttgccacatatttaaagaaactgtgttataaagtcttctctgtgtagttgattttaagatttattttggactaaaatcatattacaatattcctcaggagtgaaaataaaatttccctaacaaataaaataaagaagatatacagattgaattgaaataggaagtttctaaatccatgaactgcaattccattctggttgttttcagccttgcactatttctcctgatctagctatcgtcttgacctataatggtcccgctctgccagaatataaggttgcattctgagaagatatatttgattcttgtaagactcagaggtggagtcagggaaatagtgaattcagatwaatrtaagaatatagccttcaaaatatatactaaccgtggctcatagcagcaaaatgttcactagttacactgtcacctctaattcagaaccaaacagaccatttaagttgattcttggcaagtctttaaacctacttgtggtggttctaaaatttgtccagagattctttgatgctgcttccattaagtggtggagcttaatttccctctcctggagtgtggggtggacgcagtggctcactgctaatgaacagaataaagcacaagtgttagtgtgtgattgcagaaactaggtcktaaaaatcactgcagcttcctcctttcttcctaactgtgcactctgggtaaagccagctgccatgtcataaggagatcaagcagctccacagaaaagtcagcatggcaaggagctaaggctttctgccgatagcctctgagggactgaggcctccagccaacagccacrcaaatgagccatcatggaatcagatcagcccaagttaaaccttcagcttcttggtgatggcttacctgaatcatcatgacagactcagtcagagtcacctggccctgaatccttgacccacagaaactgtgagctaataaatgtgtgttgttttgagctgctaaacaaaaaggtaacttattattcacaatagrtaaccaatacactgctcttacatattacagagacactatcaaagccaaaattaatgttttgmtattcacattatttttaataactcttaatcagaagtgatacataaaatgtccagtatatgttctaaataagttatgctttgtaggagttaaatagattaaattgctaagccaacataagatatacctgcttccttaaaggaaaggcaaaatttccccgaaactgaatgctaggaatccccaaagaatctacatcttctaacatatttcttttattcatttcttaaattgcactmatctcatttttaaatcttagaaaaaaacaaatgaaagaagaatttctcatgtgcttttacattgttattctgagaaytctttgggtacctcttcctgctgaattctaaatcaataaccttgcatatgcttgaagtatctccatgtatttatataggtatatctggatactaaaatacgtatgttgtttttcattccatgttttatttatttatttattgctgttgtagattaattcctcttcagagcagctgcctgtgggtggtgggtgaatctcacagcatccttataaaatgtcttataatctggtgatgtgagagaaatatttgaagagagrcagtgtgtgtgtgtggtgtgtgtgtgtgtgtgtggtacagtgactatgggtgtgtgtgattttaatgtttaagataaaggtttttaaatctagaggtcatgtagttctatatrgtggttagatcagtgagctagatagtaagctagcagacttgactcatctccaaaacgaatatagaaactggataatacttggctggcaaaatcctgattttttcattaaccatggaattatagacttaatagtttcaatatttctttgtacccttgtgagtaattttatggtatttggatatttatcttgttgtaacctagttagtagaattgttctaaaatagtttgatgaaaaagaatcataaaatggggtgtcacctcagatattcatgccatttaccctatrttctagttatctatatttatataacaaatcccttgaaatttagtgacttaaaacaataggccrggaacggtggctcacgcctgtaatcccagcactttgggaggccgaggtgggtggatcacgaggtcaggagatcgagaccatcctggctaacacggtaaaaccccgtctctgctaaaaaatacaaaaaattagctgggcatggtggcacatgcctgtagtcccagctactcrggaggctgaggcaggagaatgtcatgaacccaggaggtggagcttgcagtgagccgagatggcaccactgcactccagcctgggcaacagagccagactccgtctcaaaaaaaataaataataaaaaaaaaaagaaaaaaaaaataagcacttattacaactcatggttttctgggccagcaattgggctagtcatctttctgctcyacgtggcatgacaagatcacttggcatcttagcacaggtctgaaaggctgagttcacctaggtccaccttcttcttcatgtagattcagggcctcttcacatgatttttgtagctraatagctagttgaatttcttacacagtttctcagggctccaagaccaagtgttgagataggaggtggaggccgccactctcctaagatctggcccagaaattggcatttgtcttctgtttttttcttttggtcaaagcagtcatagaatcttctaagacttgatagaaaaaacatcaaaaaacttgtggcatttttaatctgtcacaccatagaatacacacaaagacatgtattcattcacaaacatctttcacgtatcatagacatctctagggggaaaccaacttgttcattatctatattacaaaacaaattggctttaaaatataaggtaatgtttagatgacaaagaaattaaaacaaaaaacctgttacagttatgtacatcagtctgcttaagtattaacgtattttaacatagtgatgatcattaatatcaaagaaattggttacagaatgatcaccttataaggttatattaaaataaacagtattgtctatttagttaaacaattgtatattcctttgtgtattaaaagcaactgaaccattaaagcaatcaaagggttaaagagacataaattgatagagtggaatgacaaaatgttgtcattttattttgagtgttgttggataaataatggtaggtgtattttggtacgttggtatttagaatctcaatagaaatacttaaaaggtcaaaaacacagatgcctctttacctgtaacagcaaaaatgacatcatctctagcctttataactataaacatttttcagagacagcaatttatggatgctcttctaagaattagtcaatatattagctttctttaaaacatacagctgcagcagtaagccacatatattttatttggccttgcaaattttctgttgagttctaggagctgtggatttttgmgatatttggctsaaactcaaaatgaaaaaatcattttaaaaaatagaaatgcatttcattctttaaaaatgctaaaaatatatgatgcaaaatgtcatagtttggctgtaatagcaaaattcttagaatcaatcagtcaaaaataactgtgttatttaggcgcaatttgaaggcatacaaactaaaaacagtattttaaaaccagctataagagcttgatggcttctctacacactgatagctatttgccttataaaaataacaattgaacgagcacagggaacaggccgccacagaaaaggttgccttttatgtagcactaacatgcactcagtagcatttaccgacttagtctggggcaggggcaagaggatgcttcaaaaacaaaataggctaccctctttygccactgttcttactatataacccccttgcagtaaagataagaaacaaactaaaattcacataaacaccccaatttggaaattgttttatatatgtttactttgccagaataagcatggtatttggaaaaaagtacacaagtacttggcccaatcatctattcatttttwattcattcatttaaaatatattgataaagaacctcctatgtgccagatactgttgtcaaccatgagggtatattgaaaaacagacacagttcttgccttcaatattctgagaatstaagggaaaggcagatatgaacaggtagttataccatagcttaaaaaaatgtaattattagagcaaggatgagatactatggaatatatgaagaagtcatctaactcrgtcttagagaagtgggtaaaggttttccaaaagaagtaccagaagggcatgtgggaattagcctggccaaggaagggatgtagaagacacaatagaaagaagataatatgaaactgtcacaggattagggggaaatgtgctagctggagcaattagcacagtacgggagagtagcagaaaagcatggctagttaaygttaagatgggyaatatctgaatgagactactaagcaaaaaaaaaaaaaaaaaaaagaatgcaagagaaaagacagcagtccaaattgagaaagtgtatgctaaccagtaggatcagagaagtaagcccgagccaaaccctgaagccctctgtatgaaactgaaaaatattgtttagtgtttagtgagtgtctctgaatgttttagacttgtttttaggtgaaaaaaaaaaaaaaatgatctccggattggagacaggaagattaagatgctgttgcataaatttgggtggggcggggatagaaacctgaaaaaagaagtccctccagcttttactgacagtctacttaaagtccttacagattctgccagtgtccatcacaaagcaaatgccatatattttttatttatgttacagcaaagccctacttctggtaaagtctttgtttcagttatttattactgtatgacaacccttcacacattttagtagtttaaaacaacaacccccatttttctcatgattttgtgcatttattgggccaaatttggcagcttttctgcttctagtgatgttggctgtggctgtggttatctgggtgcacaaatgggctgaaatatccaagatgtctcatctacatagctgccacctatactgggatgcttgcacaccttgacctctctttctttctgtgttgtctcagggactatcattctccacatgacttctctaaaaggcactgtgtagaacagccagacttcttatatggcaactcatagatctaaaaattgcaaaaatagaagttgcttgactttcttaaggtttaggccctgttcattaataatctctagtactcatgagtggagcctctactgtgggtgagatatttaattatggtcaggacttaacaatattctcttaggacctctgcctaaaaaaacaaagcaacagaggcatgcctatgtgtgtcacaatcagggtactgaggtccccagaagcggttgttttcatttgtctttagggcctatttaatatagaaatcagggccaacctgaaagcgtgtggtttggctatttcagataaatttctgataaaaatgcattaatcctaagaagagctgtgaattatcttttcctgtttctctgcttcacctggatatgtcatcatacaataaagaacagaacatataacagtcaatccactgtcatctaccaatgtctatttcataccattaagtccctcatcttactactggcaattcatgatgaatctgatttgatcacatggagctctgtgactctacctgttggaagtcctggatacatttcaaaaatagaactgcactccctctacaaacttcaaaccacagaggctctccctattacaaaaatcttgatatttccgcaaaagayttttttctaaatgccaggactctgctcatacagaagccttgctatacattaagaataaataatcagcattacttggagacttaactctcatgtttcagtgtaaacctccagtgtgtgaagtggcatataacataaaggattcctttagccaaagagacaaatacaataaaaaatgattgcctaagggataaagaaacctcaagtagcaattcttaggacagtggagttctcagattaggaagatcttgcctttaactttatgaatctacaatgttctcaaaaatgatcatttctcaaccttggttctgaggagtcctcaagagcaagaaagaatgttgctcttctgaaggtggccaccataaattagggagatttttggaaaaggtaatatctgaactgattcctaacagatatgcaggatttagccatgcatagcatgtaaggagagcatgtcatgtacagaaacccagaggcaaaagagaaaatggcatacttcaggaatagcaatctaaaagttggctggaaaatgagttgtgggttggggcaaaattgcaatagatgagyttagggagataaataggttttaaaaagcaaaggttcatctcatcattatgtatccaccaaaatattttaaagagagctatagctatagtgtattagaaatactagcctgaaaggaaactgtaagacaatacaatgaaaaaggtgatgacaatcgtagtaatactacctgctgttgtagggttgcaaactcacagtttactcgggcacatagaaaacggtytatgttatcaataattaatctagttgaatttacctccatttgctgagtagtggggaagaaaaacaagatatagtcctacctactttaaaacatgtttattccaattcttaatgaatccctttacataatgcatagtatttctaagatagaaygtgcagcccttcaggatgttarctacccatcttagtcctcagattccttccaaggaaggaaggaatcttccttgatgtgtaatgggagaattgtggcccaagctacctcttggtgggaatgatttgtttaataaaacgtcttctgattttcttggttccctgggcaatgacccttgttcagtttactgctgctggcccagttagtgttctaagctgcagtctgattctactttaaagtggtctgattagttggagctggtttggccctaattctgagtttatcattccacatgcactccctatcttgccccttcatcctcttggactggcctttgcaatagccctgagaaagatgcctggctctgagcycagaaatcttccaagctattcttctaggaacagtaactacatttgggtcccatctgtgtcagtttgtttaggctgctgtaacaaaatatcacatactgggtggcttttaaacagcataatttatttctcacagttctggaggctggaaagtctgagaacaaggcccaggcagattcaatgtctgaagaggacctgtgctctcactctcactcagacacagcttcttttcattgtgtcctcacaaagtagaaggggcaagcaaggtcccctgggtgtctcttataaaaaaattaatctcttttatggaagtcctaccctcatgacctaattacctcctaaaggcaccacctcttaatgctatcacatttaacatatgaattttgaggggacataaacattcaaaccacagtaccatccattctacaacgtaaattctacgtgggctcaattatgctaaactctttctacccaagaccattggactactgggtttccttttttaggctgcaaattcaactgatacgtcattatcttggaagctcctatattccagaggacccctctgccttacttatactttctcctaacctaagacaagataggataaatacatcttcttgattattcaccacacaacccaggattcattcaaagtcttctgcagtgcgtatagcacatttcactatgcataatcgtattatcatgacttgctgttaaggtatttaattgaggagttttacatggaagaatttatttctgctttgtgttcttaatgacatttaatgccaattgctttccaagaaaaatatggaatgtaagcttttggaatattgtgtctastcgtaaaagaatcaggctgacagattaaaatattgaattctaccatataaaattcaaaaatatcaccagattattttacctctgttaaaacgtcacaaattatatctatataaactatgtttttgtttctttcctatatccattttaagcaagaaagtgctgctcaatcttattttatatttagtcawgtatagactatatattgaatggattatggattaattgaatccaaatataatatctagtttttcccctaattgaggatatcaagtcaatcactggaaaggcaaaaatatcaactttaggtgtttttgttgaataaatgtgtctaaaagttctgttcctcactcatccttcactgtacagtatatgatatctaaagtttacagacggagaatattgtatttgcttggaatgatctatgccaacacttaggtatttctgcataaaaatatgaagaggccacctatacattattaaaatcattgatttaaaaacaacaaattcagcctaaaacactagttattttatttctatgatacaaaacatttatagtttggctttttttttttcactgaaatgacagatttttcccaccgtaatatttgtctaaattattttggtagtgggcaacccaacatgttgaaaaagagactgaaaacaattgcctgcataatttagaccggttaaaatatcattaagaaaatctagcaattgcccaattaatttttttatgttttcttatattctccatattgtaaatactaccattctggatagggtttgtcatttattcagctaatttgatcaagtgagctactagacacacttagtgaataaaatctcaggcgtgttttggttttaagtgattttcatgactctttgatttcgttaaatgtataaccaatcataatccactttactttgtactgtgtagacaaaatcttcatgagcaatgaattagctttttgtagatgtaaaacaagttttaattataaccttacctgatataaatgttaacattttggtgagcagcaacatttactaaaaataaaatgttactattatcccacggtattaagtagctctacttaagccaaaagksttgctaaaattaactaaaagtgccttgttgcctgaactttaataagctgaggtctcacccstaattataccgatagaaagttcctaacctaactgatgtaataggaagtgaaagctaaagaaactgccttattttattagttgcaataatgcctattatttaaaggattaaaaatgcccaagacttcttataaaatgatgatcatcatgagaacaacagccttattgaggtctgagtttattggcatgtgctgctggatgatcagcagcagggtttgatttcaaacwtgctaacacaagatagtaactggaaagtaatttgtttcactttttcttagtaaaattatgatggaaaactcttcacctgggaaaatccaaattcataccataatcataatgctgcttataaggagtcctaatgatatactttatgaattttcatttctgtttggaagtcagcaagtgtgcattctataaatgtaaaccatctgttggcacctcctaaaagactagatttcagtccatcccaacatgaattatttattttgatggatttctttcctaagcaaattcaactgtgtgtgtgtgtgtgtgtgtgttcatgtgtgtgtgtgtgtgtgtacacatatgtagggatgtatatgtgttttaatttgtttttaatctgcaataaagtttcaaagtcaggacatgaataatttcaaacccagaagataaaagtgctcaacaatttgaaatgtatttattttacataacatgcttgtgaaattgaggaacaccatttaatattggatcagaggtaaaaagagaaatggtagcaaacaataaaacattcctataattttaatgtttcaatgacaatgtcagacattcctattacgaaccagaaaagagaaccccatagctacccactgggcaccacccgtgatctatagttacaaggcaaaygcaatgacaatgaacatttgaaatacattgactttggctgggcacggtggctcacgcctgtaatctcagcaccttgggaggctgaggtgggtggatcacctgaggccaggagttcaagaccatcctggccaacatggcaaaacccgtctctactaaaaatacaaaaattagccggatgtggtggctcacgcctataatcccagctacatgggaggctgaggcaggagaatgacttgaagccgggatgcagaagttgcagtgagccgagatcacgccaccgcactccagcctgcgtgacagagcaagactccgtcttataacaaaacaaaaccatatatatatatatatatatagagagagagagagagagagagagagagaaactttactagatgagaatttactatattttgaatgaacacgaaagatttgaggttaacttaatagaccttgttaatttgccagtattgcatttttacataatttttgctcataaatatataaaataggcttttttatgtcaacaatttctacacataattgcactatcgtctttgtgttgtattcaccttttgcctttctatgaagaaactcattaagtaggacagagacagtcaatgcccatttgtgaatctgttctctatactaggagagacagagatgagtgttcaaggcttttttttaaaccatgttcaacaaggaaagttacactgtatagaatggttgctttgaatctattgaacaaatttcatagacaaagccatctgaaatctacattacaaattagagcaggacttaaatcaggctttaagagtcaaaattttcctgttttgaaaaaaagtgccccccaataataattcaaaagctgcagattttcctaggaagaatyacatgtttttgagggataggcacagttgaagcaacacacgtaccctagggctatggattcttttttattcctttatatgattactattccatttataacatagacaaattaaatcaactgtgaaaagtctgttcctttttgcaccaaagaccaagttcctgctgtacatagacttgattgtgcttatgcgtatttccataacacttgttgccattggagagctgcagctgcatttgctgtctctggggttgttccctcccattcctttcaccctctagcaattcttgttctcttccattcaggcaaatttgaactgattaaatgttcttggattatgcaaggaagctataggacaaagtggcagagaatatcctgttgcatttccccctaatttcagctgtttataaatttcatctgtagtctttgaaaacatgtctttaattattctcctagtcaacaaatctaaaaagtgtttaatccagactatttactggctcttaactttaaaaagttataatgtacaaacaaaactaatctatattcttcycatcsaaaataccttctccaagcatgattacctctattcttaacacacagtcttyttattcyggtawtcctttaaaaattaaattcaaccatacttgaatacatggtatcacaaagtcstactgttctacaaaaatgtgaatgttgaataaaacttatattaatccctttcacagttagaagaaatttttctgttaaatatgtcaacttttactcattttattagtccattctcacactgctatgaagaaatacctgagactgggtaacttataaagaaaaagggtttaggccagacacattgattggctcacgcctgcaatcccagcgctttgggaggccgaggcaagtggattacctgaggtcaggagttcaggaccagcctagccaacatggtgaaaccccatctctrttaaaaaatacaaaaattagccgagcatggtggtgggcacctgtaatcccagctacttgggaggctgagacaggagaattgcttgaacccgggaggcggaggttgcagtcagctgaaatcgtgccattgcactccagcctgggcaacaagagccaaactccatctcaaaaaaataartaaataaaaggtttaatagactcayagttccacgtggctgtggaggcctcaggaaaattataatcatgatggaagacacctcttcacaggggtgcaggaaagagaactgccaagcaaaggggaaaaagcccmgtatgaagccatcagatctcatgagaactcactatcacgagaacagcatgggggtaacagcctctatgattcaattacctcccaccrtgtgcctcccaggatacatggggattatgggaactacaattcaagatgagatttgagtggggacacagccaaaccatatcacacatcatagtccgttggtttatttggttatgctactcagagactcttccaaataaagaatggcattcttttgtattgacaccacttacagtctgttttccaagctaataaaaatgtctgtgttttgttgagggtagaaatcgtaaatgcatttcgtgttcaggtaacagaaagcctagaactaatatgagttattctaattttttaaaaaaattagaataaaattctattctagtaacagaataaatttttytattttattctaataaatgacagaataaaaaatctgtcacccaggctagagtccattggcaagatcatagctcactgtaaccttgaattcctgtgttcaattaatcctcccacctcagccaccccaatagctasaacttcaagagtatgccaccattcctggtgattttgtttgtttttagagataggatctcactatgatgcccatgctggtctcaaacttctgggctccagcaattctcccacctcaacctcccaaagtaccaggattacagatgtaaaccaccgtgcccagctgagttattctcataatttaattagaagagatacatatagaaaaaccaaggagaagcttmttggccctggcccttgctcacmctttcctcacttttctctttaatgttattcttgatgctactatttattttgtccattataccttcaatgcatatttgaatctgtctacatctcttctgcctttactgagtatcctaatctctcaaactatgcaataacctccaatttattttcaaaatatccactctggctatattccattaactatcataacaacctgagtaatcttttaaaacatgtaaaacagatcatttcattttcccacttaaaatattttttataaaatacaaaaaatagcacttcaagtattcatacatttggaaattctaaactatcaaaatgaaataaataaataaaatattttagaatggaaataaaaataaaatactgtagattaactttaagagaggctttcaagtggtatttaaagggaaaattataaaagtactacaaaaaagattaaaaattaatgagctgagaaatcaatatgactataatacaagtactagaaaagaagaaagtactaagaaagaagtcccaggaaagaagaaagcataaaaataaatgagctaagagatcaactcagaaatttaggaaaatggcagtaatgcagagtatgtggaagaggaagataatatgagagataaaagtaaaaactgattcagtaaaaagcaaagattcaatagataagcaaataaaacaaacaagctagttctttcaaagtctaatgaaatagacaaaacttggccagtatttagacagaatgattaataaagaatgaggagaatcataagagaacactaccttaaaaagctagaaataagggtttctggcacatagaattatttcatgagcttcagaaaggtcaagaatataggacagaaatatgtgcactgtgtctcacacttaataggacctcagtgatctttgctgcgacaggtttgttggggttggagcacatgctcaaagcctgattgcagtttacagaacagtgaaatggaaggtgagaaagtgaagaaaaaagtgcaaataaccatactaaaagcttagctgcacggagaagaggagaaaaaaaaaaagagatgagaagacagtgtaataaagatgaagggcttttttacaaactctggtgaatgaatcaatagagagaattaacattaagttcaggatctaggagtaggtatgcattatattattttttacacgtgaaagtctttagcaagggcattattttaaccttgttatttattcttacttttgcaacaacatacaggtsaccaagtaatctctggatgtgcttcgtgtttcacagtgctctgaaaagatttcaagaattcttattctttttttctttcttcccacttaattaggggccaagggagatgctgcaagtagagtgaaatgtctttaattgaattctatgtcttgatctttatcatcataagagtatacacatattgactctgctgattgcattatgtgtagtagcaataggagggtgattaatattaaaatatttaatcactaaaacacctctaactaaattattttattttttccaaggcttaaatgggaatgttttcatttttgtttcaagtttacatcttctttcaagaggagttttcaagctggttgattacaaatacttcttacccaggcaatggagaacagttttaagaaagttgctttgttctgacaacagattcagacttcttcacattgtcgtgcccatttgtctttttttcataacttattatttactttaaaattytgtgaattttttatatcgttactataatgaattgaatgtgggacttcctccaacttctactggtgccttgccacrtttaaaagaaaaacccagttgtttacactacccagtgctagggacattgttaactctagggaatgaatccgaatttgtgaatactcatggtaagaaaattccttacaaggtattatggaagggctgaagatggggtaaagaggaaaaatctcagatgggttctattttttatttcttattttacttttagaatatacttgatcacacactgctgcatttgctatggaggaaaacaaacagagacacaattttgcacagaaagaaagatttttaggtaactagaagtggctagaaataataattgaaatatataaagtactctatgtatgtatatgtagggttgataaaatatatagagaagtactttccaatatatattacaacagtttaaaatagatcaatgctaattaacatgcatatggttaaactgagtaagattcagggttgctgggtgatgtaactaacattttatctagtgtatatctgagttgaaactcaaatgcaatcatctgattctatattctgtggtccattttaaatagcacccttcctcattaatgaggataaattctatgttctatcatgtgatatcaagatcagagaaatagattcattttgtccagtaattcactagctgtgtatatcttcctgcaccctcaacaaatggctgaatactttcattgaggttggattgaggatgtgaagaaagcatgataaaaataatctgaaatctcttccggatgtagcaagagagtataaggcaggtacaatgctttcaactcaaatcttggtcctttctcttggttctgtagcctcagaaaagctacttgttcctctagatcgaaaattttcatctatagaatatagtcccctcctacttcttcttttgtacctctcactccttctttctcttcgtcttcacaagtttgtatcagcaaaagtgagacccacataatattgagtctaaacagcttaatgtcagggaaatgtttattagttgcattggacagttataaataacacataacctttataacctaggcatactttgttttctgagcataaactatcattcattttaatatgatcttattaacctagtcataactgatactggcaagtagtacctaaaccaaaggcacatactgtatatttgggagacaaatggacacatacaagagaagccccatagatgcagtctgacagaagtctaacacagaggagatgcatatttctgagaggataataaaaagtaaagaggtcattttagttttcaacttcaagtataacaatattttaattgaatgtattttaaaatttcatttacatcgcagtattcaaaaatctaatccccctgagggtaagataaacttaatgccagagagatttcagacataatagcaataaggatagagggataggaagctgtagttatttcagatgttaatattcaattattaagattaggcaatagggcccttaacgaattgttagacaatatagtgctaatagcctgggccagacagctggagatgtagaggagatcacatatagggaaatcaggggactcctcaagtgacagcaagacggcagaataggagttggcagcactcttgccctcacatacaaatcaatttaagtggccgagtttggtggctcatgcctataatcccagcatttaggaggctgaggcgggcggatcacgaggtcaggagttcgagaccagcctggccaatatggtgaaaccccgtctctactaaaaatacaaaaatcagtgcagcatggtggcacacacttgtagtcgcagctacttgggaggctgagacaggagaatcgcttgaacccgggaggcggaggttgcagtgagccaagattgcaccactgcactccagcctgggtgacacagcgagactccccctctaaaaaaaaaaaaatgaatttaaacaatcatttacatgcaaagatatcttcacaagagctaaggaatctggatgacagattatagcacctgagtggaacacagaaataagagaacaaacatacattaaagagggcagaaagaacattttccccttacacgcaacacyagtttgtccaagcccatatagcacaacatggagagagayatcctccacatgggaaagaagagtgaaacgagtactccactttctgtcaaccacagaaccatgccaatgccagtggactctggccccagacttgctcctgtgtacccaagctccagttaaaccccatggacctaagttctaagcccattccagaggcatacctgccccacggtccaaggcttcaggccttgagacaaggcctagggacaaggcctgtttctgtggagcctggcgcctggttgagccctgtgggcccaggtgccagcaatgtttacccactgacccaggcaccaagccagcctgttggagtattctaacatccagcctgcccctgaacctcatccagaatctctggataggctgacttgtgaagagttttcccttcctgagtagtctatgaggactgaaagagctgccatttctttaaataagcagacatcaagcaaagccataaaatcacgaataatcaggaaaacatgatagtatcaaagtatcaaagtaaagcaccagtaaccaaccctaaggaaattggtaactacaagctgcctgacaaaagaattttaaatattcatcttaaagaaactcaatgagccacaagggttcaacagcagacttgatctgggtaaaatttcaacagcagacttgatctgggtaagaagaataaaaaacctgaaagaagcctacaggacttatgggacaccatcaagaaagccaaatatgcattatacaagattcagaatgagtagagcaagagaaagggcaaaaagcttatttaaagaaataatgacagaaaacttcccaacctggagaggaaaatgaacatcccaatccatgaagcccaaataatccaaatagattaaacataaagatcttcatggagatacattataatcaagttttcaaaagtcaaagacaattaattgtgaaagtgacaagagaagagtgaattgttacacaaaggaaatctctgtaagacattcagtgcatttttcaacagaaaccttgcaggccaggaaaggagatgtgacatatcaaatgagataaaaacaaaagataaaagaaagcagaccaactagaagtataatacctaacaaggctgttcttcagtaataaaggaaaaatacttccccagacaaacgaaagctaggaaattgatcactatcagacctaacttaaaagaaaagctagagttcttaagttgaaacaaaagaaggctaattaacataaaagcatacgaaagtaaaaaataaaactccctataaaggtaaaaatatcatcaaattcagcagactctaatactgtagtgatagtatataaattatttttaatctggtctaaaagttaatagacaaacaaaactttaaaaacccatagctacagtaatttgtgaatggatacataatataaaaaatgtaaatagtgacatcaataacataaaatgtgggagaagtaaaagtgtagaattattatctatagtcaaagttatcagctttaaaaaagactattctaattataagatattttaaatcatccccagataaccaaaaagaaaatctgtagtagatacacaaaagagaaatgaatcacagtatagcagcacaaaaagccatcaattcagaagtaatacagtcagaggaaaaaaagaaagaaagaaatgcaaagcagtcagaaaacaacaaaataacagtgggaagtcctgtcctagtaacaattacattaaatttgagtagattaaagtttccagtcaaaagacctagaggggctgaatggataaaaatacagtatccagctatacacctcctaaaagagactcactttagcttgaaggacacacatagattgaaagtttacagaaatcaagagatatttcctgcaaataataataaaaaagagcagggtggctctgcttacataagatgaaatagattttaagtccaaacctgtcacaatagacaaagaaggttattacattatgataatggagtcaattcatcaagaggatataaaaactgtatgcatatacgcaccaaatattggcacacctaaatatataaagcaaatatttactgaactgaaaggagaaataaaccacaatgcaataacggtaggggacttcaataccccattatcttcacacagacagaaaatcaataaggaaacagtgggcttctacaacactactgaccaaatgaacacaagaaacatataaagaacattccatccaacacagcagaatgcacattctgttcaagggcacacagaatattctccagaatatatatgttagttcacacattttaacacatttaagaagattgacataatattagatatattttctgaccgaaatggcatgaaactagaagtcaataacaggaagaatattggaaaattaaaaatatgaggaaactaaacaacatactcctraacaaccattggataaaagccaaaattaaaatgtaaattaaagaatatattgagacaaataaaaatggaaacaaaacctactgaaacccatgtgatacggcaaaagcagttctaagatggaaatttaataaatccttacattaagaaaagaaaccaggcatggtggctcatgtctgtaatcccagcactttgggaggctaaggcaggcagattgcttgagcccaggaattcaagaccagcctaggcaacatggtgaaaccgcatttctaccaaaaaaaaaaawwawatatatatatatagccaagtgtggtagcccacacctgtagtcccagctacttgggaggctgaggcaggaggatccattgaatgcaggaggttgaggctgtagtgacccatgattgcacgactgcactccagcctgggtaatgtaacaagactctctcaacaaaataaaatagaaaaagaaaagaaaggaaaaagattttgaataaacaacctgatgttctacttcaagaagctaaaaaatgaggagcaaattaaacccaaaattagcagaaggagggaaataataaatgtcagagcaaaaataaatgaaataaacatgagaaaatgattttaaaaagtgatgaaattatgagttggtgttttggaaagataaaaaaaattacaaacctttaattagactaggataaaaaagagaagatccaattaaaaccagaaatgaaagcaaagacagtacaactgttaccacagaaattcaaaggatcataagaggctataatgaacaattatatgttgacaaattagataaccttgaaaaaatggttaaatttctaggaacacacactctaccaaaactaaatgataaagtaatagaaaattcgaacagaccaataatgagtaaggagattgaatcagtaatcaaaacctcccaacaaagaaaagtctaggaactgatggcttcactggtgaattctactaaacatttaaaaagaatgccagtgcttcctaaactcttcaaaaaatggaagaagaagaaggaatacctcccgactaattttgcaaggccaggattacactgacaacaaagccagataaaaacactacaagaaaagaaaattagaggcccatattcctgatgaacatagatgcaaaaactccacaatatactagcaaaccaaattcagcagcacattaaaagggtcatacactatgattaagtgggatttattccaaggatgtaaggatgcttcatcatacacaaatcaataagtgtgatataccacatttccagaatgatgtacaaaaaccatgtgatcccctaaatagatgctgaaaaaacatgtgaaaaagaattaacatatttttgtaataaagacgctcaccaaattaggtatagaaggaatgtacattcattaacrtaataaacgccatacaagagagacccaaagccaacacactcaacagtgraaagttgaaagcttttctcctaaaatcaggaatgagtcaagactgctctctctcaacacttgttttcaatatggtacatataggaactcctaatcagagcaattagctaagaacaaaataaaagtcattsacattgaaaagaaagaagtaaaatggtatctttgcagacgacataatcttatatacagaaaactccagactataccaaaaactgttagaattaaaaatgaattgaatagtattgcagtatacataatgaacacacaaaagttagttgcacttctataaactgaaaaggaactacagaaaaagaattttaaaaaacaattccatttaaaatagcatcaaaaaataaaatatttaggaacaaagtcaaaagtggtaaaatatttatacactgaaaactacaaagcagtgataaaagaaattcaagaagacatgaataaatggaaaaatatccatgttcttgaatcgtaagaattaatattgttaaaatgtccatactacatacaaagctatctacagattcaatgtaattcctaccaaaattccaatggcatttttcacagaaatagaaaacacaatcctaaaacttatatggaacaacaaaagaccccaaatagccaaagcaatcttgtacaagtagaatattgaggcattgatgtatcacactacttgatttcaaaatatactacaaaggtatagtaatcaaaacagtatagtactggcataaaaacagacatgtcaaccaatgaaacaaaatagcccagaaataaatccactcatttgtggtcaattgatctttcacataggtgccaagaacacataatcaggaaatsatagtctcctcaacaaatggtgttgggaaacctggacatccacatcctgaagaatagaatcgaactcctatttcacaacatataaaaaaaatcaacctaaaatggattaaaattttaaacataaaacctttaactagaaactgctagaagaaaacatcaggaaaagctactcgtcattagtctatgcaatgatttgttttttggctataatcccaaaagtacgggcgacaaaaacaaaaatagacaagtgatattgcatcaaactaaaaatctctgcacagcaaaagaaataatcaaaggcataaagagacaacctacaaaatggaagaaaatatttgtaaattatgcgtctgataaagagttaatagtaaaaatatataaggaacctaacaactaagtagcaagaaaaaaaataaccagattaaaaaatttgcaaagacctgaatagacattttgcaaaaggagacatacaaatggccaaaagatatgcgaagaaatgctcaacatcacttattatcaggaaaatgcaaatcaaaatcacaatgagatatcacctcacaccttttagaatggctatgatcaaaaagactaaagataaatgttggagaagatatggagaaaggggaacacttgtaccctgctcctgggaatgtaaattggcacagccattatggaaaaatgtatggaagtttctcacaaaattaaaaacagaactgcctatgatccagcaatctaaatgctgggtayatataagaaaatgagctcaatgtgttgaagaaatatctgtactctcatgttcattgccgcattattcagaatagccaaaatatgaaaccaaccttagtatttgtgttcatggatagataaagaaatgtgctacatgcacacattaacacacatatacacacacagtggaatatttttcagccttaaaaagaaggaaattttgtcatttgtgacaatacacatgtacctagaggacattgtgctaagttaataagctagacacagaaagacaaatactgcatgatctcacttatatgtgcaatcttaaaaaacaacaacagcagacttctagaaataggaaatagaaagatcattgccagtgactagcagttggggaaattaggatattatgttttaaaaagggtacaaagctttagttttgcaggatgaatatattctgaagatctaatataaagtatgtattgcagtgtcattaataatatacagcagtatagttaataatagtgttttgtaaacttcaaatttgctgagaatagatcttgcaacacacacacacacaaaaggtaacaatgtgagatgatatgttaattagattgtggtaatcatttcacaatttgcatgtacatcaaaacatcatgttgtacacctccaatatatacaatatttatacctcaataaagctggaggggtgataaataaatcaggggactaatctctgagccacatttgctaaagttacccaaagtttcttagccaacaacaacaacaaaattgagtatgatttccaaacttacagartatattctttataatttgttacttagtttatagcaaatcatatatggtattctcagcacggaagatggatttaagtattgtcagcccaatctgacaagccgtttgccacaggggttaagaatgtgggttcagaagctagattrtcttcttttgaatttgggctccttcacttaccagctgtgtgatattaggcaaagtacttaacatttctattcctcagtccctttggctataaaattacattmattttaaaacagataacataaagtcctgttacagattagatgtgaagcatgtcaagcaacatctgtcaaacaatcaccactcaaaagttattagccaatatatgtagattttattttatataatatactgataaagaaaacccattcaagcagtaatatatagagaaacctaggctaaatgaagctttcatgaacattgcagacaaaccagtacagaaatgtcccctattaaggctcctttccatatagaaagctaatttgtaaccagaatgccaattcctatgtgcaacttgaaataactgtcaaataattctattttcagtccaatctagccagcacattctcgtcatgaaagcatgttttctgttcttttgtttttgtttttgttttttgagacaggatctcactttttgcccaggctggcgtgtagtggcatgatcttggctcactgcaacctccacctcatgggttcaagcaattctcctgcctcaacctctcgagtagctgggactacaggcgcacaccaccatgcccagctaatttttgtatttttagtagagacggggtttcaccatgttggccaggctgatctcgcactcctcacctcaggtgatccactcacctcggcctcccaaagtgctaggattacaggcgtcagccgtctcgcctggcagaaatcatgttaaatggaggaaaaaaaattattataatttttcttggtaaacttgtcctttaattaaaatagcctgaagcactcttacccattataccattagtcttgccaaggaacccacaatatttgaatgttggaggctgcttggagacaggctccatacctcttggctagaatctacctctgtgatatcccttttccgatgcttacctggcttattcagctccattcttttagtttttgagtacttttcccaatagggtatatttaattaaaaatgctttctgtatttttgtttaatcaattacattcaaatgtacatcatccttacctgatatcactgttaaataatcataattaaatatgggattttagtacacttttcagtaggacatttatttttagccagtagtcttttctcttattattcttaaagtttagcacagtgtgtgttttgtgcgtgtgtgtgtgtgtgtgtatgtgtacatatgcacatttccctaatatacagtaaatctggaggctaaattagtttcagatttggggagatttactcatgacatcttcatgaatctcaattttccttccattcaaaaagtactgcatacatgactctcccgcatatgtgatatgaagaacagaagtaatgagagccatggggtaagaagagttgcctgaacttcattactgtcttagtctatttgggctgttataacaaaaatagtatagactgggtggcttacagataacagaaatttacttctcacagttctggaggctagaaagtccaatatatttggtgtctagtgagggaccacttttcatagagaagagagctgtcttttctctgtgccctcacatgtgagagggccaaggaaactctctggaaagggaccagtcaccctcatgagggctctaccctcatgacctaatcaactcccaaaggcaccccttttttttttttttttttttttttgagacagagtctcactctgtcacccaggctggattgcagtggcgtgatctcagctcactgcaacccgcgcctcccagattcaagcgattcccctgcctcagcctccccagtagctgagattacaggcacatgccaccacgccctgctgtttttctttttttttctttttgtacttttagtagagacggggtttcaccgtgttagccaggatgatcttgatctcctgaccttgtgatccgcccacctcagcctcccaaagtgctgggattacaggcgtgagccaccgcgcccggccagcaccctcttctaatatcacgtygaggatcaggtttaacagatgaatttgggaagaacgcaagcattcagtctataacagtgtcattgagctaaaggctcttatgaaagaagaaattttgagaaaacatttgacaagagcaacggtggtttaatcttactgccctttcctctgacttgttaatattctgcactttattcaaggcctagtccactttcgatctcctttttatgtcttccctaatcactctgtcagaagccgccttattccccttatgtgataataagcacctggaaggtaaattgatctctctctctctccctctctctctctctctgtctctctctctcagaatctctcataacactgtatttcatagaaggaaaatatcaataagagaaatttagatttagatttagaggtcttccactccttcatttwactcaagttaggtgatttgaccaacatcaaatagcaaagatggtacaataaatcagttatcatggatcccaatttagtttcaagttacgacaatggctgtagaaatagaaaaaacaaagctggggtcattttgaagcaagatctgacaatattgtagatgaaytggaaagagagattacagtcaaagaagattgaattatcatcagtcttactgagagaatagaggtaatattaagaggagagatttttatttattggatgcagtgggttaaggagataatccaaacatcatattttatccctgaatgaaacatttaaaaagagacagtctcacatatttgctttggaaagtgaaatgccatgccaaggtataaaagtatagctcctatatttctaatagtgtcttaggtgkatgcaacacattactttgatttttaaaaagaatcaggatatttgaattagttattcattattaaaatctaatatgttagcatctatatggttctaggaattttttaatgtctctgcattgcttgattctcaccacaagtttttatcacttactcactgtctttggcctttcccttaaaggaaatgagttcagttccattcacactagcaacaggcttctagactccagagtcaccactgcacaattctttaagtgtcaactctgtttcccacacttaagtaggcattgggcatagttttggcaacatttatacaacctcaaagcaataagcaagtgttcacttcagtctccccttttctatttttttttcttttcctacctctctttttgtataggaaaggtaaattacctaaaaataggyttatagcatttcctcatagacttttccatttatttacatttaatgtctgaacttgctttcttaaaagattattctctccctctatcttacccttttccaatctccaatcttcatactgtcacctctgttaacaaatgtgcatatgcttcctatttatataaagtccaaattccaaacatttacagtatttcagagacactcagaaagcgtcacatactttaaaaaaaaaaaaaacagccttcatatatttggatgggtttcttgtacattaactgctgccgacactttcatcaaatttagtggcactaacattatcttcagttattattattgacttggaggttatgaagggtataggtgaatttaagaactatgaccttgctctgaggacaccaattaaattttatgacttatcttataagaagctggagtcaaaaaagggacagaataactttttctcccttcaggttgtaatataatttatgaacaaccgtcaggatttgctcaaagcatttctacaatgtaagatattgctttgaagggcmtgggtggcattactgaatgaattctgacctagattcctaagagaagcaggtctcacagctctccgctccttctcagacacgcagtaatctgagtctcaagcaccgaaagctgtcaggatttgtgacctttactgtgagtgacataagctaagccaaagtagaggcagaatgacctcttacctcacagaaagtcacacaggaggtcactttcaggrcaatgtaaggacaggtgccctactgcttctttgccctgcagggcctttcggtttgsctgatttatccaacctcgcatacaccctgctccagtaattcaaagagaactcagtctacactggaagatcaagattggtaaccactggagactggtctctgtgaaggaaaattatgtcagcctgtaggcaggtcagggactgaaagaatcaaatcaaaatggctaaggtttctgcattcttcaggcatcatctgcctaataaatataaattaaataaagttgatttgctccatattgacctttcaatataaatgtgttgaaatgtataaattaggtcacttttgtgtatatatatatrtrtgtgtgtgtgtgtgtgtgtrwgtgtgtgtgtatatatctatatgtgtgtgtgtgkatatatcttgatgcartttgtcttgttatcccaattaattgtctctgcttctaaaaataatttattgtgagayattttcttatttaatcattaattttcagtcatgttataatgttagtaaaactgtttttcttaatattttctcccataatttgcatattgtatctctaatgttctccttttctgttattgtgtctacataaatgttctcatgatgtatttataaactccctggggtttagggaaataaattttacttgttcattttactttgctttcctactttcaggtaaaatcaaaccagttacaaaaaaaatttccaattcaacttaaaaaagcttttcatttgcaatatatttttatttagtatttataagctacttaaagtcagctgatttcttaaggacaatttcctgacgtatgtatgctataggttattacttatatgtcgttttttatattaagctgtataacttgggtttaggaacataacatttatatatttaattatagtatattaggatttatgtttaacccttctttgcctggtcaaaacagctcagtattttgctgacctttatagaattacagatagccatgaaagaaaattccaaggtaaaaattttaggtgggagaaattgtatgtttggactactcaatgtaaattaggctgctggttgttttttctattgtgattttgtcttatatacagtatatattataattcataacaataacaataatgagcacttactttcattaaatgcccatggggctaggttagatgaaagcgccgtacatttatagttgctctgaaaggcttaatctaggccagaacacaatttaagtcactttcagaccatttcttaatgatgcttgagtttccaacctctagctggcatttatgactgagagtcaacaaaaggacagagctgacttgatattaaagtcatatctattgaaggaaacctggagagattctgtctaaaggcttagtgattacctaaacagattctacaaattcaataaggagaatatataaacattttcagatacctctgtgcttattaaatatatatattttaatagcaacttttattaatcctcctaaactgtaaccatttactgtcactcagcttattaagagttgattactcaacaactgaaagacagcaacagagagcaagatgtcagagtagaaaggtagcttctcaccactataagtaaataaggagacccacatggcagaaactaagttttttcaccaaagatctttctcttggggagggaagaaaaggtaagggagcactttctgatgtttttggttgaggagatagagagacatrgttcatttttccttaggagtcatcttacaccatggtcacagggacagctctgataatgatctggaagtatgaactaaggtttcttaggtgagtccaggatggcacaggccaaaataaaattatgttgttatttatcacttaatgatagctttagcactccaaagatgataactttaaaaataattatgcaattattgaaacattgacacttcttggttgttttgggtgcaaatcaaatgctttttaaaattctatgacttttcacaagtactacataatgatcgtacaaaatttattttacatggaacctaggctttgagggattactgggttgttcttttacaacagtgggacgtagaatgtagaaattatttaacagagacataaaagtgaaatctctttggcagaaaagttttctgcttattgggcatatatatattggtaatatgtaattgataagggaagatacagaacatatatgtgcctctatggtgttatcttctccactttgtcacatstwtctttccattattttctaaacaaaacgtatacgcagtggctggtaaggtagcaggatcaaattatttttaattttttcttcatgtcaaaaataagacctaaagtatattcctttaaggatttataaaggtaatatggtaaaatagatacgtattagtcccctttcccagctaaacttcaatcccttgataatagatagatagagtcttaataagtttggagacacaataatgatttaaaatcacacataaaactatgctaacataatctaaaatccccaaaccttattttaccacttaggcttgcaggaagtctggagcaactttatattgtgaggattctcctgacccacaccaggtatcaagttagtgtagattccaggctcagagatccattgatcttttgatcttagcatgtcatttaacaaagttattactctcttttttcctatcctaaaatgaagatgctaattatctacctagaaagattagaggacataatgaatgagtaatcacacaataaaattatgaagtgctatacaaatgtaaggaattactatgacttcattgcttgaaacttaggtattaaaatgtacagtaaacagagaattgcacaaggcagactgccatgtgaagatcaaacagtagcgagctgttttggaaacactttttaaatttcattttctcaaattttcaaatttatcatacctatgagctttaaactttgctgaatacattttaacatttaaaaaaactttttgaaatcagcaataatgttcttagagctgtaaaaacatgatgttccaactgcacttttttataagctttgtacccttttcttggttttattgccaaaacaacccatggaaacaaaagatgcagaaaagatatgaaaggaagtaacgactgctgagcagttatcctgtagatgaataatagacaagtaacataaacagatgcaagcctaacacgaatgcaaaatgaatgagaggaaacaaacagcaaaagcagttacaaagttaggcagtgggagtgggcattcatctatctcccttggaaaatgctccattgctgacaaaacaaagtccttcttcactgtaacataatcattgttttagatgtttctatccttttttgacctagtaaaaacaacaaataaaaaaattattttttaaaaatgttaagacccmatataaagcaygctaacatccttagtttgtattcatgatatttcaataagcatctaaaaattaattactaggtacacatagatataataygaaattccaccatttgtaaccattcagcaattcaaccacccagacatcccacatagagaggattgcctgtaactaccctgcctagattcaacttcacgtccacctctcttctctctacagaagacaacaactttaaccctctgtcctgtaccattttcagaatgatttgctacgatcattgctaagttttatttttattaaatcagaaaatgtactctaagaaaagttattcttgttaagcccaaaatgtagcctggaaattcctggaaactaagtaaaaaatcaaaagtattagtctgtttttgcacggctataaagaactacccaagactggataatttataaagaaaagaaagttaattaactcaccattccacatggctggggaggcctcaggaaacttatagttagggcagaagaagaagcaaggcacagtcttcacatgtcagagcaagaaagagagagaatgaagggggaaactgccaagcactattaaaccgtcagatcttatgaaaactcactatcatgagaaagcatgggggaaatcctccccgtgatccaatcaccttccaccaggtccctccctcaatacatgggaattacaattcaacatgaaatttgggtggggacacagagccaaaccatatcaaacagttttcattaattcttatttctgataaaagggttatgagtttcagagaaattttcctttcaccaacccgagagatatttgtcatatgggtgtatatataggaaacaccaatctaatagacatattcaaaatgtgttaatacaaaaataatattgtgaagttttagtgacatatgtagtaatataaatggcctttaataattatcacctctactagggacaagattattgattactttttgtgtttacattaatattgaatgaatgaatgattaacattccttaaacactgcaaagattatcaagaaaaataaaaaacaaacrtcttgttttttatgttatcttaaacaggcaaattaaaaaagatgatctatttttcggtgccaagataacaatgcattttagcatcttgttgcatatcttaggtaatcatattattgattctactacataaactattttgttgctctcaggcctgtttctgattcatattcaaaataaaagcatgaattatatatgaatgaaaattcaaatggcatttttaaaattaccttgagtaactgtaaaatattataataaaatatatattatctatacttactcaagactgtgctctcacattaatgcctatttggtggcctaggcaaggacgttagtggattgaacacactacattaaagaataaattcctcatatattagcgctttcacagcctgtctcttgaaggaataaaggacaatacacaaaccagaaggaagtcaaaagtaatagaaggaaggaaagagggagaaagggaggaatggaggaagggaagaatgaaacatgaatacattgagcataccatttatagcccatgttgcttgtttcagtggagtcaatttcaccttcacatttatacataaataatatatatgcatataaatacttacatttgtgggtgtatatattttaaacaaagtagtagcatatcacaaatgattcatgtagaaatgtgctaggcaagtgtaacgytggactatggaactttacctgtggtttataaaatgaacctcatttacargaagagcacaaatttaagcaataacagaaagaagtttatccacattccaaaatgattgctagggttaatatgccagattgatttattgatccactaccacattgccaagaaattaagtggaggayaaacatcacattacaacttaggaaagggaaaaagaaaagtcaccacgagaaaaaaaaaagtgcttaatgttaaattctgaaaatgtttaggggtctacacgactgttttcacyacatatttttctatttattttcaattcttgtgagatgtgtgctggtgtgagaattaaaatggctttcatgtgttaagttgttggtttataagctttttcactatcacaggaaagagaaagttggaattgaattacttgtttctaatatataattcatagggggaaaaaatttcacgactttgatttttagaaaattttatgaacttttctttgtttccttcagctgagatttcccagcagttctaaaattatttcacgaaaattacagaactatattacatcgatcagctgtaaaaaatttgattctcgttgaacagaaaaattgttcttttmtcaatgtatatgttgtttcaagttttttttcttctttagtgttattataataactttatgttctagaagacaatattgaaagggtctctggttcatcctacctttgctattaattktcctttttttggcagaaataatagcttgttttttttattaattggaatgaatactctccatttttctatgaaaattgttctgccttccatgcttatttcaaaagtgataagctgtctttcatgttgggagtttacctcttctgaagcttggttaatttgtaataattataattttttaaaataatgattttgaggtattattggttctttcaaatactatctgtaatttgaaaagcctgtaactgcaagacaggtacatcactctcaatttttttcttaatttgcaataaaatacatattttacagtaatttttgacagaaaggaaaataagtgaaccagcttatttcttatttatttcaaaactctgaattattagtagcataaawtgtttktgtgtatctgcgtgtatgtcttgtgcatccatgtgtgtgttttttgcagtgtgtgcgtccatatatgtgcgcacgtgcactaggtaagcataccagaaaggtggtccattatttatgcctatcacatatgttgccactaagttttatagcttcacataacagctaaattagtttcaaggagctaaacatcaatacattgtcttttaagtatgcaaggatagattagctttttaggagagaagttgaagcagaattcaagaaagaaaaacaattaagggtattgggaaaagttgccattttccaatgcccttaactgtttagtggtgctttacttcaggtttccacattacactctaagcaaatattataaacaatatgctgcaataactttgagttgcacatttttatttacaaaactacatgagccactgattttcaaaacagtaatggtcaaatactggcattctacttcacagatgaaacctctgataaaattgatatccactcttgtattctgaaataaagtctcatttctgaagcccttctctgttgtacagaatgaattttgtttcttaatatcaaattcttttgcctgttccaagcaaaacagatggttaagataattataatagaaatggcatgctgagaaaactgtagagagaccattccattcttgtatttttccttttcctctttctaaatgcagtgtagaacagtgcgggacaatgaacaaaacatgcaagttaaataaaagtgatttctagkcttggctccgcagatgtgacctgtggtactcagatcaagtcagctaacctctgtggtctcagcttcttctgtaagatcaagaggaggggtttgtttaccaggtgaccctgttagtactcaggtctaatacctgagaaaggcttcctgaaagaagagaagtcagtctgagagggagaagaagagaaggttcctgcaaaattaaatccaagttacttttttgttgaccaaaagaatttttatgcaaaaggcatttaaaatgagtttcaaacagagagcagaaatgaatctgaaatgcctaccgtatgctttttcagcactttctagcaattatgacaatttaggtggttatgtaaattacacaattcttgtaaaatgatataattatgaaatgttggggtagaaacagaaaaggactacattgctttaaagtgaatactgcaatgatataagatggagaatactccccctacatcaccttttctaagttccatgagattttactgcygccaatagaaaagcatcgaaataaagtaactttctgagggcataaaggttagtaaaaactggatagggtgataaaatattttggaatgattttttgttatttggattcagattattaaatctatgtttgcataaacaattcattcacataaaactattttcaaaaatattattcattccttgcaatttatttggcatttggagtgtttaaaccactggaaaaatatttgtaacaaatatttcacttagcattgcgtggttcatgttttcaagaaggagaggaatattttattgggggatattttactgctaagatacattcaagtagtttaagaaccataaatatacacgtagtatatgtgtttgtaattttcagaaatcttacacttacttttggagaagagtgtatgaatttttttttcttttaaatctgtagttactatcttatacttcattccttggtcaattagcacggacaagggttcatgcaactgtgtttgtgagacggaggagaggattcttttatctttactacttaggtattatgttgaatttcaaagtccatcacaaggttccttactttttctccatagctgacagtttcatcccaaggaggcaaagaagaaagaactcatagccagaggtttgtagctcagaagggcctgtacttgccaggcaagggggaccacaragataccatgccttccaggcatttgggactattttgttgaatctaaaacaggtgcacttctcactctgagctttagggttaaaactgcctttgccaggcctttgtttagttaagtggaattgtgatgtgaggagtgacaaacagaagctttatttccggctttctctcactctctggggagtaggtgtggagtgggaggggggttgagaagtgtgtggctcttctcttcttcgacctgtggttgcaccccccacacactccctggactctggtttctctgctttgacagttggttctcaatgatgcagataatttccctcttggactacctgtccgccctttctcccctcctccacgcagctatacttcatattctcagatgataatgatcatctttaggcaatttatagaagtgtgtagaaaaatcatttgaaaacattcctgctttatcaaccttccttcaatgattcacttcacagcacgtctgactaagggaagagtcattagtgtggagcgtggactgccagtgggggacattatccccaatcacacccactttacgcttgcaagatagcaaaaaggaaattctgggactcaatttataggcaagaacaaaggacactggcatgaaatattgctttacaaagtagcaamtacgaacatcctcccctggcaaagaaaaagagagacagagagactttgacattgctcttcagtcagagttgcttcagacagtcccatttgtcattggatcaccagactagggtggggaattgtctgaaaattgtttccccaccacttcctttctatgtcccttttttctttctttgcctgtgcatagcttaaggcaagtcccttcttatacataggcttgcattgtcttgagggatcttcagtgtgttcccctctgtcttccaactcaagccaagacacctcaagaaattactctctttttgcaaccattcaggcaaaataacaagcatgaataataagcttgaatagtctttgtgtagcaaaaacaaaatgctatttcagagtgaccagcagattcttcctgatgctctggatgtagtcaagaacttaaaattgttggagattggaaattgacacattagagcttgtaaagaagttttgcttgtagaatagagcctagaatttgtcactaaaacagacagattcatcattctgggagttgctactttagtgagcacttttttgtcttacaagtacctcttcattattttgagagcaatgaaaccctaagctagtaaaatgataaaacactttacactaaatattgttttctaattagtaacacatttggggtgtttctaatcagactgtgccctttaaaaagttagtttttttgctttctgaattagggatttgagttagtcctgagtgcatgctatacgctaggtagtttaagatggaatcacacaaattttgagatgcatttggttcactcttatgattctcttgcttttgtctccagggtctggatatagtgccatgagattcttccctaaagcaaatgcatggtcatatggccaatcatcctaagttcaaaacaaataataataataatagtaataataataataataagccaacctttaacccctgaagagattaaattcttttttttttttttcactaacttactctagattttgtgggcaaggaatttcgagcagggcagccttttgcctaaaaagacatatggattctaaaacaccaaaatattgaaggattgagtacaaaatgggccagtatgtaggggtctctgagaagataagacagatggattctagggagcgtgaatgtctaatctcctttagccttttacaattcttcatttaatcctcttatattactcttagatcttcacttcattttatcccatataggagaggaaaagagggaggcaaaaggatatgagaggataaaagcaaccggaagtggtccttagcaaaccgggatgggccaaccatctttgggtcttgaaagcattcctaagaattctcagaaagactaagaggaaaatccaataaacacatcaacttctctcaaacccaccgaatgaggctttagctaagttaaacattacatagaagacttgattactttgggatatttgaatactgttactgacatacttcaatcacaaggtattttttccttagaaatgtcaaaacttcacatcaattcaacttacttttcctcgaaaatcaataaagatgaccatctttaatcagaatcacattaaagtgaaccttcagacactattagggaatagaacacagtatgagttttatttttttttctgtatagcagaaaattaccatccatttcataccaaaagactatatataaatatatgtacacacacacattcacacacacatatgtgcaattacactcatacatatgcataataataaacatatacacacataaaatatgcataattttataatatggaaattattttcctgcagaaatcttttcatgattttctgatatatctctttcaaatgctaataaattatttttattaaatagttttttgtagaatgttatcagaaaatataacgtgaactggacagtcattaaaaagcatattttgggggaggccaaggcaggtggatggcttgaggccacaagttccagaccagcctgggcaacatagtaagacctkgtctctacaaaagattttaaaaattggctgagcatggtggtgatgcaggcctatagtcccagctactctaggggcacaggtgagaagattgcttaagcccagaagttcaaggctgtagtgagctatgattttactccagtctgagcaacacagtgagaccttaccaagagaaagaaagaaaaagaaagaaagaaagaaagaaagaaagaaagaaagaaagaaagaaagaaagaaagaaagaaagggaaagaagaaagaatttttaaccttgcttaatacaattcgtcagccaacaatgaacaacagagacttagggacttagcccttgtcctcctggaagatcacagcataatagtagtcaagacacaaattataacatagtaattatttaattgttgtgaaaatatttataatagtcttacatgttaagaacacatctcatccggtaggagaggaagaaagacttccctgaggtamtttgacttagtagtaaatatggagagggtagctttccagacagaggtagtaatgtgtataaagattactctgaatagagaatggttctttatagaaagtgaaatgagcaaagtaaacaaggagaatgaaaagagataagactagtaagaaagatcggttgatctcagaagcttattctaaagtttaaactaaggttttaaagtatgtttgartctatagagtcataataaaatgtggcaatgttacaataattctcttattatatgcgtttttcacttgaaagagtttagttattgctctatcttatttgatggcattgatttctactcctgttttttaatttgtggagtatttttgactttacagtttacctcacataataactctttaattaatgaaattttaccataacagcttttgaaaacatacaccatttttcaggtaagagaaatttttccttcagtataatggcatttaccccaaaaatacactaagtgactaggccatgctaagtattattttgacatcatggtttcaggcaaaaaaagcattcatcaatttatgtgaagtcacattttctagaaagagaaatcatatggaataaatttgaattgtgtgtatttgccaagtaaaagaatgaagacaaagtacttcagtttattgcacatgaactctacttttgttgttttgaggcactcttttgttaaatatttgttttgccctaaaaatgttaagttcaggtttagtacaaggtaagtatgagcccataggaagtaacaacagtagaaaaaaaggatgcaacaagacttttccaaagaccaactctttttcgcacctcctccaccacaaatctttcactataaagcagttttaccttttggcaaagataggaaaatttcattacattgcatttatgtacaaactacattgacttttgcattattgttattaatacatataaaatttgtctaatatttatttttacatgtttttctatcagttaaaactatttggttatcttggcatggacggaatatatcataatttatmctgttacacttaacaaaatattttatttaacaactttatgcttagagacagatttcttgggaatgaaggatggtcattgatcataagtgtattttgtaattgttgaaaaaacaatatccctaaagattaaccccagtaattttctccccagatagcttaattttctggcatttctatagtggtataaatttcatagaaacaaataaataatgctacagacatraatatagatacacgtgttcatatatatccatatctattcacgtatgcagtgcataatgacatttcagtcaatgacaactgcatatacaactctagacccatatgattataataccgtattcttactgtactttttctatgtttagttatgtttagatacacaaataattaccattaagttaccattgcctacagtattcagtaaagtaacatgctatacaggtttgtagtaaactataccatctatatttgtgtaagtacactctttgatgctctcacaatgacaaaatcatctcacaacacacttatcagaatgtatccctgttgttgagcaatgcattactgtatatgagtgtatgtatgtatgagtaatactgaccacatattataaacacaatatagaatgtttaaaattggaaaacttctctaacaaagaaataatcagatctgctggattttatatataagtaaattaatttgggctaatgcaaaatttgttctgcccytcttttgtagaatagattttctcatacatatacattggttttgtgtataatttcagcacagcctgctcattttcttaatgaaatttatatgttcaaatttactgtgagtacttctaaatgctattcttaattcattatcaccattcacagcaaattatttttgaacacacacacacacacacacacacacacacacacmgaaaaaaaactgatgctaggtagttgaagctttactcttctttggtgatgacagaactaatgagttttgagacagaaaagaatacattttttgaaagtgttttaatatgtccagagcaatggtagaggttgagtatttatttggccctgaaaatcttagtgttaatttctctcatgattgattttactgatcgctacaaaattcaaaatcatctaccagcttcacttttgctcacatccattagttttgggcaaagccagtgtgctttgtgggtagtcctgtctgagtggcattatgaagcagccagtgtagcgctgtactgtgtgtgtgagtgtgtgtgcgggtgcgagtgtgtgtgtactataaacagctctaaaattgttttcagattactcatattaaatttagtgtctcttcaagttagagtcttaggttttacaaaacaataatgagttgaaactcccattcacaatagataggacacttcagaaagttacagcaactaaaataacaataaataattaatttagaactggttgcagtgggaggtggcctatgtgccagagcatgtccagcaacaactttgtctttgtccttcactgttgtcagcctcttatttccttcaaagtgaaaaataataacactaactccagctgtttctaccctgtgttctacaaacctaacacgcaccagttgtaaaaataaaataaaaataaatgatgaaaaatcttgtcatcactggaattagtgagacacagaagctgatgatataataaccctcatcgtcaaagccagaaattctccatgattctggaattgagttctctgagcctataggataagatgggttaaactactctatactgtagctagttcagcatagacaagggcttaacaaatgccatcttaattgatattcttgtcagacacagctgacaacaataacaaaaatcttgctaaactattttattttatattttcttgtggcatacatagtcattcagaattctgaacatagatatgatcttatatgcaagagataaaagagaatagataaaattttaataaaattccacatcttaagtgccctctcattttgcctgctgctttttgttttaatgaaattatgggtaaatgttatcacataggtatgtgtgaaatatatatgccattatgtgcccttgttccatgcttttagtatttgcatttttaatatactccagcacaaaggactaggccaataaacaagattgctgcctccttctcctttctgcctccctccttccttcttctattttctgtgtaattttgtcargataaagccatataagttttagttataccatatataaaatagaaatttagatcacttgtatgcctggtagattgactttagcagatcctttttggatactttcattatgatctattcttttcatttgcattggctagtttgtttggctgtttctcatagatttatctggtagtttgcatatttaggaaatgttttgcaattcaaacattagccactatagtcatttgagtaagaatgtaggaaaagattactttccaaagtgtgaatctagttcaatttacagtgtggtgtgcatgaagtttgggcaactatatatattctcagaccctccaaagtgaaattttttgaacaaaagttcatcaggattgtgaaggaaacacagtagtgtccaaggtagaatgaaccaaggcttggaccacctgtattctaaccctggacttctcatcaaatagctgtgggccttgagataagtcacatatcctttctggatggcagctttctcttaaaacaaacagacaaaaaaatgagattcttgcctggtgcggtgcgggcacctgtagtcccagttacttagaaggtggaggtgagaagatcgcttgagcccagaagtttgagtgyagcctgggcaacacagtgagacccccattaaatagataaatgagattcttttttaaccacatgacttgtaaactactagctttaaaattatgtaatttaaagtaaatgttaaaaacagcagaaattcttcattttgaaaagtaaccacaaacatgaattgcaatcttatatgtgttatataattgattcatttcatgtattataagttaaatgaaactggatattgataaatatttgataattatctgaaaaatttggccaacatagatttagtgagctatgagatacagtttgatatgtgtatgaatcataagataattatgaaaatctttatcatttcctctagggaatcttaatttataatcctcaaggaaaatagtcatgatgttaaaatttaaaagagatattgcagaatgccaattaaaatacttcattgttaaagcaatgtataattgctttaattttaaagaatatattactagaaactgtcttttctctttaccagtttaattttcacatttcaaacctaaataatctacacgcctttaaaaagtcttagagtcagaaggagaaaaaacatatctattttgcttacatataatcctcttagcacgcacatgccagatggtgtttcatatcaggtcagaaataatgaaggaatctggctttaaatctaagaatcaagaaaaaaaatgagtaactagggattatatgtttgtaatagcatttttccctgaaattcaaccatttataataatttctgataggcttctgtctctgtgtgtggatttatttttacttatttcatttctattataccttcttgggattctgacaggttatttattatgtgattggacattttctcaatccttggatatctatagctaaataataatttgaccttcagatatttcaaatggaaacttactaactagtttggaaactaggagattggtgacttatggggaggcaaaaataaatagaaattctaccaagcatagaggacagtaatatttttaaattcattttagagaaattaattataaaattaaatggtctaaatttttaagtagtaaataaataattccctttatataataatagcacattttmttatcataaatttgactgactatatttaaagactaaatttaggcctttgtgtggtagacaaagtagaaaatgatactcttaattaatccactaattgttattttttttaaatctctatcactttttaaaaatatatcctgtgattgtctatatcattaacctgatcaaaataacccatcacaatattccgatcactcttgttaatatctatatataagaattatttgcttatgtggccttagccacattcaagctataaaaaaaggacaaacatttcattaatacaagtagctagattttttaaaaagtaaaagtttctctttcaacataaggagctctgtggacccactccttggtgaaactgataaaaaccgctttaagaaagtgtttaagtctctctacatggtcttatggtcttaggggcaacaaatctctggaaatgttccttaaaaaggcacacatggatcatgtaatgaataaataaataaatatgtagtcaagaaaatctattaaaactcttgagtctcccatactcagcaactaaagttagagtgtcaggcagaaagactgtactattgtccccatgccagtttgaaggctgtcagaggttttgcgaagggaagaaacagactgcaaaacagaaagctccatatctcttcccacaggaactgacttaatttgtcatagagtgtgaataagttcaaacctaagggtgctttcaaaaacagtgaaggtaatgatgaaaggcaattggggggagattggtggattctttggaaatgcaggctgcactgtaggctggctactttgctggagtgaaccacgaatagaggcaactaggaagtgtcctcctaacttcaaaacatatctcaaacaccgacctcaggaactatctcttcaaataatcctgaatttgattggatctgttggtcaagcaatctatgcaccagggcattgttaaaaacaagagcataagaggctggtaattagtgaaattgaatatggtcaaagaaagagatagtcaaagagtgtcctgaaaaagtcactatcattgcagggcatatagccaaggttgtattcccttaggagcattattagaaacttcacaccacaagagggaaaaatggggcatttggtggtggtggtggactagaattcacaaagataagccagacagtcacaaaacaaacaagcaaacaagtcccaatgtgagtacccagaatagctaaaatgctttacctaaagtgtcaagtttctaatacaaaagtatggtacctgaagagaaaggaaaatctgacccatacacaagggagaaaaaacaggcaacagaaactacctgtgattgcaagcagatattgagttaaacagacaaagccttcaaattagccattataagtacacagaagtaagaaatcatgattaaagtaaagaagagaatgataacaataacacagcaaataaatgctatcaatacattatacataaaaatagaaactatttcaaaggaaacatttaaattcaagggttgaaaaataactgaagtgaaaatttccctggattgaagtggcaaagaaataattaatgacttgaaaattgatcagtaaagattatataatccaaacaatttttaacaatgaagaaaaatgctactcagagaaatattaacatattgcaagatggagtactagaagggaaataaagataggaggaagcaggagaaatattttttaaaaaggctaaaaactacccagctttattgaaaaatattaatatacatatctagtaaggctaacaaactccaaataggataaacgtgaagaaatccacacatacacacatagtaaaaatgttggagacattggaaaaaaatgtcctggaaaaaaggacctggaaaaagacctggaaaaaaatttagaaacagcaagaagtaacccccactccataaattccaagtgaatttaaagaaaactaacagatggcttcccacctaaaacaatggaggtcagtatgcaatgagatgctgtatttaaagggctgaaagaaaaaaaaatcaaccatgaattctgtattgatcaaaagtctctcataaatgaaagcaaaataaacataatcccaaataaaccaaaactgagaaaatttgttgctaactcactcacgttgagtaataaaggcaagtgtgcaggttgaaagcaactgaccccagatattataataacttgaatccacattataatacaaaaggcactgatatagttattgaattataaaagatagtataaatacatattcattgcccttttttatatatattattctttgagcttcagtaaaagatacaaaattatataatgtaataatgtaggaaagtaacgtgtttgtaacatttatagatgtaataggtataaaaatataaaaattcagaaaggaagttgcattatgtaggagtagcagttctatatctcactggaattatgttagtataaatatgaagctgattctgataagatgtagatggtaagccctagagccaccactaaggttgcttaagaagagatagtaaaaagatcattaaagtaagataaattctgcatttgaaaatactaaatgcaaaagaaagcaatagatttacaacaaagacatcagacttatagaaaacaaaaattaagatggcagacatgaatccagccatatcaacaatggtagtaagtgtgaatggattaaataacctaatcaaaggcagagattgtcagaatggggaggaaaaacaagatctatttatatgctctcttcaggggacacactttagattacaagataaaaaatagattgaaagtaaatgactgggaaagacagatcatgcaaacagcaatcacaagaaagttggagtggttatactgatagagtttaaaacaaagaatgataccagagataaagaaggacatttaataatgatcgtcaatccttcagtaggatataagaattgtaaacatatataccctaacaacagaaaatcaaaataaagcaaaaaatgacagaagtggaaggagaaatagacaattcagtaataactggagacttctatatcccactttcaaagtggtagaataattaggtagaaataacaaggaaatagaacattggaactctgtgaaccactgtatgtgtatcagcatctgtacaaacaccaatataataaatatctatataacatttatataaaactccagccaacaactgtagactatgcttttcttttcaagtgtacatcaaacattctccaggatagaccgaatgctagcccataaagtaaagctcaaagatgaaaaataatacaaaacatgtttggcaacaatggaataaaattagaaatcaataacaaaagaaatatgggaaatttactaacattgaaaattcaaaaacatactctaaaataaccaatgaatcaatgaagaaatcaaaaaggaaattagaaagcaccttaagatgaatgaagacgtaacataccaaattttggggatgcagtgtttagagagaaatttgaagcactaaatgtaagcattaagaaaaaaacagcttaaataaatagcctatacttcaatcttcagacactgcaaaacaaaaaaagaagagcacactaagcctgaagcaagcagaaggaaggaaaaaacaaagattaaggcagaaattagtgaaataggraagtgaaaaaaatataaaaagtcagtgaagccaaaaacaagtttttttaaaagatcaacgaaattaacaaacctttagctagattgaccaagaaaaagagaagattcaaactagtagaatcagaaatgaaagagaaagtattactatcagcctttaaaaaagaaaagactataacaatactataaaaaatttaatgccactacatcagataacttacataaaatgaacatactcttagaaagacacaaactactgaaactgactcaagaagaaatggactcaatctgaattgataagtgtagaattcagagtagtaatcaaaatctacccacaaagaaaagcaaagacccagatggcttcactggcaaattctaccaaatgtgtaagacaaaaaattaatatccactattcacaaacccttccaaaaaatgaggagaaatactccctaattctatgaggccagtattatcatgacactgaaatcacataaagatataacaagaaaagaatataacagaccaatatttttatgaatatagatgcaaaaattcttagcaaaatactaacaaactgaattcacaacatataaaatgaattatacaacatgaacaaatgatatttatcccaggaatgagagttggtttaacacctggaaatcaatcaatgtaatgcactatagcaatagaataaaaaccaaaaatcacatgatcaactcagtacacacagataaagtactcaacaaaacttaacaatttttataataaaaaacattcaacaaactagaaatagagagtactcaacctgataaagggcttctatgtaaaacccacaactaatatcatacttaatggtgaaatactagatgctttattcagaaataagtcatggatatccatttacatcacttttattcaacattgtgctggaagttccagctagggcaattaggcaagaaaaataaataaaaggcaaaaaaataaataaaaggcatcagattgaaaaggaagaattaaaactatttctatttgcacataacatgttcttatatataggagatcttaaggaattcaccaaaataatattagaactaatcaatgagtttggcatgcttataagtcacaagatcaataggtaggaatcaattgtatttctagacccttgcaacacaacaaaaaatgaaattaaaaaaaaattttattatrgcctcagaaaagaataaaatgctaaaaataaatttagcaaatgaaattcaaaactgcaaaacatcattgaaagaaatttttaaaaattttaaaaaattaaaagaaagaaaacatttgaaaattgcaaaacattgtcaaaagagattaaagaagatgtaaataaacagataaacatcttgtgttcatggattgggagacttaatattgttaacatggcaatgctcaccaacttgatctacagattcaatgcaatcactatcagaatcctagctggcttctttacagaaatcaacaaggtgattctaaaattcatttggaattgcaagagattcaggccaaaataatatttcaaaaagattaacaaagttggagtatccacattttctgatttcgaaaaaggagtacaaaccatgagtaatcaagacagtgtggtagtaacataaggatagacatatatatatatatagcatagaattgggagtccataaataaatgcatgtatctgtggtcaactaattttagataagagtgccaagaccatttaatggagacaatagtcttcaacaaaaaatgctgagacaactggatatctacatacaaagaatgcagttggactcttatttcgtgctatacagtcgttccccacattaacaatgctttagtcaatgatggactgcatatataatggtggtcccataagataataataacttaattttactgtacctcttctatgttttgacatgcttacatacagagatacctacaattgtgttacagttagttgtctacagtattcagtacagtaaacatgctgtacagttttgtagccggggagcaatagactatcccatttagcctagacgtgtagtagactatatcatctatatttgtgtaagtgcactctataatgttctcataatgacaaaatcacctaatgatgcatttctcagaaagtagtccactcattaagtgacacatgactgtatagaaaaattaactaaaaaataatcaaggatgtaagtgtaagatctaaaactataaaacttttagacgaaaacaagggtaaatcttcataaacttgattcagcaatggattctcatatatgatgccaacagcatgaacaacaaaagaaaaaatatgtaaattggacttcatcaaaatttaaaacttgcatttcaaaggactctatcaagaaagtgaaaagacaacacaagtgagagaaaataattggaatcatatatctcatagagacttatttctataatatgtaatgatacaactcaataacaaaaaataaatagcccaattamagcatggcagatgtccttaatagacatttatccaaagaacacatagaaatggtatatatacgtatagaagagatactaatcagcacatgcaaaggtgctcaacatccttagtcattaggaaaatgcaaatcaaaaccctaaagaaataccactgcccacccattagaataaaaatgtcagataacactaagtgttgccaagaatgtggagaaatcataacccttataccctgttggtcacattgtaaaatagtgctgccaatttagagaacattctttcaagtttatcaaatggctaaacatagatttagaacattgactcagcaattccaatcttaggtcagagtccatgaaaactgaaagcttatgtctacagaaagcctgtacattaatgtttaaagcaacattattcrtaatagccaaaggtcaaaacaatcaaaatgccaatcaggggatgaatggataaagaaaatatggtatattcatacaaataaatgttattcacttataaaaatgaattgagtactgatgcaaactagaacatggagtaaccttaaaaacatgctaagtgaaagaaggaaatcacaaaatactacatattctatgattccatttgtatgaaatattcagaataggaaaatctacagaggcagaaagtagatcattagttgctgggagaatagtggactgagggtgagaggtgggggattggagaatacagcagcaatatctaaaagatacagggtttcttcctgaagtgatgaaaatgttctaaaatttactgtgatgatggttgcacataactttgaatatactaaaaaaaactgaatttcacactttaaatgggtgaatgatatgtggattacatttcaataaagctataaaaaaaaactctgtcccgggaatggtggttcagcttctttctcaaaggatataatgtaatattttagtttagaaagtccataaatggacaaaagtatgatcagcttccccttatcttccttcaagccatctcttattcattgtaggcaggattcactttcaaagcagatcaggtattcatttccattagcatttggcctttggtcaattcaaagcacaaaaagagcttttgttggcagacaccttagaccaccaacaaattcacctatgaggttaagcaaatatcattgtggttttcactagtttttcattagaaagatatttttatttaactattgaatgcttttgcaagatggtttcagtgtagagacaaatagagtaatcttgatcaagatgtatctccttttaaaactatgaccttgtaaatatgacttcaagtatcatagctaagttaagctagaggtcaagtgtatgatctgtttggaaaatatttcaaattccttctccatttcttttcctcttctctattttgaacacatgaatactggaatacctcgtattgaaactgattattcttttctctcaaattttacataatctgaacactttgaaggcttaagtgttatgaacacgaagtttcatctgggacatgtgtcttgttttcatatgaatctacccttccaaataaagcttattttattttaaagccaaatgaaagctaatatttgcatattagtaatgaacctactaggaaacaaacaagttaggatgtcctcagaagggtttatttacaaaggtatttattattacaaaagtatggacaggaccatggattcagacgcaatagagggacaccatctagacttcaatggacaaagaaagaaaagataaaaagtgagaaagatggagagtcacctgtcttgaggagagcctaactttctatcaagcaccggtacattcattaagcccatggtgacctcacagggaaagcgtaagggactagatagtttgagctccatgtggaaaatattcatacaggtctatatgtggacgtatgattttttttttcacttgcatctcacttttagcttgttttgaggcctgttcttctccttctcatgtacgttctagttttttttttaatttcccgtgtaactggtcagcatatgacttttatataaacctggtataattactcatttcaaaagtttacagtggtcttagagctttggaatagttgagaacacttgtccagataaacaaccaagaatgatttgtgatgatttttttctttaatgttactaaaaatggaaaaagtgaaattatacagattgcaactggaataaggtactggcttcagagatttgaagtctaggaaaaaaacccacgtcccaaggaagcaaacaaaaatccaaacattaaattcaaataaaggtagaggaaagtagtgaacaattgttcacaattataaaaagtattactgaaaaaatattacttatagataaaactgaattattctcactttaaaattttaataaataaataggactttagaatacttaggcatctgctttagatacactctggatctctaggagttccttagagactagactgtctggccctttctcttgtcatttgatgtgaaggccagggaatgaagtggctttctcaattcataaagtttcattcagtgtgtgagatgaaacaagatcctagcttagaggttcagaaaaacttttaaaactatatatttgtacatttttcttgttcagtgtactacataaaaactgataaactgtatagaaaataaattgttggaaagaaacaaaaaatcattcataattctatctactgaagacagtgattaccaacacattggtgtaagtcctttaaaagacctttaagttattttaagaacacacacacctccctccccacccacacatacacatacacgttgacaaaagagggaacttgctatatggttctttttttttttttttttttttttgagacggagtcttgctctgtcacccaggttggagtgtaatgtttcaatctcggttcactgcaacctccacctcccgggttcaagtgattctcctgcttcagcctcccgggtagctgggattacaggcacccaccactatgcctggctaatttttgtatttttgttggagatggggtttcaccatgttggccaggctggtttcgaactcctgacctcaggtgatccacccacctcggcctcccaaagtgctgggattacaggcgtgagccactgtgcccggcctgctatatgcattttcatagtcacctttttattctataatttgggttcataataatatttaaaccaaatttattactcatgacatataacagtacactagtgtgaccttgaaagtccaaaaaaacttagacatggctgagagttgagtaatagttactgatatttaccagtgtcattttatttcttctctaaccacattccttatctccacttctgtccagattaaaaagttaaagtagaaaaaatttaaattatttcttcttcttgttctatttcataacgtgttcatattatttccttaatggcatttgttatattttacaatcgtatatcttcatttttgttttaaatttgttatactcattaggccataaactccaggaaggcaagaatgttatctgcttgttttcaactctttaaagttctaacataaaacttggtatatagtaagaggtttgtaactgtttgtgaatgaatctgaaaattaatctgcttaaagaaataatatccaggccatatatacaaagtggcaaacatacagagagaaacatgcttaacattgtataaataaatttttttaatgtttgacttttgtgaataaaatgcatacctttcaaatcttgtctttttccatttgcatataatttcattgcacagagaaataacactggttactaattacacttctagttactgttattatcttggagctccaatcctaaatcagaatggctgatggcaaatcctacctcaaccatgaattaatttaattaggccagttacttaactctgtgtctcggtttcctcatcggcaaaatgaaggtaataccagtagccaccttatgagagtaattgaagattgaatgagataaaacgtgtaaaacatttgtatgctaattgtacttattatagattagtggttatttttactattattaccatctttattattatttggaatacatctacatgacatagacttttatgaaatttgaaagggagtgtacgtgcaagagatgggagaggaagaatgaataatatttatgcttactatggggccctgcattttgtggggcactttataaatacattgcctcttttttacccttgagactaatgtggctcgaaaaccttaattttctcccaggttcatcattaatcaccttgactcacatgcatgcctatactacaggttcctttcttatgggattgtttatatttgccctagattgccatattcttcctgtttattctgtatgagaaatctcactacatctctcagccaccaggcaagagtccatgcttttctcaagaccactcaactgctgcctccggtcataatcattgcgttcatgcttttgtctgttcatttgccatcaggatgagtgtaggtacttacagatcagctcctctatttcagcatgaacttcttggactttcacttcactgcacatagacagtgcttactaaatgttgagtgggaggagaagcaatggagtgggagaaggagggaggagcgaatggaagtcaggacagtactgtgtgactctgactctaaaactggtgaggcaggcattggccttctcaattcagtactgtattcccttagtcttattcatttgaaattagcttaggtgatgacaaagaagctgtttgggcatttagttttcatttggtatttttgaaattgtgctacattttgtgggtgaaattatatattttcttcctaaacttttccttttgaaacttcattacttgctttgttgtaattatgtaataggagagagcaggatagaggccaaaaaagcagttttttaagattattttttctaattaatagagcaaaatatgtttgttggagaaagaaagaatagagaaaattaaaataactaaaataagaaaatgcatttatccccttatccagaaataagtaccatataatatttacatatattttctgcctaaactttttcttttcttttcattgcagtttacaaccaaagcagattttttctccttatttcctaaacattaaatttttctttgttaaaaaacattaatttgaaatagcacatggaattttttttctaaatgaatgaaatccccaaaagaagaaagagcgtgccatatccaagaaagttaaaagctaaatgtaagttgaaaatgaagacaagagtgtcaacaaatagagctagagacaagattatcccgagcatgtaggccctgtcaagggtttcaagttttatcctaaagacaattggaaagaccaagtgtttttaaggaaggaagccatgtgatcagatctgtgtttgagggargctgagtagacttggggagaccagttaggaaataattgcagctactttgaactaggatggtggcatcagagatgaacaaaagtgaaagtataaggagtacttgggaagagataaatggcaagagagaaaaagaggaagaaggaaagagagagaacgcaacatgtaaaacctcactatactaataactagggaaatgcaaactgaaataagataccttttttcttttattttatttggaaaaaaagaaacatttattactatcacttattggctgtaatgtgaagaagctgatattgttcagacttgtatgatgagagggtaaactgtatcaccgtcaccacagttctgtgaaagctggtggaaggcatgagaatcctgggccagagataaatttagtttattactcagagcaataacagcaaccagaataatcagcatttttgcactagttcctgaagtcccagttcccacaggatgacactaagggggccaggtaacacctgcttctgcaatggtttgcatcataggagaagaactccaagcttaggggaaatgctattatactgaagagttagcataccttccccttgctccagagggagacatgttgttttccaaggctgttcactctacatctttttaaaagatattatggaataaatgacagacgatgctttgcttcccagacatacagaaaagtgacaaatccatggagaattttctcccagtaccacttgggaatgtaatatgtcaatatcttttcaatctctatttctctatcttgagaatcattcatataaggagccatgcttgaatatattcattgcagcattgttaacagaaaaaatgagaaagcgcaactttaaatagaagaaactctaacagagggatatatatactgtggtattttgggcattaattaaaatgaatcaaattgatatatatacgaaaatagctttccaggacatgtttttgtctgaataaatcaaattttagaatgtgttaccatttttttataaaaattgatatacaaaactgatatatttcaaattgaactggtacatatatgagtataagaatagacaaaaatttgaatgaatatatttcataattagtattacctctgtgtaaagaaagatgcccaaggattaggagtgatgatgaaaggacaattattgccattttttataaagtacatagtcatgtataatgtttamgtttttaaaagttaattggcaatacttactaattgatcgatttggaaaaggaacaagacagagatgtcaaaaatggtgaattatctagcttaatcagttagatggatggtggtgaaatttggaaggactaggtactttagaaaaaaaagtattttggtggcaaagagaacgatgagttagattcagaagtattagattcagatgttgaatgaatgatttgatgctagggcttgaagtttaggaaactgatttactctaagctggggattaaaatgtgtagctcatctgcaagatgatggcaattgaagccgtattggtgaatgagaatttctaaggaaaaagtatagtgaagagatgactcaggacaaatccctgcataattccatccttgaattgttgaatatggtggaaagggaggccaaagaaggctaggaataagtgtccagagatgtagaggaacacaaaacatgagagtaaaatcacaaaacatgagagtaaaatcacaaaacacgagagtaaatatcacaaaacatgagagtaaaatcacaaaacatgagagtaaaatcacaaaacacgagagtaaatatcacaaaacatgagagtaaatatcacaaaacatgagagtaaatatcacaaaacatgagagtaaatatcacaaaacatgagagtaaatatcacaaaacatgagagtaaaatcacaaaacacgagagtaaaatcacaaaacatgagagtaaatatcacaaaacatgagagtaaaatcacaaaacacgagagtaaaatcacaaaacatgagagtaaaatcacaaaacatgagagtaaaatcacaaaacatgagagtaaaatcacaaaacatgagagtaaatatcacaaaacatgagagtaaaatcacaaaacatgagagtaaatatcacaaaacatgagagtaaatatcacaaaacatgagagtaaaatcacaaaacatgagagtaaaatcacaaaacatgagagtaaatatcacaaaacatgagagtaaatatcacaaaacatgagagtaaaatcacaaaacatgagagtaaaatcacaaaacatgagagtaaatatcacaaaacatgagagtaaatatcacaaaacatgagagtaaaatcacaaaacatgagagtaaaatcacaaaacatgagagtaaatatcacaaaacatgagagtaaaatcacaaaacatgagagtaaatatcacaaaacaygagagtaaaatcacaaaacatgagagtaaatatcacaaaacatgagagtaaaatcacaaaacacgagagtaaatatcacaaaacatgagagtaaaatcacaaaacatgagagtaaatatcacaaaacatgagagtaaatatcacatagtagaggctaaggaaagagacttcatgaggaagtaatggtcacacgtttcaaatactgcaggaatagctattaggatgatgaagccctttgattttagcagcgtgaagatatgggacctatacaatttatatgatacagtctcatgaaatgttgaggaaaggagccagatttgaacagtttgagaggtgagtaggagaacacagtgaagaaacctataaagatgtttgattgtgaaagaacaccttcaccctggggaaggtgatagctgtaggggaacataacatctacagaggttttctttgaagaggattgcaagtggatcaatatattcagatggcaaggatacagtggagagggggagtgcatgcaaaaatcagggaaatgtgggtgtataaagcaggaagagatgggtttgctttataaagtcaaagacagaggtgtcacacatctatggtaacaggaagcagagaggaaaggtaggtgctggtttatgtagattcttagatggcagactgctaaagcaatcccactgattttctctgcattaggtgacacagtcatctcttgaggtgagaaagatttgaagacttgaagagagggacataatctttgtgttgttggacatgtgagatttgatgttgcggagactaatggactgatgatctccaccattctcacccgaccacattgattcattctgaaaatcaggtgcatgttgagactttggattgagccaagtcacattaaagctctgttgtgattctggcaacatattaaaaccctgttattttcctggaaatgatatttagaaataggattttaaaatgaaaagttaaatgtctgcagattgtgcacatggatatgtaagtaactaaactgaaaggacaaagcagccatcacactggagtgctatcttctaattagtcttgaagagttggctggctgcctgtgggcctgaaatgaattcctgtttgcctttgtattgagttaaagagtcaggcatttgcccccagtaacggaggcattgctgcttcttgcttggccattgcaccaccagatgtatcatataaatactctaatggatagtggtggactaggaacataggagataatctgatgcaggcagatgctagcagtcaagattactcaagctgtattgaaatttcctttgcacctggcactggaggtgttagccatgccagttcaatccccccaacacagatgttcttgttgtaccactttgtatgtataacatttaggtttctgttcagctttgccacagtacacataaatactgtaatccaaagaccacccatttattagtgcacctgcatattcaaccagatttctttcattcttttcaatgaatgctcaacattaaaaaaaaaagacagccatagggtgaataaccttttcaatttgccagatagcttaacaaaatgataatataatgataaaataacaataccagagcccccccatgcaaatccactaaaacagtgttgccaaaacatgaaaataaagtgaactctgtttaatcaaaaggatattttattaacttatgtctgaagtttttctttatttcttgttagggaagatagactatttaagtaggttattttttccaaagataaacgcttctttttttcttcaaatgggagattggtaaagcttacctcttaaggggcagattttgctgaatgtgaacctctggagcccccattttaaattaataggagtggagctctgtgcagctgaagactgcatatgacctcctgaatataggataaaaaaacctttggaaggagacaagatcattactccagagaatagccttgtgtagttgctgtcctactgaagtggagaaagggcatccaaatgttttgatcttgtttttatagttgcaagcagtgtctgtatctttccaaatacccaatcttgtcgtatatatctctctatgaaaaggaatttcaatgctacttaattttggtttagggggagatgggactgactttaattattcatttgaagcaaataaatgtttaaacatgagatacaatttaaaaattgatgaatggtgatggttttttaaattkggcgttttttttttttctatcagtagtaatagttactcaggcttatactcatgtcctcaatatataaggactgcttgtttcccactcagcatctagctataattrtattctgtttgagacatgtgccstacaggaaaaaagagaaacgatgtatgcaagtatgtcgatattactccagtaatttagtaagtcattgtatagaatatataggctaccaagaagcaagccaattaagagatggagtggaaagaagaggagaatccaaaaggaagaaagtaaaaaggataaatgaaaaaaaaaaaaactagctatttccaggaggctatgaatattcttttgtttatttctaacaactcttggagcactcatataggactgaaaaaacactagctgtgttttcagtgaataaagaatcaagctagatacagaggctacctagtacttctatatttcaaaaccaaagmgagaaggctagaatgcagaaaaatgaagaatggaaccaataaagccggttcctttaactgtcgtaaaattaatgcaactattctcgttttgaattattttactcaatacagaaatactagtatatgtgtacacacaaacataaagaaatatcaatgcataacacagaagaaagagggaagaagatgtataaagagggagaaattgaggctgtttacaatcccttgcaacccagcaaaagggagggaaactgtttgaagtagaagttgaacccccattaatccttcctgcctcctacttcaaacatgaagattaagtagaatatacttctttatcctagactggtctttgttttcttcaagtttttaaggccttctaatactgcacttccaccagcagtttaaaaacccgaatactagtccccactattcctgttccatccytgaaatattttttcaagctcaagtaaatgttttattttaattgttagcagtactagcaactattaaaggtctgtcttgggccaagcatagcactaaatgtgttgaatatactctctcactggatattttgttttattttactggagagacaggtgcttatacagattaaatacttttttcaaagtcacacaattaataacttaaggagcaacaatctggacccagaactcatataaaagcttgcatatttaatcactgtaaaactttactgagamtatcatagagtagagyttyacaaacaaacttctatagaagttcatctacaaagttctgtagatgctggttcaaggttcaaatgagaaattgtgctgacaagtcatatataattttggggattattcattttacatttttttagttcactttgaagatagagtattgsaatccatttccttcccctcttttgttccacatttatatactcatcctcatggtttgtgtgccctggttcccaagtacaataaaggagtaaaaaaaggttgccaccttaagatgaaaaaacagttttattttgacacatttatcagtcaggatttttacttgtaaaccacagaatccactctcatttgtgggaggagaaaaggaacatgtttactgatattagttacccccaaaatctctccaaaggacagataattaggcttaaaagccatacagccaggaaccactcaccaagtacattgcctggcattcccacaggtaaccttaatgtctctgcttctgtgcatgagtccaacacctcaccacagagaagctgggcacaggatgctacccctaggacttcggactccatgccctcagagaacagaatgtctccatgccatcctggccagaactgtttctgcctgttatctccctcttcaagccactgcattccaaacatctcacaccaatgcacccgactggcaaagcttaggtcatatgttggcagattacactttgaaagatcccacacacgatgactcacactctgatagattacagtctgagggatcaggtgctatcggatcatatgttgatggatcacatactgatggatcacatgttgacctcaaaggaggcagagggagagagcttctgtagccctctaaaggcagggttcctattcctgaaacatagaagttgcttaaaaagtgttgggcagcaagaaaacatgatcaacctcttcaactcccagtaagagaaacagtataataaaagattaattaaaagttattgccaacatttataaattccatctcatacatttttaccctaatacttaggttttcttcacatttcttaatagaatgtttgctaataactgatatgagttgtgctttactactcattgtcatgtagtacaatctattagcctatcagagattggctcacacactttctacaaaaaatagttgcaacaataaataaactttatgcattataatattacttgcatattagaatttgctgaattttagcatatattatttgatttgatctttgcagcaatccaatgaggcaaccaggatatacgacactattcctatyttatgggtatagaaactacatttcagcaggttcatgtgatttctcaacatcaaaaatctgattatgttgtttactgtaaaaaatatctcagtggggacccacagtcccttatgtaagttcaaactctttaacatgatttataaggtcatatgcccaggtattgcttgccttattaagcctaatatgccttttctcccacatgccctgaaattctgtgctgcaaccatactgaacggtttctaggtagatttaagcactagatttcatctcaccttttgctgtacttttgcacttgctgtttctcctcctgaaaccaccatcacctccttgttcacctggatatgagtctcacatgcttccagttgttgcttacacatgaattcctcaggcaaatcttcccttaaggttggttaatttttcttcctacaaactatctatcaccttggacttagccctgtcataacccctatcatgtttttcaactggtgttttaattacacattttcctatgtggattccacatctctttacagtctttcttagtatagactgtagtctctataaggacacatattatgtctgtatagctcatttcagtaaagccaagttttaagagaatttacattttgtagttaatatgcaagtttttattttgaatatgtgcattattaaattaattatcaactagttggtattgtataccagaaatgatcttacccaaagtctatagtttttcttgcttctatctacctgtcaatcaattgatctatcttctataacatacatatatatatcatattatttggcctgtctgcctgtattttgccaccctattttagtaagctatagtaagattctacttcccatacgtagtaaggttcattccctcattctggccgtgtgattttttgcagagtacaacatagaagcagttgagaatgagagatcagaagacaaatcacaaatgccttgtggggccagaaatgaagcacactgggcagggacttgggtgattggaaagagcatgtcctgtctaaaggtgaaaaggtttataaggaggataagttggcccaatgttgtctgatcctccaatctttgaagatagtctcagaatcacatgtttatgtagaatccacttattttttaaaacctttaacaaatgttgaaaaatttagaacataatatgttatgagccaaacaattctgtgaaccagattcaaccctctggccaacaatgtataacttctgctcccagaagagatgatatgaggtgtccccaagaaagagaagctttaaaacataagaaaagagataggaragattctgatggtccaagcagagaagatggttactgtgggtgggtctcaagaacaatgtagaaccatagctgctccctggaagagttttgaggaggtggaaagacattatcagttgaaagagatgtgaatgcatccggggaggcagatatcaggatgaatctccacaagtttcctcagccccacatggacatggcatcagaatgcaagcttgtgtcacatgaatacacagtgacagtatgacacactaagatgagaggctattttcacattttmctagctgttatacaatctttagagaggaaataagcctgtaagatatctgagagtagatttactgataggttggagcaatgggaacatgaaggaagaatgaagttgattaagaggataaaaacataggatatttcttgaatagctamagttgtggacacatacacacacaatgaaagcttatacaagtgcttaaagtgtttccaaataaaaatacattccctgatatcaaagaattgctagaaaataactaccaacaatttatagtaatacatttctttttcccctagaattgatctacatgaacgtacgttctcttcccatactcgtggccctgtttttaacatccctttttcaatgtggrgaatatttgctgccctgttgtgacaacacaggtcttggctattttgtaatttccagaaacatgctaaacttccttttagccagttgactaggcacttgaaccttttagttctcatgggcaaagggccaatgaagagtttaccaagacaatttaggctatattagctcatcaaaaagcataagccctatgttttctcagccgttgtatgtttcccaatttaaaatgtaagtagagaggtggtctcatctaatggattaaagtatggttagtgatttagccagagacttcaggctaatcattttcttgctcagattaacccacatagacacagaaatgtgtcagctcaccaagctacttgtagaactgtgtagaagagctgcaataaattagaacagttgaagccttgggccacatcaggattaaacatgggtacatatataaggcccctcaagttttcatgtattcagatttcatctaggatagcaaagcatgttgaaatttgtaaacaaaagcacagtcctcattttaaagtacagtatgtaatttactataatatagatcaatgttttcataaatgttaatcatgttgaaaaacattaatggagaatatttttaagtaaaattataccaattcattttctccctgtctaagaatgtgcttgtcagtgagtgccatttccacttcttattttctcaaatagatgtcactgggaagctcagttaaaataataaaggaagaaatatcctgcaattaattcgctgggggaggagagaatagggatgagatttgagtagtttttatccatgttwtcagaccagaagctttagattgtctaaatattacagactgtcaattggcatcaaggttttctttgccccacatctgctactgaagtaggtgaaaactggacatccttccaatggtcaccaaaatatatctcatggaacagagatgaggttttaagaagcactttgatctcagttatcctatctgaacaaactctttacatttccatcatactcatgatgttttccatggccccagtacattataattgtgcaggatgtgctctataaaattcaagaagatgccattcatttagaccacaatgtgaatggtgaccccttcagttatgcattatacaacctgcaaaactgcatgcatgcactggcttgcagatttattcacctctaggatcagaagctctttctgcttttgttattatatcctagctggctatcttttaaaaatacattagtgctaaatattctggttttacatgtgtactcttctctgaacagaggtgaatcattgctgctttggaatatattcatcatcagaatagaagagtataagaatcagaagaaaacaaaatatatatccatctttaagttctactgtgaatactgtagtttattgtttgttcctcaacccaatttattattgactaatccaattatcatcataaggaaatgtcttatgactgttttatgtgtgtgtcctttaacttaggtatagaaaaccttagaggatagacgaaaaataagtgctgaaacttttaactttttttttttttttttttttttttggctactgctctttttgatactggccccgaagtagagattattcgcacatctgttgattttttttcacgttgcacacatttgcacctttttttaaaatgttgactgaatcgcttaattgtagacragcattcattttaatgtaaatcttacagtattacatgagtgaatgtatgaaaatagcttggaacagtttaaattgggcagaattctgctttgatcataatgtgcctcttcagcattaaaataaacttgcaacatatgctgaaaaacatgtgtaataagtgcctcttgcatggtgacttatctggaaaaaaataaatcaccatttaatagaattcaaaattcataaaatacttcagcaactagaaatgtgataatatgattggcatcttacagtaacagatcagtacctgacaacttctgtttcaaagacggaattttaaattttaataatagtatcaaattgtaatcatttttagaaatatttgaaaacacaaaacatttaataggcagttctatataatatttttttatattgttacagatttggttctaatttatttatactatttaaaagataccaaaaatgtagcaaattgatttcaatctttagcaaagtcagtataaaaataatgaaattaacagttttcttgaatcactgtcaggattgacaagagttagtcacggcaaaggagttttcaacagtgtggctaagtaacaacagcttttgcccctgaaaaataccttgttattagtaattaatgacagatacctaaaggcactttccatcagtagcctcatgatgttgagaggaattatgatatcatgggaagaactctagacactgctgaattactgtgagcaaaccattcatcttctctgacttctttcctccatctgtaaaattgtatcagtaagaaatgctattggttaccagaaaaaaaatccagttaacaatggtttaagcatataaatactatgagtacattaaatcataaaaaagaatgggaaactaaacagagctagataaatataagaagcaattatcacattawagataatccattaatggttacctttatcaaaagaaatatatttgtcacttcaagaagtgttctctgaaatcatgagcaattattttgttcctagctagtactcattgtaagccaaatttaaaggtgagtctaccctttattggagcctcttatagaagactatcaggaaagcttcaagtgtacttaatataatacattattactaattcaacgtatgcttattgattgtctgctctgtgccaggttatgcatttggacatctaaaaacaaaacaacaaactccaaagcaacatgatatatgattcttatttttttaatttgtaattaatttggaaataatgttcacatctacagatatatattcaccaggccgtcctctctatagagagctccatgtggatgtcccacagagtccacaataccagcacatgcaaaatcaaacttaccatgtttcctactttcctacttgcttttcccccaggattttgcatcttagttggtgacatcatcatcagcttgtctaccaaccctgaaccccggtggccactgcaatgccttccgacactccccaggtggctattcataatgctgtcagttctacctcctaagcaactttcactctcatgcacctggtcacagcttactttaactccctatcatctctcatcagcattatttcaatgcttctctaattgatcaccctgctgtttcttacctcattgcctttgaatccatctgcaatggtctgaatgtttgtgtctgcccaaaattcatatattgaaattctaacccctaggtgatgttactaggagtgagacctttgggagttgattaagttatgagggtgstgccatcataattgggattaatgcctgtataaaaagggaccacacaaggatccctcaagccttccatcctgtaaggttacagtgaaaagacagctatctaggaaacaggccctcaccagacgctgctagtgccttgatgttggatttccagcctccagaactgtgagaaatacattgttgtttatatgcgatccagtttatggtatttttgtgtagcagcctaaatgaatgaagaaaccatcttccacaactccctaaatgtcctttataaaatgtgatctaactgcctctctacttagcttagaatttttaactacaccctagtcaaatgtaaggaaaacccaagctctcaggcccttcatgactgaatcttcattacctaatttctcacaactttttaggcttttcctaagcttctacaatcccaactctctccccaccaccaaccatcctccatagagttaaacactctccctttttgacaatgctacattacgttttttttacatgttagtgctcttaaggagactaatagctttttacatctatctcagtcacattccagagtacctggcatacattgatctactaagcatctgttggtgctcaatgtaactttgttggatgaggtaaatggataaatgggcaaagaaatcatatgtagtattatgaaacaatatgtataagaaaataaacattgagataaaatgtaagccaggaaaataaaaattcttgccaaattcctaatcaagragaaacaaaaagagacaattagaaattcataacacctgtgtaaaaatgaggacggcttttgtgggtaatgtggggaatacatgagttgcactaaaatattcctagtgattatgctcaacaatgaggagttgtctcactaggtaatgaggtagccaaagtgcacagtgataggtatcattttttaactgctaggtcttgcactctgggggccacaccatgtaattttttgattctctcattgctgcctcatagtataggttgagtacaaaagagtcataaacatattgtgtttttataacatttagcagaggactggcaacataagagaaagtattaaaggagaattgttactaamcaactttaaagaactagattcaggaatgggtgaatcctcgtgctcaatttattaaccagaatgacctctatrcagtggcatgttggcctccagaagttctagacttaaaggccagctctgaacctggagtgaaatctgaacatctccttgtcaattattgtagtaaaggtctctttttgtgccctgtacaccactatatactcaggagctagattttgtttttgtttgtttgtttgttttgatccttgttttcataatttctgacattgtagtaagtatttgctaaataacaaatatcttgctttgcaatattgttatccagaaagctaagaaattgtatacttcgttgtcactactccttttatttcagaaatcttaaagcaataacatagtaacatacttatattaaattattagcctaattaagagcttcattatagtgcactgccacttgcccagttatagtgaagctttgttctacttactaattgaatcccactgaactttttgctctacaatgccttatgcctagaacacctgggcatcatctatttgttccattccttgtggaaatgtgaccatgtggattttatttctgcttctaagttcacagtgagcccagtcctgtcccaggccgcctgcagagtgctgacctagttactctatcttactttgatttcatggtggaaatgctcatatttttgccctttccggaggtgtccagcctaattacatttcccattcatctgatccaaatgctttcttagatcagacatttttatttgctgttcttttgtttttctattcctttttcctattcattctgtattccccccaccactttaatatttgtagccaaatgtctttcatctgagacccatcacgctcaattacttcacttccaatatttttcaagctattctcgtggaaatttttgtctatcaaaagtggaatagccacagaatttataattttattacttrtacataaagtttatttagtgtaggggagaaagagaatgagcaaaaaaattactatgtaactgattggaacaatatatttaatcacaatstaaggtcagtaccatttctcttttagagatagggtaactgggtcccagaaacattaaatgacttacctgaagttgccctttagctaaatcaaaatttaggactaggaatcagaacttctgagacatatttcagtttagtaccttccactgggaccttcagcatagctgtaccaaatgttaaattatttaaatatttctgcacagttcgccctgtccttccaggttccccctatccctcctcatgacctcccagacttttccaaatccaacatttaaagtatcaatgccaggtaccttagagacctctgggaccctattttcttacaatatctaggatacactgtggccagtactcttgctgattgtgaaatattttgatatctcttctattttaataccatcatggtagcaattcacatataaccataaaaatgtcaataagagcttcattttttagccagtttggcagctgggaagagatcaggcaggcttattttctattatgaaagatcaaggtattgtaagccatgggtttctcttctataatgcagcccattatgtgtgcaggtatctcccagacctctttgtttcaccctatggaagttggggtttgggggactgatttagatgttaagactggtgactgctgttgctgtggatagtaacgtcttgggtctctgatgcagggaactcatgtcttctgccagcctcaacaaagctgtggcaggctaacatgttagctttcaagaaaggtgaaatcttagatgttcccataccttgacaactgctgtatatttccctaatgaaattttttcttctcaccttagttttccctagacctctgctttctaattttttcttactattttcaatacctggaatcaaaattcctttttattgatgatttatgcgaagcagatcctttttacttacaactcaaattaggactcctacaggaatctgtttagtcccaaatgctaatttcaatcctttgctgaggcaaaggaaagaactgaagagatgtgaaggtcaactctgaaacatcactgaataactcaattctttcaccctttccccacacactttaagtccaaaatgagtccccagactcatttcccttgggcagatcaatctatttcacacctcgtgaccttacttaggaggmctgtgtcagaaagaagttatgattccatttgtagcatttgctcaatattacctaccttttcactcgatgaatgcctgtgagcttgtcaaacagaaaccactagtaggtattctttgaaatgtgtatctcagctgtacaattgttatttgagaaacagacctttctaataatatttgtccaatgaagttcatacgcattttgcatttttacctaaaagaaaaaataataggatggttctatatggaagctttaaactatctggtaaaagtggcaatcagtccaaacacattaaaattcgattttcctttacaagtgtttgctgcagatgacccccactgatcttaaatatatttctgtatctgtaactgaatagaggttttccgtacagcatgttctaatggcactctggcctttagccaacaaggcactgaataaggctatttttaaaatacagaaactgggaacagctgcagcaatcaaatttgataaaaacagagaggaactttgctttttttttttacggtttgttcaagtttagtcttctttcatagaactgcttttgttctgttgtatgaagggctgcaagaccaatacagtgaagcccttttaaacaaataacttttaaaagaatacgactaaatagaataattttcctttgtaccaagagtttcactgcaatagtatttttaaactattaaaaagggggtatatctcttctaagaggaggtagaaaaagaatcagatatattggcaaagtttgtactacaaaagaggttttggtttcccccgccccacaaagcaactccttgaaagggaagataaagtccttggtttttcagtgttgaaaatctgaaagtttgcatttgaacctctcttagggtttcaagtgttgctagaggtgatgatacttttcatgtccatttctacttttcacactacgattagtcatgaatgttgctgtattttccaaaagctagattagtgttagtgcagttcctttgtaaagataaaataacacgctttttaaaacatcaatgaaaactttttcacagagattttttgtacttatctaagtccttcaacatgtctatatacaagggcttattttttttttaattcaagctctttggaaacttgtcagtacatgattaatatgagtcataaggtgactagatactgaaaatctcttatactgtagtaagttgcaagttctctcttctaagtgattttatgtgtggaatagatttctctgctactttgtgatcgaaatgacaaaggagattgtatttcttatggttatttacaaatggaattaattttaaaattccatccaaataaaactatttatgtcaacattaattcaatttagtaatccaagacagtaatataattctttttctgtagacataaggtcatgaaataaaattacttcaaaagaaagggagtgtggggggaggagaaaaatatagaaaatagaagtattcaggtgtatactaaactgtactaacttgttaacagttagcttattagatatgatggtcaatctgcccgcagtctgtttataagctttaaaaaagaaaactttagcaggcttttatgactagaataattctttctttgaggcatgagtcaaaaactgctcatctttaaatggtgaggcaatgaggaaagtgtgtttagtgctttcgacaataacagtccctgtctcagttcatgagtgaggggtccttagtcctgcattaacagcaaaactccttaaatacacacactgttctaagcagaaactatgacattcctgttgtgcagagccttgaactcagcagggtttcaagggttctctggcaagtcaccagacgtcatgatataatcctatatttttcggcaacaaacagttctacatgaaggttgctgagatttaattctatttagacatgtcgcctattctctgaagacaaactgccaagacagtaagatttacttctgaccagcaatggttttatgcacaataacctcaaatattataaagtctttcaatctcttgctaagcacgtaagacttacatgcaaccagggtaaattggataccagaaacagttctgttttacaaggaaatgtttactgtaaatcacttttcctcatcatcatgttctgtccttattttaatgttcagcattattaagtttataagtgagttcaaatgtactaccatgtttctaaaattttatttttatgtgtttttcatgtttcactgaaactaaaataaagggaccatagaaacatctcattatagtttataatatatctcaagaaaataactgattttcacagtacttctggatatttagtgtaaagaccgtgtagtcatatgtaaagtaatgttggcactgccctgtattacattgcattttaatctgaatatttgtttgtttgctttgtattgcttttcattgctggaactgctcagttcttaggagaataagagtgggtgatctccctggtgacttcatccccttagctggcatcagtgttagggtgcaggatgcccctccagaagctattcagaatttgctgacatcagccttcattcatgagcgcttgctttgtttagtgatggcactaatatgaggagacacgtgaagtagctcagtttatagaaaagggcagaagaggcatggtgctgtgaaaacattcccacacacactaacggctcattcacacagaaaacaagtgaaagccttcagtcccttcacaaagcttaacgagaacaaactgcttcaagaacccagaagcagcagtgttcatattcaccactagtttacaccatttacatttactgataatacacatggctagtggcagcaatggattgctgtgggaagtctttaaactctttctctatgggttttgtyggtgaaatacttatttatttggttgcgttcctgtggtgtagatgacttttcaagtacactataacacagtgacttgcaggccctgaactcctttggtcgctatagagaggttgttgacaatatgctgtactgtgatttctggtctttccttattttagactcgtttaaaggagttcagaattttagcataaaaacaaagttatagtcagctccggctggttgttttcaaaaactagatggctttaaaagagatgatcaaatccattcttgaaaagttctttttaaagtcaggcttccactatgaatatatatgtacttctgtgtacatatataacagaatatatgtatttctgcatacatatataacataatataacatatattaacccctcatttttagatttcaacagggaatgcaacatttcacactgctagattttttaaatgactcttgttaatccatttatgtaccagattcttatcttcttgttatatttaaaaattatttttactattccacatctaaaaatgagtgagataatgtggtatttatcattctgtgtctggcttatttcggttaacacggtgtcctccaggttcatccatgttgtcacaaatgacaggattttattctttttatggctgaataatattctacggtgtatatttgccacattttttatccattcatccactgttggacacttaggtcgattcaatatattagctattataaatagtgctacagaagttgagagtacagatatctcttttgacgtgctgattccatttcctttggctatacatccagtagtggaattgctagatcacatgttaattctattttgactatttttggggaacctccatactgttttccataatggttgtactagtatatattgctaccaacagcatataagtgttcccatttctccacaaccttaccagcacttgatttcttttgtctttctgataaccaccagtctaattggaatgaagtaacatctcgttgtggttttcatttacatttcctttatgattagtggtattgagcatttttttcatataactaatggccatttgtatgtcttcttttgagaatgtctattaaagtcttttgcccatttttaaaatgaggtatttggggttttttttcccattgagttgtttgtgttcctttatatattctatatattaactccttgttagaagtatagtctacatatattttctcccatttgctaggttatctctttactctgtgaatagtttcctcttcaaaagctttttagttcaatgaaactccatttgtctctttttgctttcgttgtctgtgcttttgagatcttatttaaaaagtccttgcccaccctaacrtcataaagcattttctctgtgatttcttctagttgtttcatagtttcaaactttacatttaaatctttaattcattttgagttgatttttgtacataacatgagtcagggtctagtctcattcttttgcatgtgattattgaattttcctagcaccatttattgaagagactactttttccccaatgtgtgtttttggcatctttgtcaaaaatcagttggctgtaggtgttgaatgtatttctggtctctccattctattctattagtctatgtgtctgtttctgtgccagcgccatgttgttttggttactatatctttgtataatagtgtattttgaagtcaggtggtgtgatcccttccactttgttctttttgctcagtatgtctttggctatttagggtattttgtagttctacagaattttatagttgttttttttttttctatttctctgaagcaggggtccctaacccccaggccacaaacaggcgtatgggtctgtggcctattaggaactgggtcgcgtagcaggaggtgagcagcaggtgagagtgaagcttcatctgtattttatagctgctccccatcactcgcattaccgcctgagctcagactcctgtcaaatcagcatctgcattagattctcataggagtgcaaaccctattgtgaactgcgcatgcaagggacctaggttgagcactctgtatgtgaatctaacacctgatgatctgtcagtgtttcccatcacccctagatggtatcatctagttgcaggaaaacaagcttaggggtcccactgactcaacattatagtgagttgtattattacattgtaatacataatgaaataatatataactatatattacaatgtaataatataaataaagtgctaataatataaagtgcacaataaatgtaatgcacttggatcatctcaaaaccacctcccaaccctgtggctggtctgtggaaaaactgtcatccatgaaccagtccctggtgccaaaaacattgaggaccgctgctctgaagaatattatagttattttgacaggaattgcattaaatctgcagatcactttgggtactatgaccatttaaaaaaaattcttccaattcatgaatataatatgtctttccatttatttgtgtcctcttccatttatttttcatcaaagttttacagttttattgtagagatctttcacctccttggttaaatatattcctaggtatctagtttttttgtagctatggtaaaagaaagttttaaaaattctttttcagcgagttcactattatcctatggacatgctactgatttgtgtatgttgattttgtatcctgcaattttagtgaatttgtttttcagtttgactagtttttggtggagtctttagagttttctttatgtaaaatattataacatctacaaatagggacaatttgactaccttcttcccagtttggatgccttttatttcttcctcaccaactctggtgacctttccaccatcagcagccttcctgtccactgctttgatgacacccacagcgactrtctgtctcatagaacaaatagcaaaatgactcagaggatagtcagaaaagctctcaacacaggagcttgccaggaaccatatcgacaatggtagcatcaccagacttcaagtatttagggccatcttccagctttttaccagactggcaatcaatcttttccttcagctcagcaaactggcaagcaatgtgaactgtgtgacaatccagtacagggacatagccgtcactgatttagcctgtttggtgcagaatagtcacctgagtaggaaagccatttgtttccattggtgggtcatttttgctgtcatcagcaatgttggcacagtgaacatctttgacgtgcacatccttgacattgaagccccctttgtcccccagaagagtttcgctcaaagcctcatggtgcatttcaacagacttttcttcagttgtaacattgactggagcaaaggtaacccagtcaccactcagaacacagtaacagtatcaaaatcaccaattctgtagaaatcctggagaggcagaccacaaataagggcttgtcagttggatgagttggtgataggatgcattgcagagtttcaagcaacatagttccactggcattgccatctttacaggtgattttccatcccttgaaccaatgcatgttagcacatggctctagcatattgtcacaattccaaccagaaattggcacagatgttacygtgttggcattgtagccaattttcttaagtttcagctttctcaatgattctttgtaccttttctggctatagagtggctaagtggaakccattttgttaacaataactgtttcacacccagtgtgtaaaccagaaatgcatgctcatacgtctgttcattcctggagacaccagttcaaattcaccagcaccagcagcaacaatcaggacrtcacagtcagcctgaaatgtggctgtattcacgtttttcgcaaagcatctgtgtcccagactatcaataataatcaagtagtaactgctggtctcaaatttccacagggtatcaatggtgataccatgttcaggttyggctttcagtttatctaagacccaggcatacttgaagtaactctttcttatctcaacagcctcttcctcaaaattttcgatggttctttggtcaatcccaccacatctgtagatcaaatggccagtagtggtggacttgcctgaatcaatgtrtccaattttgacaatgttgatgggagtctttttcttttctttcccatttgactttagggatggttttcatgacactggtgttctagctgcaaacgtattgcaaaaaaaagttggtatcagctttaatatctcctacttcatccttgattttatttttttgagtcttctttcttttttttagttagcctagcttgtggtttattgattttcctttatcatttcaaaaaaacaaattcttcattttgttgatcttttgaatttttgttcttagcatcaattttgtttatttctgctctgagttttattatttccttccttctgctaattttggctttagtttattattaaattaataacaaatcctaggcctttgagatgcattgttggattgtttcatagaaatcttcttttgtgatgtagacaattattactataaatttcccttttagtactggttttattgtgtcccatgggttttggtaagatgtgtcccattctcatttgtctcaagaaaattttaattttcttttaacttactcactgacccattggttatctaaaaggatgttgtttaacttccatctatttgtaacatttccaaaattttattttgttaatttctagtttagaccataatggcccgaaaagatagctgatcatctcttcttacatttgttgagatttattttgtggcctaatatgtgattcatcctggagaacgttccatgtgcaaccgaaaagaatatgtattctaaagctgttggatgaaatgttctgtaaatgtctgttaggtccatttggtctatggtgcagtgtaagtccaatgtttctttgttgattttttgtcattagcttacccttgttgaaagtgggtgtaatcccctactattttgtattgtgttctatctctccctttagatctaataacrgttgctctatatatttgagtgcttttgtgttggttgcatatatatttacaattgttatatcctcttgttgaattgatccctttctcattatatataataacattctctgcctcttttaacagtttttgacttaaaatatcttttatctgatatcaatatggcttattctgttcaatttttgtttttgtttgcacggaatatctttttctatccctttgctttcagcctgccttttttgaggtgaatcttttttaggtagtatatagttgggtcttattttattttattttgcctattcagccattctgtctcttaatgggaaaatttaatccatttacattcaaggttattattgttagataagtacttctgccattttgttcattattttttccttatcttgtagattccttatttctttcttcttctcttgctatttacctctgtggtttggtggttttytgtggtgctaagctttattttctcattctcayttgattgtctgcagtacattatttgtttgtgattaccacaggctaacataaagagtcttgtagttagaattgactattttaagatgatggcaacktaactttggttgcataaaattactctagacagttttccttccccctaaaatttatacttttgttcacttaatttacttctttatctgtggtgtgttcctttgccattaattgtaattcttggttttgaccatttgacattaaacgttcatactagaggattgaaagacrtatcatatcactggaaatattaggaatttgattaattaacttacyctacggtgagttttatactttcacttgttttyctgttagtaattatggtccttttgtttccatttgtagcactctcaagtgtttcttgtaacaccaactttatggtaatgaattcccttagctttttcttatctgcaaaaatttttatttcttcttcatttctggaaaaatatctttgctttatataatattctcaactracagcttttttttctttcagcactttgaatatatcatcccattctctaccagctttaaggtttctgctgagaaatctgctaatagtgtgakgcagattcccttataagagacttgatacttttcttttgtagattttagaattatttcattgtctttgacttttgacggtttgattataatatgcctcagagagaattttttggattgaatgtaattggggatcttttttttttttttttttttttttttgagacggagtctcgctttgtcgcccaggctggagtgcagtggcgggatctaggctcactgcaagctccgcctcccgggttcacgccattctcctgcctcagcctcccaagtagctgggactacaggcgcccgccaccacgcccggctaattttttgtatttttagtagagacggggtttcaccgttttagccgggatggtctcgatctcctgacctcgtgatccgcccgcctcggcctcccaaagtgctgggattacaggcgtgagccaccgcgcccggccaattggggatcttttaacttcctcaatctggatgttcataactctaccaatacttgggaatttttcagctattatttcgttaaataaattttctgtgcttttctccgtctctttccctctgacactcctattatgagaaaatttattcacttgatggtgtcccataagtcctgtaggctttcttcattctctatttttcttatttctactttcttttcccctcctctggctgggctatttcaaaagatctgtcttcaagttcataaattctttcttctccttcatcttgtctgttgttgaagctgtcagttatgtatttttttcatttcattcattgaatatttctgctccaattcygcttggttctttttttattttatatacatctttgttgaatttctcattcggatcatgaattgttttcctgattttattgaattgtttctctgtgttctcttatatcttgctcagtttccttaaaatcataattttgaatttatttttcagatattatatgaatgtcctttttggragtctgttactggagacattttgtgggtgccatgttaatttgctttyttatgtttcttgtgtccctacatttatatctgtgaatctaattgtgtagtcaattttttccaacattatggagtagcttttgtagggataaatgttttcctgtaaacaagtcctagtgttaaatgtggtgcattggctttagctctaggtcgactcagtactgtagtcttcatgcagtttcttcagctgtaatcctcatcagtgatatatattgcctcagtgctctaggctgcaggcgtttgtgatggcagcagtgtagttttgctgaggacaggagcgctaggctggttgttggactctgtggcaatctgtctaggaaagcagaattatcactggaccagctgttggaccaagcatgagagcaatggtgccaggcattcctgcaatggtatttgcagggaaatgggaccacccagactggctgtcaggctgggctcaggtgtgtgcaggtgtggtgatgccaagcaggcctgtggctatctgtccagggaggtttgtctgctgctgaaccagatgttgggccaggcagaggtgcatgtgagtacagcagggccaggctcttagctttcttactgagcttctccagagtattcttcatacattaccccacatggtattataaatgggagctttgtacttcattttaattttgtgattacatttgaaatgatttattggtaggactgtttgctggactattttaaggtgttatgtatgtattcctttgtagcacttttttctcttccatcactgataacatttatttatttatttatttatttttccataagttattgggatacaggtgatatttggttacatgagtaagttttttagtggttatttgwgacattttggtgcacccatcacctgagcagtatacactcactatatttgtagtcttttatccctcgcccctctccaactcttccccccaagtccccaaagtctactgtatcatccttatgcctttgcttcctcatagcttatctcccacatatccatgagaacatacgacgtttggttttccattcctgagttatttcacttagaataatagtctccagtctcatccagggcactgcaaatgctgttaattcattcttttttatgtctgtgtagtattacattgaatatatataccacagtttctttatccactctttgattgatgggcatttgggttggttccacaattttgcaattgtgaattgtgctgctataaacatgcatgtgcaagtatcttttctgaataatgacttcttttcctttgtgtagacacccagtagagggactgctagatcaaatggtagttctacttttagttctttaaggaatctccacactgtttttttatagtggctgtgctagtttacattcccacccacagtgtagaattgttctctattcaccacatacacaccaacatctactgttttttgattatttttttgattatggtcattcttgcaggaataaggtggtatagcagtgtagttttgatttgcatttcctgatcattagtaatgatgagcatttttcatatgtttgttggccatttgtatatcttcttttgaggattgtctattcatgtccttagcccactttttgatgggattgattttttcttaccaatttgtttgagtttcttgtagattctggttattagtcctttgtcagatgtatggattgtgaagattatctcccactttgtgggttgtctgtttactctgctgactgttccttttgccatgcaaaagctctttagtttaattaggtcccagctacttatctttgtttttattgcatttgcttttgggttcttggtcatgaaatccttgcctaagccaatgtctaggagagtttttccaatgttatcttctagaatttttatagtttcaggtcttaggtttaagtccttaatccatcttgaattgatttttgtataaggtgagagataaggatccagttttattcttctagatgtggctagccaattatcccagcaccatttgttaaaaagggtgtcctttcccccactttatgtttttgtttgttttgtcaaagatcagttggctgtagtatttgggtttatttctgggttctctattctgttccattggtctatgtgcctgtttttgtaccagtaccattctgttttggtgactatggccttacagtatagtttaaaatcaggtaatgtgatgcttccagatttgttctttttgcttagtcttgctttgtctatgtgggctcttttttggttctatatgatttttagaatttttttttctaattctgtgaagaatgatggtgtggtattttgatgggaattgcattgaattgtagattgcttttggcagtatggtcattttcacaatattgattctacccatccatgagcatggaatgtgtttccatttgttcatgtcatctatgatttttttcaatagcgttttgcagttttccttgtagaggtctttcgactccttggttaggtatattcctaagatgtttgttttgcagctattgtaaaagtggttgagttctttatttgattctccacttggtcgccattattgtgtacaagagctactgatttgtgtacattaatcctgcatctggaaactgaattcttttatcaattctaggagctttctggaggagtccttagggttttcaaagtaaaagattatatcatcagcaaacagtgacagttttacttcctctttaccgatttggatgccctttacttctttctctagtctgattgttctaactaggacttccagtactatgttgaagagtagtggtgagagtgggcatccttgtcttgttccagttctcagagggaatgctttcaacttctccccattcagtattatgttggctgtgagtttgtaatagatggcttttattacattaaggtatgtcccttgcataccgattttgctgagagctttaatcataaagagacgctggatttaatccaatgctttttttgcacctcctgccaggaggtggtgctttccagagaggaacyggcagtgggcgaggccctagaactcccaagattatatgccctttgtcttccactaccagggtgagtagggaaagacaatcaggaggagggcagggttaggcatttctgagctcagactctccttgggtgggtcttgctgcagctgcagcatgggggatggggatgagatttgcaggtccctggacttgtatacctaggaggattatggctgcctctgctgagtcatgcaggttgtcagggaagtgggggaaagcccacagtcacaggcctcacacagctcccatgcaaactgaaggcccgttctaactctcaccgtgcccccacgaacagacccgagttagtttccaggcagaaggtgagaccggcctgaaaactcacctcccaactgcgaaagaaaaggtcttggttcttcccctgcctgtggagtttgcacaccagatttgcgccctctcctgagttctagccaggtggcttcccaccccgttcaaattgttacaaagtttagctagagatttccttctccctgtggagttttaccccctgctcctctggtcaccctcccgttggatccctgtggtatggtgccaggcaggaacggccagttaggggactccaggagctcccagggcctttctgctgcttcctctacccctgtacttggcttagctttccaaattgactcagctccaagtaaagccggaaacttctcctgcaaatggactgtcagcttctctagtgggggcatgtgatggggagaggagggtctcccttttccacttcctcagttgggcactcagtatttggggggtctcccaggctccgcaggagcagtccacttccgtcagagcgtctgtgtgtcctctcgagattgctggtttgttcttgcaatctattgagctaaaatttacaatgcgagctgctctgtctggagctgcaatctagtcctgcctcctgtccgccatgatgatccaagagaactgttaacatttaattggttagttcttactgttgtcacagtaacatggaatttagagtcaagcatacctatttagaaaaccagattttcaattctatgtaaagacttgaacaagtgacatagtttccctgtcaataaaatgaggagaataatacctatctcaaaggactgttgagagtcttaaatggaaaaatgcctataaatcccttagcagggagcctgctcatagcaggcatatagtagatatattagccttccccatacagtttctcctttattaatagacctacaattggattgtatgttccttcaggtgcaaaaagcctgcctttatgttttacatacttgtactctgaaacacagtttatattaataaatttttgctaaaactcttcctacccacccccttttaaaatttatgtcttctgggttatgtaggtcaggaaaaacaggcatttatgcttgtgagaagtatatctaaattaagaatcaattagaagtagatggacattttgaagacgaatcattgaattattcactctagtgaatggatttcatatgttccttggccttttaaaagtttattcttggtcctcagacatgtttcataatgttgctagataaatgaaacatcactggaaggcatacaatctacaaacactcaaaaggtacaactccatagctagcctggtcttactatggccaaataatggctcaataagtgtcattataattagcaatttatgttgatttcaaaatgctcctgctgagtcaatgagtacctccacatggcctctgacagtggtgcagaatgttgctggacactctgcacaaaggggtttatactactctgctccagcctttctccccctttcttcagtacccactatattctgcgaaatgctacaacccacattcattctgtgtttgtaatgcattctcttctgtttcttcacatatggcagtctgaaacaattacataatgagacatattatcagggcataactgtcaaaaatgaagactaagctatgaataaatattacccacttattagctgagctgctcgtgtgtcctctaatctatatgtgcccctgactttcaaatttacattcatatccctgattacctgtgtaacagatgaatgcagcactaattattttcacagatttataaagtttataaagatttataaactttaaaatgacaaattccattctaaagtagggttccttaccatttttgtgctatagtctttttgcctgtctggtgaaatctactgactcttctcagacataatgttttaaaatttataagataaaatacgtaggctaaaaaagggagtcagttatattaaaatactgttaaaattttgatttagagatatatatgcttttctatgaaaaattagattaaaatgctgttagaaattttgatttagagatatatatgctttcttattaacaaattaaaatctagaagttcaataattattaaaatttgacataatgaatataaataacattttgaaaaattacataagataaaaataaaaaaaataaaatttaatgtgttattttattttatagagacttgtagatattttggtattgtggataattaaaacgtattatcttttcttaaagtaggaaatattgtaacaactataacgtgatatttatcrgtgacaaagtcacaggtattcctgactacatttatatttgaaagaaatgcttaatttcaattacatgttagtgaaaataaagttgcatttttcctattcagattcacagaccatgtgttaagaatcttgatccaatatgacccaattttgatgattttattaagtttcttccctctgaaataccttttatagatgttctgttttaaatgtgaaaatacctaatatgaaagcttgtctctgtttactcccatggaggtatttaaaaagacatataaatgctttcagaaacgtactttgttttccttcaaaagtatactttataacattaaactgaacaaaagcaacgtcttcctctagatagacacaaatggatttcagtatcatggtgtcaggatttcacagttcttgacacttaacttttgaaggtagagctgtttcccacctgaatctccaggtctggttgcaacttctgccttcctatctatgattcttctttttctcacactcaaggaagccaaccagaggcaatgattgagcacactaatgaatgttaaactgttctactttcttttgtaataaaattatttggaaacttttggtgttccgtgataaataaccaatggattgtggcaatgctcatagtacacaagtgtggtgagactccctggtggagaacagctgttctatgcatggttacatacactgtggaattaatgctggaacattatgtctttcaggcactaaaaaataaattgccatttagcatttatagctgcagtactaaagtgacaaccttagtgacctgaaagtgttcatgtttctctaaagcataggtgggcaaacttatctaaaggtccacatagtaaatattttcagctttgtcgaccatatggtctctactgtgcctctgtagtacaaaaagagacatagacaagacctaaaccagtgaatgtggctgtgttccaatgaagactaattgatgggcactgaaatttgaattttatataattttcagatgttatagtactttatttttttatatttttaaatatataaaaccattcttaattgttgtgagccatacaaaaagggctaggggccagatttggtccataggccatcttttgctgctcacactcttaaatatgaagccagcagccaggtagcaaaccaattaaataggttgatctagctggttaggccatcccaaggagaactgttcttaaaataactcttagctagaatgtgaggtgaggaagtctgatgttccaaaggataccacatatagaaacagaattcaaaattgcatagatagaaactctctctgtctgaaatcaatcaggaccctgatctcaaagattaacaggtagggggcatcaattgtatacagacagattgcagattgtgctgtatcaaaaaatgtggaagtgttatgggggcaaattcgtgcaacacaaatttagagtttcattttgtttttgttttctctccctgaatgcctaattaaaaggagtatggtatttatttgcctttgctagagttagtaaagatggcactattcctataaaattatttgtgttagcaagaacatgaaagtttaaaagcctgggtgttctaagtctatgagaaatatcttcattactgattattaacagcagaattgattttcaaggcatttttgcatgcagaaaaacaaagacaaattaaaagaaagaaaaaaatcagaaggagggtggtagacagtagcaatatggtgtgggtgtagacagatccctgtgattcatgaaaaagttagggctcacagattaactctgtcttgagaaagtgtttcatttcttatagaatggttcccatcaaccagtttcagatcattgcagaaattaacacagaattctacctatttaggaatcaggccgtgcaaaatctacaatactaaatgcgaactccagtcctgtggtggtggtgatcatcgtggtggtagttgttgttttataaatatcagcaggcacacatctggggcttcagtgcttgccacaatgtcgttttctggttgacatatatctaagaaatgcgtatattaacacccaggctatagagccaagcacattttagtgccggctacagctgaaagaatatgtttccattccttgtccatctgttcttggcaacatgaatttaaactagaaacacagaataagtttcatgagaaataagtctaaatggggtttagaacagcaaggtggaagctctaagttaacatttgattttgtagctaaaatattgtttttacttggagtaatccggtgctacagctacagcttaaagttaaaaataatagatttttattattcacttaaaagtttggtggcttggttgcatattctttttaaagtgcttttattaaatttacctacgatcctgggcttaacgaacttggagattgcaaagcactatttgctgccacacagttgaactacactgaaaataaatcattagcatctctaaactctmtgctaaaatggagtcattagtgaggagtgagcactttctgtacaaagtggattccctacaaaacacatttgcttgtttttctatgagtccgacctcaaatatgaccaactattacatggctttcttgtataataatcatgcctcccaccgtattccactcctctagtttttctgctactaaacaatgtacaattgtgtatttatatttgaaaatacacaaaaacacataagaatattacaatggaaaagaaccatatatatgcacctagactttggcctccaaatcaagggtctcagcactctgagttaaataggtgagcagatgggctgtcactgagtcttgggacaggactgtgtgggattctattgatgtgagttcaacttctgctttctggctgaatgcaaatattcagattggaaaggaaccttgaagctcacgcagtccaacctccacctttatgttaagatgatttctaaaacgttgtaaattctgtccttttcatatgattgatttatcaaatgtagcatagtgcatcaaagcaattaggttcactttttggctctgtcactttctaggtatgtgaatatgaataattattaacatctccaatgtttagcttctctatctgtaaatgaggagaatcacatttatcttaaattggtctggagcaggagcaaatgagataatataaagtaattagtcctagtaaatactcaacaagcgacaactcttaactattagcccctttttaatgtcttctgctaaaaaaaaatttaataataatgattgcatgggactaattatctagtatactaccaaacagtattttgtagaatattccttaacatcggaaaaacatttcacaaaattactattgtttcttgaacttctgtacagttacctattactacagacaagttactcaaagatttagggactcccatcttctaatgtataaaatgagaagctccaactccatgatctccaaggtctcttgttcaagtaatttaacaaaatcatgtttgacagcatatcctcatattttatttatagtgttgaaatgtgtatttgctgccaaatgtctgatgtgggatgtataaatggtccttatatacatgtggaataacattaagtttgttgatgttaaaaactactgggtttttttttttttttttyggtattatttggctcagaatctgtgcttcccattttgttttagaataagctgacagcaaatcattttccacagaacctcaaggtttagttaaactgagagttataaaagtaggccatctttttattactttaagtttctaagacaagctttctttgtgaagtggctgttattttttttaatctccataatatcaaatggcattaaattgtggacatatgtatacacattgcaacttaaaaggcatctrctttctttcagatctcagtgaccagctgctggaggtggtcggcttggaaggagccatggagatggggcaaatatacacaggcctgaaaagtgctggccggcggctggctcagtgytcctgcgtggtcatcaggtagttccctttctgtaactgacaaaggcgtttgatatggcatagcctcaaactaattaaaagtatgcagaactctgatagtaacattgtcttctttgggctccaaataatcagttattaatactaatatatttcaaaataatggacattggcagattgtctaaaatattggttagctattactgatatggtttgttggaatctgattctctcttgttgactaccatggacatattgatgcacgaattcaaacatacaaattttatgatttatactcatattagtctactgaagcaccaaagtatttactgggcaaattatctatgaaaacaatgatgagacaccattgacttaaatcatttcatggactaaagtgccacagtaagattttatatatgttttaaattttaactttttcaagcattttttttgcccaaaatttccccccaatttttttttttttttttttttttttgagacggagtttcactcttgttgcccaggctggagtgcagtggcacgatcttggctcactgcaaccccaccttccagtttcaaggattcttctgcctcatcctcccgagtatctgggattacaggcacccgccaacacatcctggctaatttttgtatttttagtacagatggggtttcaccatgttggtcaggctggtttcaaactactgacctcgtgatctgcccaggtgaagccacggattgtagcacaggaataattgatgttatttatctggaagtgttggtgctagaagaactgggagaaacacctttctcccagtttgcaatgtagggttataaaaacaaggaatctcttttggctgtagaaattctgatcgtgtcattaaacataaaccctgaaatttttcttttggcatccagaatttttttaaatgtcactacacttaccaggaagctcataatattcctgtgactaaggtacttttcagggtatttattaatagtggagagttgaagctcctttcattggagataaatttagagcccaactattaccatattgccttccntggtctcatcatcttatatctcacatatagtctgtaatataaagtatttccttgcaatacttacaatgaaatattttcccccaggacgagcaagtctctgccaatgcaaattgatggggagccatggatgcagaccccatgcacagtgagtacagagtagttgataygctatgtcaatctcagttttgctttcctctttgactaaataaccacaataactgatttttttctttatttcttttcaacctatcagcaaatagtctttttgttgttgttgttatgtgtgtgtcagagccactacatttaggttgtagacattatatacccttggcaatgatttagctcttgaatgtttgtgttagcctaagtataaatagatcttttaaatagatcaattataaaccatagatcaattataaactatggagctaaacaaaatattaataaaagtttatctgaaacttttttgtttatttcagagcacattattagaatattatttgcaagaaatgcagacctaagcttatatgtgaacttatttctcagcttttctatgcctccatttggggatttgagggctttcttctccataagaaaaaaatttctctccagtttctaccataattaattgtgttttccagaatgaggtattatttaaggcagacactgcccctctcaaaaaaaaatcagttttcatttgcatagtgaatattttattgcatttcaaaaacatgctaggaactgcttttggcactgggagtagacacatgaacaagaccaacagtgtaatttccttcaagttacttacattcctataatagaggaccgaataaataaacaactacatgataaatataacttcagactgtgagagttattaaaaaataaggtgaaatgatgataagaagctggattaggtgtggagaataaatactacttgagataagggagacctctttgaaaggacatagccaaaagcttagtataaaattaaaaaaaataaaaaaaaaacttagctgggcttggtgacacgcacctgtagtcccagctactcaggaggctgaggcaggagaatcacttgaacccgggaggcggaggttgcagtgagctgagattgtgccaccgcacttcagcccgggtgacagagtgaaattccatcccccccaaaaaaaagacactaaggagggtggtgtgaccaaagcttctagaattaggggagaatggtaagagtttaagtagaaaaggtagacagagaacaaatcatgtagaaaaaaaattgacggtaaagagctaaattttgattctaagtacaataggaaactactgaaaactttaagcatcatctgatttacatttttttaagttcacattggctgctctgtggaggattgattgtattgagcagcaactgagagattggtctatcctagtactctgggcttgggcaaagatggcagcagggaagtaaaatsaaagtggatgaatgtaagctatattccagaggtagaacaggaaaaatttattaatgagttcctgggggtgcaggaggtggaggagagaaagggctgaattgaagtcaactcttasctaagaatgatagtgtgatttactgagtagttaaaatttggagagaaactgattagagggcaacaggggaaggtcttaatcttgcacaagcattgtgctgaatgcttatgttatatgtgagtatgtattaaatattcacacaaattctaaataatggaaccaccattttttagatggagaaaatacaagttctgggaggttaaatagcatactcaagggcaggtatgaagtagatatggaactaaaatccaagactctttaattaaagcccattctctcaaccactactgtaaacaaccttagttacagatttcaaacagcacagattagcatgtaagaaggaatttttcattttacctttgtaatggttttactctgaaactactggctcaaackttgtgtataacacataaacattacttcatctttgtttctggtgtattcctttagctgcctgaacactaaatctttttcctcccttcaccagtatgtgtacacatacatcttttctgtgatccttcactctccaaatgacacttctaaattcacattattctattcacatggatgttaaaaatgttgtttttaatgatggtgatggtgatagtgatgataatggtgatagtgatggtggtgatgctattgcagaggtggtgatggttatgatggtggtgggggtaatagctgctaccgtgatggtggaaatagtggtaaaactcgtggtaatggtggtgatggtagttgcaatggtggtggttgtgatgcaagacagtagtggttggtagcggtgtttttaatgaaaagtcacttttcatcagccttggtaacaaaagaataagtaaatcaaagaaataaaaccaactagcgtccatgaatactctttgtattattttggactcttctcaggagaagaggcatttagcccttattccatgttttgagtcgagaagcggtcacagctatggtaatatcctaaaaaaagttcttagaatgtcctgtacatccagttggagacacttgacccatgttgatgcatttaattctcacaaaaattatatggttagccttattttatgaaggaaataactgaggaagacaaaggttaaatagttcatctaattctacacagctaataaatagcaaagtagaaatggaaacccaggtagtctgactccagcatctgcacgcttcatctctgctccttactgtgaagctcaacacaaaatggccccggtgcatgctggaaatctccctccagagtgtgtgacctttggtaaatgacggactacctttctccctgactacctttcaagcttctccagcttgaaaatgtctgcctattgaaatttaattaatgtgttagaataatttaagcttgtttaacacaagcacttttaactacttttgttaatttttatttcaataagtaataagacattcatttcacctgttaactatcatgacttacaattgttaaattaataaaaattttatgtaacttatattaattttcttcccttgtaaactcacttattcatttaaaacatttattgcagcttacagtaggccaagaatcatagtagactatggctcattattgtgattttacattctggcatactctacttttcccacagccgcatggggttctgaactttaaatttcactgtaattgaagagaatatttagtattcatagcattggtatggttaactatggagcgttttttgcttcagttgaataacccaatatttttcttacagaaaataagaatgctacaatgtttaaattctctgctgaatttaaatatctgtaagctgatattcaatttatgaaagaattgctctagacataattttagaggagagcagaagttctgttttttctattagtagaatatataaaacagaaatatcaattaatgcttaaatatcaagataatacaagttttggagttggtgggtagtgatggtgacacaacaatgtgattgcacttggtgccattgaactgcacacttaaaaatgtaagttaacgtggtgaattttatgttatgtatattttaccacaataaaaaagtcactaatagaaaaattaatgtaagatacatttataaatttcaccaatattgagttcaaagatcaggaaaagaaaaaaccaaagagcttagtactcattcttcaaatatgcacttggtaattatttttaggaccatctagattctgtcactgtaaagccatcaacataaatttttaagtgctcctgtattcattgttttgtaatagtcactgagttaacacaattattttagccatataactattgcttgtgataataagcatatcaaactaaagacaatattaattctagaagagagtatatattgaaaatygtcttagaagagctgtctttaggccagactccagagtctattttattctttcttcttcctcccccatccttcctcctgagcatgtagaacatatgattctgtagtcaatatgttcttataatgggaagaagaaagagcagcttggggtggagggtagagggaatagagtggtaggataggagaggacatagactaggtaagattttattttgtatctgtacaaccagcacccctttactacccatttattttaagtgacacatgaccagtaaagtttaagtgagaagtgactattcaaagcctcaggaacctcaaatttattacaactaaaatggactcatcatttgcctccccatatctctccttccccagatgaggtcttctcacatcctagatctgcgattcttccctctatcatactgagatagtgaaaccattgaaacacctggtgtttcctaagctagaaatctgaaagtcatcctgtacttctctatataccctcaaatccaatttacgtgtccatataatgatatgacctatttctggaatcttttcctttmtttctctccctattaaccactgttttagatttggcccaattcatttctctctcattcctggcaaaaccacatcaatatttccccatctcaatttttgttccaattaagtccatgcttcacatttctatcagaatagtcactataaaatatgaatctcaccatggcactcttctacttaaaatattgtttagttactctctgtctgataaaatgtggtttgagtgaggcttcctgttttaccaacataatctcttactttttaaaaagtcttttcatgcgcttccctcttgtccaaacaaatttttcctcttctttagtttggtaacacaacacatcttttgaggctcattccttgctgtccctcctccataaatgcttccctgagcacaacccctccttccacttctccactcctttttctccaaatagcctaaaagctcagcctcagtgtttcagttttatcaaaacartaacaacattacgttggaattctcagttatatgtccagctccttttagacacaggcttactgaggtcatggaccatgatttggatcatcttggtagccccagagcgtagcactgtacctcacacataattagattgccaataccaaatgcactttgaatttgcaaatttctgaaatacttcttagggtagtataacatttttaaaaagtgtttttctactaaatcttctttcactgaacataatgtaggttggctagcaattcattcacatatttttatatataaatacatgtaaaagttattttgagttatctttattcattatattctcaaagcaaagaatttgaatgtatcagagaagaaattctttctcaatctcaaaagatttaatcsttctatttcctgtatggtatgattaaacttctttgggccacttccctctggattatcaattatacattgcttttgcacattcaaaaagctgcattctgttaattatttgaaatattaataggcatgtattattactcatgacacatttatgaaaagtagtgccaacaagattttaatgcaaaattactctgggtattttgtttatgatgaagacagaaaaaaactcctgaaacttccttccatgtggtagagaacggaaaggaaatcatgaacagattatacattaaatagtgaaatgatcacaggtagactaagaagactctacaaagtgatagctgaggccacggcaacttctagaaaacatttatgtatgttttaacccctctttgccttttttctgtaccttccctggcataatacctcttaagatcttaaacctgtttgcccagtcttagcttacaactaccttcattgtgcaattgagccctgacctggtgcgggaccaatccccaccaagcctgctagtcttgctgtcttaggtatgatcctttcaaatcctgggtaccctatgagcacctgtctcctactgcccagacttctactgtgtgacccattccatgagatgctattttctgacttgactgccagttcccctccctgacactagcacctccttgacttggacactgactgcttgctttgcctttgtttgtgtcctctactaggaagacttggtcttttctctgttgctctagctactgcagttatctagagttcattttgacacttcttttcacacatcccaccataactttamaatacagactattcaaaaagaaaaacagtattctggagcttattacattttttgtttatgtgtttgttttttcaaatcattaaaatgatcataacattaaagtgttagttactctttaatcgcttgctaaatacacaataatctcaggccattaagatataaaggaaaaggttgtataaatttaagtttttcaagacccagcaagttaatatcaactagacaaaggttgctggatttttcaagacataagaacagcctggagatatttggaggaaaccctggtgacaatacctagatataaaatttaccttgcttaccatgtaccagtttctgttgtatgtgtacatgtttattacttatttaatttccacagcaaccctaagatgtcagtaaagttattataatccccatattataaatttaagaaaaaacctgaagccagagaagtcaagtaacttgcccaaggccacacagcaaaaggcagaaataggccattgggttttaatctcttaattatgatgctttgctgcctcactcagtcactcttcagaggcttaatgtatttctttctttctttctttctttctttctttctttctttctttctttctttctttcttttttttttttttgagatggagtttctctcttgttgcccaggctggagtgcaatggtgtgatctcggctcaccgcaacatccacctcctgggttcaagcrattctcctgcctcagcctcccargtagctgggattacaggcatgtgccaccacacctggctaattttgtatttttagtagagatggggtttctccatgttggtcaggctggtcttgaactcccaacctcaggtgatccacccaccttggctgcccaaagtgctgggattacaggtgtgagccatggcacctggctgccttaatgtatttctaatactaataattaattacaactctatcatttaaaacagaaaatcccttttcatcttatttatattatttatttttatgtaatacatattttgcttcccactgcagccaaagctatccatcatattgttgccagaattactactgaccaacacagctatgatgatcttactcccttgatctcaaagttcaatgcctcctcattttacacagaaaaaagttcagaatctttgtcatgacattaaattattctcccaaggccgggaccagactgctatgcctcataggaaccacttcccagaggattaccatgcatagtacttcgttttttgcctcaaatccttaccctctattttgtgctttagaaatagattcattcttctggtctccaggcaggctacctccaaatctgtggcttcttccagtagttatctaggactcatggtttgcatttctttttttttttttttttttgagacggagtctcgctctgttgcccaggctggagtgcaatggtgccatctcggctcactgcaatctccacctcccgggttcacgccattctcctgcctcagcctcccgagtagctgggactacaggcgcccgccaccacacctggctaattttttttttttttaatttttagtagagactgggtttcaccgtgttagccagggtggtcttgatctcctgaccttgtgatccacaagcctcggcctcccaaagtgctgggattacaggcgtgagccactgcacccggcccatggtttgcatttctttcatctagtcttacctatggtttattaatttsatacacataattttccccttttagtcagattgcctgaattaattattctgtcctattgggatatatgtatttttataagttacttcaaaatctttctggaaggcaatgagatataaatacatacatactaaaaataaaataaaatctcttccttcaatgccaagcttagaagcaatttcctcatgaagcctttttaacttcccatctgtcagaaatatttgcctgatcctttgtactcctgtgactctgttgatatcttcttaacagcattccaattcacagacttgtatttcggctacgcatgcctgcatccagctcttctgacttaattgtaagcatttttaaatttcatctttaattccccttcatactttgcaaatgtcttcttacatagtgcaatttctgataagaaattcatagtcgtttgaatcattgctttgcaatatgtaatacgtcatttttcttaggctgctttcaagatttttttctttgtctttagttttcagcagttkgactttgatgagtctgggcatgggtttctttgagcctatcttgttttagtttcactgagcttcacgaatctgtagctgtatgttttgccacatcggcmcatctccagctattatttcttcaaatattgacttctacgccacacactctctcctctccttctaaaactctgatgacrtgtgttaagcactttatgtattgtctcatagatctttgagtctgttcactttttatttccttctatattttctattgtttacattggatatctattcacctgtgtttgaattcactgacatttttctcttttatctccattctgttgttgagtcctttcagttattttttatgttgttcattgtatttttcagttttaaaatttccagtgattcattttttaactgtcttctatttctcagttcaggctctctgtctttcatttcatttcaagagtatctgccattacttcttagagcatggttataatacctcttaagtctttgttaattccaacaattgtatcatctcagggtttgcatcattggctatatttccccttgtgtgtttttgagatttttctgtgattcatatcttgagaaactttttattatattctgaacatttttaatattgtgttataagactctaggtattttcaattctcacaggaaatgttaatttatkgttgttgctgttactattttagcaggtagttgactctgttaggttcaggttacaaaagctgctctatcttctgtgagttgtggttccagtatgtttgtttggttttcaaagtgtttgcaatgttattcagatgtatcttacttgtaaaagatccatatgcctgtctgaaaacttggtgatgatatacccccaaatgcagctctcaaagtcatcagtatgtttgttaaggtcaaatctatgcatacacagctaagggataaactcaggtgatcaaatgcaacttcataggatagctttctcaagccacctcctctccatgatctctctgatattttttttttactccyagggctctcatattgtttctctgaccaagaatccaaggcttttgtttcctcactttgtcatatatttctcgaagtagcatctgcctccagggttctgtgataaaggaatagagagagaaaaaaggagtaggactccccccatgctttgggaacatactttctctagtcagagaaaagatgtctcctccattggagttttaattaccttccactgccatggaattgccagaggactgggatggaaatgattaacagaattttttttttttttttttttttgagatagagtctcattctgttacccaggctggagtgcagtggcatgaagttggctcactgcaacctccgcctcccgggttcaagcaattctcgtgcctcagcctccctagtagctgggactacaggcacacactactacgctcaggtaattttttgtatttttagtacagatgggttttcaccctattagccaggatggtcttagacttctgagctcaggcaatccgcctgccttggcctcccaaagtggtaggattacctgcatgagccacccactgtgtctggcctgattaacgaatatttttcccattcactctgatctgtagggcccttctttcctatttttgtaccagtaggacagggtttttcttggcactttctatctgtacctggtatacaattccagtttttgttctgcttttaagtccaggccaggaggtgcaagagtagagaaaaaaactaaaaactaaaaactcatcactggtttgatggcacttcatgttctggtcttcttccccaatttgccttttattattttcttttcagcaacttcagatatctgcttcatgtgttctgcccagggtttatagtgcattcagtgggagagatagagtgaagagtgcttattccttcttaactgaaattggaacccacacccccacaccattagattttcttgtttatgactattttgagatctggctaaattctctccatcagattggcatattattagctagaactacctgcgtgctgacttggagatttcatagattattccccattttcatattccttccaaaaatactaaataagtctaataaatgccctaaaccttgaatcttaaaacatacccaatttgagaaaacatcactgatattttttctactcttgtgccccagatttaagcagtttgagacagcatttaccacattgagagaaaataattgaccaaaaaagtttagttgtttttacccacttataagattaaggttttaggtatttctataggcgagtaatgatgtggatgaccacatgagattttcttttttaaattacattgtaggcgaacacattttaggactattccaagtaagttatctgttagtataagasacttttagactatacggatgaggttaggtgaatgtccaaggtcatgaaacaaagagttatagaaccgggactgttcctaccttttattattgctgaaattgtcagcagttcgttaagcttgtttgcctaaggataaaaggttcagaaaggaagaaataccatgcttctgaggctttctgaaatgtgcagtgatgaataaaggascacaggtgtaaaacagacagtagtccaatgagactcctttatattttggctttctttagcagttccacacttagcaaacacagcctagggcatctacgtgaagaagcaacataaaccattgtaagaagagattgttttaatggtcctttcaaaggcccattcgaagttgaatatcatgaaaatcctttctatttcaaataccatttaaatgagcacttcacataatatatattggaaaatataatggaatccgttgatcacttttttcccatagtctatgtgcttatatcttaatttttagttcaagaaacaataggtattttttaatttaacttggggatagaactatgtttcttgactagaagctactaaagcctaaatataaacagtacatgagaaaagatttatagcaggaatagggcaaatttgagaaattaaaaaatagctagaattcgcatttttttgtgataggtggatctccttttacctcctatgtaaattaactaatcacagaacagaggactggaaacaaattagtaagttgtacaaccttaccactcttttattacagaatctcagccattttattaaaacttctgtttaccagatttttatttaaaacctattctaggttctactattttaaaagttattttgagaaagttggcatctgcaactgaaatagtcaactttcctagcactttaacagaaattcaatgtagtctgaggttaaaaatatttttcactccttgaaaataatgttttctgggatatctgtaaggaaggaggggaaaaactgcttaggaagtttactatccaaaggggtagaaaatagaaatgagggctggaatccacggtcttgtctttgcttttttagtgacttctggactttggagagttatttaatatttttcttggaattattttcctagtcctaaaacctgctacctacgagtcacaaagaaatattgaatggttgttgaaaattaccatatatcacatttagtgatattaagaaagcattaattaatttctggtatatattaagtattgttatatttaataatacatctgaattttcttctttttcataatttagactaaattccctgtaatccccaattatacccccccaaaaagttaaacccatgttattctacagtgggacagtatttgacatctttgaaattcggccaaagtgttacagaaaatgtagcaacatcattattgtttcctcrttatcatttacagttaaactgatattaaagaaggacattgttttatcataatgtttaactttcataattacataaaaagaaaatyatgttaaaactcatctagaatagatgcactgaaaacagtgctctgaaatagtgcgatgaagtttatccgcatagttacataactcttgaatctcccaagaccgttgcattaaattctttaactttaaatatcattaaataattcttaatgtaccagtttcattatctggatagtagccttgttttgaaaatgtgaaaataatattattttctagttaaaagttgcacagcgattgtagcaacacttgctgacttggtagacacaccgtttttaaagaatcttaagttgctctaatggcttattttaccagagtgggagaaaaaatcaacagaagaacgtgtatttttagtgatgaaagaaaaagactaacccatatgtaaacagtaagaaaatgctttaacaggtaggtgtagataattagtattttcctgatgtgcctagaaattgcattttgcctaatatttaaatactatagatatctgttaaagaaataaatactacagtattttttgttgttgttgtggtggtgaggttttttattttgtttttttttttgtttgttttttgtttttgagatggagtttctctgctgttgcccaggcaggtgtgcaatggcatgatctcggctcactgcaacctctgcctcccaggttcaagcgattctcctgcctcagcctcccgggtagctgagattacaggcacctgccgccgcacccagctaatctttgtatttttagtagagacagggcttcaccatattggtcaggctggtctcgaattcctgacctcaggtgatctgcctgcctcggcctcccacaaagtgctgggattacaggggtgagtcactgtgcctggccagtttgttatttaataagcctaaatgttgataatttgaagagagaaaattaatagtcttctgcccccttgaaacatactggcatgagcagactgctgttcttgtgagtatatgttttaaggtgtgagtggtagtgagactccaaaagcaattaaataaaacataaactaaaagcacctttttacctaaatcttcattagtaaatgcttttgcataaatttacaattttaaacatttatttttccaaagactggcacatcagtgtttagttggacattattttgtgtgttcccctgttacttatgcattaattagtttggtttacctgtgcataatttttcctaatttcataacaattgttgttttttgtaattgacaacacaatttactgcttgtatgctttctggccctcaagcaacaatgttaagatgtaaagcaccaagcttttcatttcagattggttaaaaaaaaaggattgattgtgactaatttccaattaatttgcagtagttacaggggaacaaaaccattgcacctactaattaaaatttaaaatattccaaggtgtcatctttaggtgtctctggaatatataatttccattttggttcattgctggatctgtaacacccgtgagcttgacagctctattaatttaaaggctcagtaatacctattagtacaaaacatgaaaaaaaaataccattaatcatttattttaattttgcagctctgtcattttctcagtatgttttaaaattatgatgacaccataatgtgcacaaatcgacctggataaaggggaaatggatcatactactttggaaagatactgaagtacattattagagcttaattaatgccaagctgattagatatgattgctttttgtataaaaatattttaaagatttttttcttgtcatagcatattttaaatgttttccatcccaaatgttatgtttacaattaaacttacattcttgtcactcttcactttaatgcattcaatttaaatattgttcaatgaatgtaagtttttcttttattctttattttgaaacctgaattaatctagtcattagtttccaattcaaaaaattaatttcattttggctagcagatagtaatatctctcataatcatattctcatgtaggaactccaaatctatgttggacacaatatctaaaaacatgaaaggttaaaaattaaatgagaaatatgccagatatgtaataccttatgtatttatattgatgtgacccaagcctgtaaatatgataaaaatgataaaactgtatgtacttatcagaattttgtcattagtttgcaagaggaccaatattcacatccagttcgaaactgaatatcttcctctggaatgtgcaaaattggaaataatctcccagttgatggttatcatcagaataataatgcacaggtttgattgcttttagcagttagaaatctttctgctggtggatacagactatagactcacaaggtctgggcctgactatcctctcacatttgccttctgaccttgccttttctaactattaattttctgtgatctccgattttgtgtattaaaattagaaaacaaggctaccacattctaagctcttcattaaaaggcaataatctgtattgttgaaaattttaaagagtgagcctgcttatcactaatacagaactagtccactgtttcacagggatcttcctgggatagaatactaattttaaataaaaatttgaacttaaagtgcttaataaaaatgaactgactagaatatcatagtttattatttttatttcctcgaatattcagaagacagttgcatatatttctttggaggagacttaaaaaactcaaagactttttttttcttttaattatactttaagttccaggatccatgtgcagaatgtgcaggtttgttacataggtatacatgtgtcatggtggtttgctacacccatcaacccgtcatctaccttaggtatttctcctaatgctatccctccccttgccccccaccccccaacaggccctggtgtgtgatattccactccctgtgtctatgtattctcattgttcaattctgaattatgagtgagaacatgtgctgtttgattttctgttcctgtgttagtttgctgataatgatagtttccagcttcatccatgtccctgcaaagacatgaactcattcatccttttttatggctgcatagtattccatggtgtatatgtgccacattttctttatccagtctatcattgacgggcatgtgtgttggttccaagtctttgctattatgaatagtgctgcagtaaacatacaggtgcatctgtctttatagtagaatgatttataatcctttgggtatatacccagtaatgggactgctgggccaaatggtatttctggttctagatccttgagaaatcgccacactgtcttccacaatggttgaactaatttacactcccaccagcagtgtaaaagtgttcctatttctccatatcctctccagcatctgttgtttcctgactttttaatgatcgccattctaactggcgtgagatgttatctcactgtggtttttgatttgcatttctctaatgaccagtgatgatgagctttttctcatatgtgtgttgrctgcataaatgtcttcttttgagaagtgtctgttcatatcctttgcccactttttgatggggttgtttgtttttttcttgtagatttgtttaagttccttgttccattggtctatatatctgttttggtaccagtaccatgctgtttgttttggttactgtagccttgtagtattgtttgaagtcaggtagcgtgatgcctccagctttgttctttttgcttaggattgtcttggctatacgggctcttttttggttccatatgaaatttaaagtagttttttctaattctgtgaagaaagtccatggtagcttgatgggactagcattgaatctataaattactttaggcagtatggccattttcacattaattcttcctatccatgagcatggaatgtttttccatttgtatcctctcttatttccttgagcagttgagcagtggtttgtagttctccttgaagaggcccttcacatcccttgtaagtaagtcgtattcctaggtattttattctctttgtagcaattgccaataggagttggctctctgtttgtctgttattggtgtataggaatgcttgtgattcttgcacattgattttgtatgctgagactttgctgaagttgtttatcagcttaaggagttttggggctgagacaatggggttttctaaatatacaatcatgtcatctgcaaacagagacaatttgacttcctctcttcctatttgaataccttttatttctttctcttgcctgattctcctggctagaacttccaatactatgttgaataaaagtggtgagagaggatatctttgacttgtgccagttttcaaagggaatgcttccagcttttgcccattcagtatgatattggctgtgggtttgtcataaatagctattattattttgaaaaactcaaagacttttgatagattatatcatatcattctcatgacaaatctgtgaggtgaacaaaatagctattattaaacatgatttttaaatccataaatataatttacaactcttttatccaagccaagtcaagaatatcaatgattggccaggcacagtggctcctgcgtgtaattccagcactctaagaggccgagggcaggcagatcacccaagatcaggagtttgagaatggcctggccaacatgtgaaaccccatctctactaaaaatacaaaaattagctgggcgtggtggtggacgcctataattccagctactcaggaagctaaggcagaagaatcacttgaacccaggagacgggggtggttgcaatgagccaagatggcgccactgcactccatcctgggtggcaagagcaagactccatctcaaaaaaagaatatcagtgattcatttattcattctttcagcaaacatttattgaattccatctctatgaagctgctgacattttgtcctagtgttacaatgaatggagagaaaacaatacaaagtgaaccaaaaaaagatatgatctctgaactcagtgcaggtacacataactcaaatagtcccacaaatataaaatttcaataatgatataaggtctgtgaaggaaagttcatgatcctttgaactgtgatactacggtactgtggtactattatactgtgacagggtataatagaggtgtttgatctcgttgtagaaggtccaggaaggctttcaaagaaactcaaaattgacctgaaaactaaaagaggagaaggatataactaggccccaaagagagggaagagtgtcttatgcagagaaaacagtacagtgtgggaaggaacctggtgtgtacagggttccgaaggaagacatgaaagaagagaggcagcgtggggtgaggcatacggtccagtgggagcagaacagcaggacctgggagccctcatgagaaatgtttagctttaatttaagggtaacatggaagtaaagagaggtttcaacaggaaagtgatgtgagtagatgtgcacggtgacaagatcattctaggtggggaattaattrgcgggagaggtaatgaccatttagaagaattctataattgttcaggccttagaacatggtagtaaaaaggaaaaaaatttcaagatatacaaaaaatatttgggggatgaaaatgattagagtcaataayagattattggttataagaggtaaggaaaagaaggtgtcaaggatgatctgggtttctggatcattttgaacaactgaataaatgatgaaacaataccttgaaacaggagracctgaaaaaacaatcagtttcctctctaatccagtactatttcaactgaattattctccctattcaatgccttaagcacattgttagaaatatcaattatcataacaccaagcaatggcaatttttttgtggataagttatcaaaattgaacatctgtatccaattgtattaccatgatgtagtttaacgttgaggagaaagtctttcagatcagtgctatgatgctccaaatagccaaggttatggctgagtctagaaattgggccattaaagaagtttcttcttctaataagacagtgtgagcttattggactcccttgattaaacaaacaaacaaacagaaataattatgctctctgatggttagtaaatgccccacattaatttttttctaacctttcttttgggtaaaattggtgtctggcatgtggcgggaatgctgccaggtgccacagggagaaggcagatggccataatatgccatttcccaatgccacccaaggaacacagaaagctgtgttgtctcagatagaagaggggttagcaaaatgtgtttccacgggactaaatatagtaacactaaaaataataacatttattaagcatgtatatgacatgcatagccttatttggtatttgtagtggtctttcaaagtaggtgctattgttatattactttagcaaacagagaccgaaggtcaaaactgagattctttggtcagggttttatagctgccagtgactaatctgggaaacaaatccttgcctcatgtcctgggtctatgtccttaacaccattactacgtgaaaaaggccatatagaaaattttagttgaaatattactcagtaagaaaagtcaagtcacaagttgtaaatattctctagttaagaaaagaagtgtttttgtattgttttgttatgtttttgacttctattttccatgtgaccacagatttggagatactctaagaaaagatgaacagttactggtttaaaattgtgaggatcatttctctgtagagacatggaaataataaaaatgcttttaaaatgtctttgaccttccctgacaactaacttagagccacaaaaatattttggaatgaagaacacaatttatatgttaaaagagatttcaaatccaggtatgaatatttcccatgcaatgtggccaaatagtccatcactttcaggaataagtgttctcttttccatacatatttaaacttcctgtgaatttaattggcaagtaaacctcccaactccattttttaaggattttattttaagtcttcacaatgatttctctgaatttgatgttagatcgaagactttaacattaaacttggaaattatcattccagaaaataatggctagaatcataaaaaaaaaaaaaaaactggcaaaaggattttagaaaattgttatgtttcattgctttgcttttttggcagttatggacctgaaaaatttagcatgtactttattcccgctgtcatatggctcagctachcacatgaattcaaaatggtttccattattagaaggagacaatcttattccagaatcaagctaagtaacttttagtgttccagataattgctaaattaagctctactcacagatattttatggtatttattttgctctgaaaaccccattcatttttaaggtagctgaataaattcagtgataataaactcttaaagagatgaagcagggagaaaatttttggctagatacagggtgartatttaataggaaaaaatgctacctgctgaggtatgtttgaagaaccataatattattaagcccactctggtgcaaagcaatgagaattaattaaaaagagaatgcatttaagccaaatttgatcagttggtacattatcaaaattgaggaatgttagtatacattctaattcagaatttccacagaatgatttctgaatggtggcacttagtataataaagatacgccaaagaaaattatttccacttttatccatcttttagccattgacccaataaatcatgattttaaattaaaattatttctaccaccttatgcctcataattctgaatttaattttcagtgtttgacttaattatatcaagggtcagcaaattatggcctgtgagccaaatctgaccagctgcctgtttttgtgtagccaaagagttaagaagagttttcatatttttaaatggctgaaaaaatccagagaggaataatatttcctaatgtgaaaattatatggaattaaaattacagtttttagacatagagtttattggaacatggcaacattaatttatttacatatagcccaaaactgcctttgctgtataagggcagtgttgagtagttcagagaccacaaagccgaaatcatttattatctaatcctttacagaacatgtttgccaacccctgaagcaatatgaatgactacttaaatatcattcagtagatcactctctaatataataattctatatttagaattaagttaaataatttaacagtttatatcacggacatacagaccattgtaccaaaccgaggcatgcctcaccttatttcatgtagtttgaaggtttcaccctaattaatggaagactgcctaattaataggcactctgaggactgattggaaatgtttatatgatagcacttctttcagtttttctcctacctctctgactgtttgtattctcctgctgcactcttaaatggcagcattccccagttacaaagtctaacatctgctattcatatatgccccactggtcttcagtaatttcgtctcaattgctgacattgttataagatgatcaaacccaaatctatctcaagacctgttctcccttccgaacaccacatgcacagacccaaaagatactgagcatctccttcagaacgtcaccctcaacagtaggttcaccaacttcctggttttcacccctaccaaaaacgcttctctttctataaaaagcatcactacacacattacgaagaccacaagcatggaaattgcagtaaaatcttcctctttttccagtgccccacacatccactcacccatcgtatcctgtacttctgcctcctcaatctctcttaaatctgcctccactctgttcccattggcactgccctgactaaagtctatttcacttctcttctggatcaaattaaccttccatttgatctccatgcctctggtatggcaccagcccctaatctctgctgtcagagagatgatgtaactaaaactcagttttaattctgccactgtccctccaccatgatctaaatggcatattttttcaatcttattgtaccctgaaaatatccctagctcaaagcatattacaacctaccatcacatatcttctatcatcattatactacaagcacctcagttaggtttaaaaatacatatgtatctattcaacttgcaatcctccacactaaaataaggtaggctggtacctagtacattaacaataaaggtaattaaagttgagtaagttaggatatttgttttcatgtgttttgggggcctagaaaaagggactttcattcattcatttattcagttggtcagtcagtcaacagattcttattggtcttgccacttaggaagagaagtaaaatgacaaataggctagggcttctcaaatttaaaagcacagaggaatcatctggcgttcttgttcgaaagcagaatctgaatcagaagatctggggtgggaccggggagtctgcatttctaacaatgatgtcagtgttcctagcctgtggatcacatttggagaactaaaacactagagtgcaggagaatcacctgcagagggatttttaaaaagtatttagaagttggtaccaaaatagtatatgcacgtgtaacgaaaaaaaaaaaaagcagaatgtatagacttgcaagaaaaatagccatcctgtgtccttttttctgtgtcaacagatcttctcattagatgctaccactttgattcttggactatttcttctgattatttactccatatctggaaatacgctttgttgtttgtttgttttttttttatggattagttttaggtatactctacttacttagtgctatagaaaggtggtttctaacactcttacattactgtatttacctctattactctattactaatagttaacatttactgagtgctttttttgtaccaggtaacagtctaagcatttcgtgcacattgattcatttagtccttacaagaaaccagtgagacactatatgaaaagctctacagtattgatgagggaaatgaatcgtagtaacttgctcaaagtccctagataggaaatggtgggcctaggcagccattaagctgttctgcttctgagaagtatataataattttgtttaaatcaataaaaaatatataatcattsagactataaaaatattgtcaactgcagaaccaagtactaacccacgatcacattttctttcctgtaaagcttcagaatttctttcttctctctgcaaagtgatccttacaatagatctcatttttcttaaaaaaaaaaaaaaaaaaagacaaaactctaccatatcaatttatctattatccacactccttttgtttatatgccagaagcccttctctttaggtttctgtctagctctcttgcaaatctgtcatcctggatctgagttgaatcctttgtttttttgactcgtctccttagctcactcatttactttgctagaaaacaccccaaatacgttttaaagggtacataagaggcaaattctctagatacttttgtgactgaaaatgtcttcattctacccttgaagttaatcaatacattgactaagtatagagttctcagataaaattaacttttcctctggggtttgaaggtgtttcttcattgtcttctagcgctaatgtttttgaaaagcctgatgccatgctgatttttatttttctgtaagtgacctatttttttttctctctgaggacatttagaatcttctttttatcccttcactttgaaattttacaataatgtgtgatttaagctaggcaggacagggatagaaatttgattggcaaaaaagagagggaatgctctctagggcaataactagcacaaaggtgcagaggtaggaattagcaaggagggcccaggagatttgagagtcaactatcaaacccagctcttgcatttacccacttgactgatgttatgcaggtagcagaacccttttaagtctctttgtccttcagtgtaaaataagggtgttgacagctacctcccagagttgttaggaggccaaaattagacattataaaagtaaaattatttttaaaataatttcaatagcaggtacaagaattcctgaaagaaaatagatccacctctgttctaaacttaacagaatgcttcaataaatgcttatggaaaggatgtcgagcggttgttcagataacaaaagaaagggaaatgctacttttcataataaagggtttggaaatatttgatgctggaagacagggaagcaagaaagaaatcaccaaygagctgaaccaaatactgtctggaaaactaatcagggaagacccatctctcttccctctgattttagttgggctgaacaaagtctttgaagagaacacaaatatctggggaataaacattatttgctatgtgctgtgrgatacaaataccctcttctatcccttttatgaaattctacttcagttttgcactcttctcygataatatgttttatgggagtggactttgagggcagctcaaagaggtggatgaaatagggggcacctgaataacgtgtgtaaaacacttagcaaaatgctcagcacacagtaagagccagatcaacgttattttttattctggctgttattcttaacattacaactatgaggtggaactatcacaactatcaaactatgcaaccttaaaaatgtaatagaaataagaagatgaagactatgctttgtaatctttgattctgttactggtttctatatgtgcatccttatttcatattgaataattataaaagtgaaactgaacccacatttttcgtatttatagtttttgaagtggccagtcttaatttgaaacaggaagacagaagtagaaatagtcatgggcagtggaagaacctttctctgccactgttgcttttctagaagggtacatgataaggagaaggaagagttttataggaggacaccattctgtatctgatagaatttaccttgcatgttgtaagcaatgctcttctaccgtcatggaaccattgcagtttctaggagccccgtcaccactgtttatgagtgcccagtatcctctttcaaataataatgtcagagtctcttagaaactaaacaaccaaaatcatgttgcaaaatgccttgttcacagccagtgcccccaaaatatttgatgtatcaaggaataactgagaagtaattacctgacgcttaatagaaggaggcactcaaaggccatttggttcatgtcctcagattgctgaaacttaatatattctaaattctttggggataaaatttttactcattgttatttctctagtggatagaaaattaagagtaataaaaaaagcaagaatgttcaatgtatacaaaacaggcatcagagtcataattacaggccctgttaaccccccgtaaccaggattttcccacatgagcaacctgagtctgagggttcacttgagtctctgcagcttcctagagcctacacctggaatttctgtaactgtgacaccgacaatccatgtggcttggaattactctcgtaggattttgcttctgcccaaatataccaagacatgtaaatatccaatgaaataaggcatgtgaagagacagcattcataataggcatttactgaatgctagtttcctccatgtggtctcccctaacaaagaagaaaatacaaccaattggttctcgtttccataaacaacagacaaaaaggatgtggatttcattttttgcagaaataaagttagagtaaagaaacagttgtgtactttgactgtagaaatgattaaacaagcaagaagacaggttacatataatttttaaaatagtactggccattattctgattagtgactgcaaactagaacttgtgttttacttagtcacatagattaaaggtcccattgtgtcaagagcactgaatgagatactgtgctattttttcaaaggcataaaatcatgtaatttttttttttaaaaagtttttaatataagaatagtcataaacaaaatttatatgcccccgccaaaaaaaaacacagagaagaagctaagtcttatagataataattatgtgacattttggttatgctttgtcataaattgatactaacatatatatataaatggctaggaagatatatttctttcatagtcttaacaactatttggaaataatgatctaatttcccaaaatgccctaatgctattataccgtgtaaagcatttagtccagaaattatgaacccgaaatctcaaccttcttactttagctcttaatgttctgtttgaatctaaggttatcatgtaagtaatatgtgataactgctttcccagtactcatttaaaaatgacatttgtgcgtaaaatgattcattttcattttcaatgttmaaaaatagtgcctttctgcttagcctcccatttcagcatctgtaacaccattcaatgtgcttgttcaatttatctttcctgctagattataatttcttgggggcagagcttgtatattgtctatttattcaaagttcctgatacagtatctgaagcatagtaggggctgaacaaattttgtgaaatgaataaatgatgaatgatgcagtattagaccctgtctacagctagaatttcagaggagtttaaatctcaatgacataaggtacagtatactctaatgctgacttattgagagaaaatctgatatagatcattttcaatctacatagttaagtgcattctggtgtcttaactatccaactatcaattccctagttcataagataacaaaaataagatgaagtcagatatccatagagtttgaggctgggttagccttagtggccttttacaggtgcaatttatttttgcaggaaagagaacactgaatccttccagaataacctgattccagcagacttaaataaagttgttcattctttcaaggtttttcacatacttctgtctttctagactgtgaagtaaatttccatttcccaaaagccccactgcagattttaatgatcctgtccacgtgatgtacatttttttgtttcattgctattagtgaatgacaagtgaaggatattcattttaacttgaaaatgtcaggtatgcactttaagagatatattttttgcagcttttaatgaggtggtgcttctttttgaaagaaatactcatctctgatgcgaatgctgtgcaggtgacaactgatatttaataagcgatggttcttgtattagtcgcagttcgctaaagaaaatgtctcagattgcttttgaaaaactcttagcgtcactagcccaaaggcaagatgtgacctttttattacataatgagaatcatttattatcttacaatgtatcttaaagtcacagacaaaatgccactttgataattgctttcaattagctttgagcatagcatatattcataaaatgtcttctctaatttagagtcgaattagagaaaattgcagacgtaatctactttaaggttgtctcatttaaggtgattcgtagttttatatcaaagaaatcaaaacgagtagctttagaacagtctctcaaagtgttttaagcaggcttttcaatatttgattctattatattaccaattaattaacaaattagaaagctagttcatcatttctgaccttttatgcatgttaacttttaactttcatttctaatgactgtttkgaaattaagccttgcagttcatgttgaaagagagaaacaatctgattagcaagataaataaggcttgccttgataccaagtacatcttgatattgggctgtaactaggactctggaaactataatggtgccttctttcctgacttcaataaatgatacgtaactaatggtcaagaaataatactggataatcatgtaacctaagcaagcagttctggaatattgctacaagtgaggttagaggtaacatactatttaaaatgcaacttcagataatttttaaaattattatcctgagcactgggatattatttaagtacrtatccctatmtcccttaaaaatatttttgaaataatagaaactctgaaattacattttacacttgcggtgtttcagtcactcatgaaatattattaaccttaacagagagtctcacaaattggtattgtatctatctggagattactctattctttctctctctctctctctctttttttctagataaaaattacacacaagaaccaagccccaatgctgatgggcccgcctccaaaaaccrgtttattctgctccctcgtcaaaaggacaagaaaccgaagcaaggaataatcctgtgttgtttcactcttagaaattgaattagcataattgggccatggaacacatatgctggaaatctttgaaccatttcaagtctcctgctcatgcaaaatcatggaagtggtttaacagtttttgttactaagctaatgtaaaattcagctattagaaaatttattgtctcagtttttataggcatctttgcatgaagaaagcagaagtttacctgaagtgatactgcatatttttggtgcatgcattcccatagatttttacatctcccacccaactcttccccaatttccttttactaacctgtgagaaaaacccgtgaaacatgaaaaaggaaataccatgggaaacgtgattctcagtgtgattccaattattacgaagcactaatcagtaacgctacaatgatcataattgcagattgctatacgtttcccttttagaatcagtgtatcagtgacctatgacttgaggagaaacttttaattcgaagattttattaaatagttgactacaataccttgctatatatacatagtttttcttcaacatcttaactcttctgagtggaaataaaaatatcaggcataaggttttctcatgctgaaaaatagaacgcggtttttattttgcttagttttctttttaattccagaaataagtgaaaacatgttacttgacagtcaagtgtggtaatatggcaagccttgttcctttctgcatgagaatctaggagagaattcataaccacaccaataacgaaatagaagttttaaactatgtgcctaatcaatgtgtttcccaccaaagattcagaaaacaatgcttgagagaaatgggttaatgcataattaattaagcattgtggagcaaatttagggttcctgtgattaattttgtgatgactaaaatgctggaaagcragtgagttgcccattaattatgattaaaattctcacctttcacagacagacaataagccagacaacacaatcaaagctcaatagatgatttcttgcttttttcagtcatttataaatataggtgtaatttttcatggatcagttaagtacacttgaaggaagtaaatgattgtatcagtttatttctagtataaatgggtacctgtaataatactgagctcttggaagcgaatcatgcatgcaattagctccctcctcctcacctactccactcccatctttatgacatttcaaatgtttatttggraacaacagcctagatcactgttgaaggtgttcatggcatagttggagtctctgactgtttaaagaaatcacagaacagtacttttcttttagtgtttcattaagcctatgatgtaaaatgaaatgcttctgagcagtcttgtaatattgttcattcatattgacctgcatctcatcattgcatgttttatgttttcaaacatgccataaggaaaacgagtgcctgaactgcatgatttattagtttctctccactctgcattaaagtgctaatgatttatcggttctattttgttattgattcattcatctttctttgaataacaaatagcatttagtgattctgttgaacacaatcctgtgcatggatttatggatttcaagtgaaattgctataattttagttctttggtttgaaaactcaactgaatgctgttatatcaaatagctgctctcaagcaatgtgctataatggaagattacgtacaaagtgtattcttttagtgttcctggaacattggacggtaaatatcaatcaacaataagcttaattactttaaaaataaaagcttttgaataaaattaagacataatttagcattcccaggaaaattatgattacaattgcaaatttagtacagcaatcacttgcgctggtataaaataaaaaagttgtttggcagaagagtaatccagaccaaaagaaagaaagaaatctcaaaacagtaacaagtacattactgacataatgttacgtaacacacacattgattttttgtatctatggttgcaggtaataaatattttcacatgaattgacaaaattttctacaatgggcaggcaggctttgtgtcaaaaacatattttgaagccacaaattattttatgttcgctacaacatacaattatgtcttggctaccttttatagtatatagtttgaaggcagcaacagtttgtgaatcattcttaacaatctgtacagtagaaagctgttggatagacagtgggatgagacaaattaaacaacctgcttataagatttcaatgattgaaataatgggatgcagcttcacttcagtgtagctgtataactacaattagtgctaatagtggttacattttcagtcagatggattctttggtacccataataaatgttcaaataggaatccaatttgacttttctcaactcattttctaaatacactgatgtacttgccccttcaagtatactgcccctggggtttggaaagtagtttttaaaaacgtaacttgatgggtttgaaatcagagaagatattctcatcagttttatgacagcttcatatgaaaaatatatagtttaaggaaaattctatagtatattaaaatattgaatgatgaatgttgttagctttacaagatggaaacttctcttctatgtgtgcagataaattttcagctattgagtcgccctcttttaatataggagacataaagttttaagtggctgaaactcttaaatgtaaattaatgctggacttaacagcagtcagaaacaaagagggaaaagagacatgcactctgctaaacattgctaggcactgagttgatgagattccagagagacatttcagagtaaaccttgatatccacgcttctaagaaataggaagggaggtatctacatagaaccagaaagtttaaaagacgtaaatttattttttccacttccttgtgtacaccatgtatttcatgtgaaaatgctgatcaatttattgtggtggaaggagatatcttgcaggaagtttaaaaattaacattttaaaacagtttttattttatttaaaacaggttcatgtgatcatagccagaataaaacaaaaggctcagatgtttagcctagtctactgcagacagaaatttaaatccagtgagggctaatgaatcacatacgtgtttccacattttattttgttttcgttttttaggcatatgggaagtagttgcaatttttcagggaagaatatgttttgaatctcacactgtattctccttgaatctcacactgtattcttgaatgagacaagattttgagatcattcttttcctttttgtgtcaacgttagtttgttgttcattggttataaaaaggaaaatgtggccaggcgcaatggcttacgcctgtaatcccagcactttgggagacagaggcaggcagatcacaaggtcaggagttcaagaccagcctggccaatatggtgaaacctcgtctctactaaaaatacaaaaattagccaggcatggtggcacatgcctgtaatcccagctactcgggaggctgaggcagaagaattgcttgaactcgggaggctgcggttgcagtgagccaagattacaccactgcactccagcctgggtgacagagccagactctgtctcaaaaaaaaaaaaggaaaatgtacttttcatggcacgtataacccccaaaggattattcaatactgaacaattaaataataattgaataatattgaatcatgttctccgttatttttcaaataactgaataatatctctattaaaagattaaacccttgtaacatatattaaagctgtaaactttaagaaaataaataaataaaaccctgtaaaagagcttttattttgtgagaggcagaaatcaccacttaaaactcccaattaaattctgctatatttaaataaagtttgagtaaactcacatttgagagattctgtataaccttattgtgtttaaaaacatggaacttaattatagtaccttaattattttctcagaaatgatatatacaatatcctgttttttgaaataaaaacgttaaccactcagttcagtgtcatttcttactgccattttggacagattttgtctcttaaatgaactcctccagcagctcaacaatccatctaccccactgaatatatccactagggatatgaggccagacaccctaccttttgtcagggagtaattagggactgaattataggcaattaagaaccaaattattccaatttgtggtgctttgggccccaggttgctgctgtgcatattattccagcaattttagattccaagtaagccagcaacctgaatgatgtaactgtgggaaagcgagttgaattttctggatgaaaccaatttcttattttattttgtgtgacagacttcaacaaatatctcttgggcactgactaggttaaacatattatgcaaaggggctgcagcaattaaaagatgtttaaggaaacaatttcttctctaaacacctttgaatcttttagaagaattaagtaaacggatgaccatattacacaattggataagggaagaatgaaggtaagtaaaatatgatatgacatagtcaaaggaggaaaagatgatttggtgaataaatttgaaaaggcctttagagaaagtaaatctgcaagtgactttttgaaaagctaaaactttacatgaggaaagaagtcaaattaaggaaactcatcataagagaaggcgaatgggagcagggaaacagaaaacaagtcctaaattcttcactgactcatctcataaaaaagggaatttacagatgaatgatttggataatgcttatacttaaaattattagctaaacaaacaaggaacaagagaagaagaaagtacaggaaagaggcaagggagcaagtaagagagggaaggagaaagaataacacaaaccccccagattagaaaactaattttacattctgaaagagaaaaaaaatgaaaaaaaaaaattcccaggtattttggcttgaaaactctgaaagcaatatctgcccattctacatttccagggagtttgattagattatattctgtgaatgtaagtgacttcataaactctctgaagctcatgaaactaactagagaacactaattgtaaaatgttgatgctaagtttttaaaaaaattaagtatgaaaaatacatataaaataatatgttaaaaaattataatagaatattaaatctttccaacaaattacaactggtggcacagtcactagcaggtccaaaaagctctctctcttttactccatatttgtatccaaacattcattccttgaagtcagttgatctcagaaaaacatttctgtttaaaatagtattggtaataataatccttaaattaccaaggacttgataatatattggttgaaaaattagaaaccatgtttgagctgaaagactgcccactgttggccaggcgcggtggctcacgcctgtaatcccagcactttgagaggccgaggcaggcggatcacaaggtcaggagtttgagaccagcctggccaacatggtgaaaccctgtctctactaaaaatacgaaaaatcagccaggtgtggtggcacgtgcctatagtcccagctactcaagaggctgaggcacaagaatcgtctgaacctgggaggcagaggttgcagtgagccgagatcataccactgcactactccagcctgagtgacagagtgagactctgactcaaaaaaaaaaaaaaaaaaaaaaagattgcctagtatgtatattttttctactgtagctgcatttttaagatcttccaccttcaagtagcacgtagtgcttctacatcttttttgccactcaactcaaaaagagatgggactttacagtctcacaaaactttctttcaacattgtgtgaaaaggtcgaagaccaccccatggtgcatctcccaatgccttctgagcttcgcagttgagggcagcatactgacatgtttcagcatgagggctctggtgccagacctgagtacaactcttggatctgctgctcacttcctgtgtgacctcaggcaagtcatttaagatccctgagcctcagttttctcaactgtgaagttgaaatatgtattgaaaattaaataaattaatacatcaaataatttagagcagttctggcatgtagacgttaatatgccaggcctgagcgtgtggtatagcaggacaataaaaatccatagtgcagaagatcttattctgttctgtaaaaacagttgacaaatggttggtgtttatctgttagaaaactagtagtcaacttcaggttcaaaataatttgtcattgtatgttcaggttatgtatgtagcattagactctccctaaactaattccctcacaaaatgatctggacataggcatatatgtcacaataacctcctacaatctctaaatctgagcaaatgttattagaccaccaagagaattctacagttgtacaacttcatagcattttgagaattaaaataatatatcatcatcatgagacacaccaccagaatccatggccactgtccaaaggcatgcctttcttgaagtctccattaaatttgtattcatattcttctctgtgcttctccctccaccccacacatcatccttcaaacccaaattagttttatccaaatttcattgtcaacactcaaaatctgcaatgagtgcgcatcttacctctgacattccttagactcacctctctttggaaaacaccaggacctataatagttgattggtgctcaggcctgtcagatcccaaaagccccacatcattggtattgcttttgccagtctttcctcccactaacccacccagcagggatccagaaagctccccttgttcctgctataccacacacccaggcctggaaggccctgtctatagccaattacacctccatggctcccacacactggtgtctttcttatttgcccctggtcagacaccagcaagggcatcagcaggcttcaccctgccagccagcatttctccatagttgccctctgaagtgctctggtagaaactgcagaatccatggacttcatggactttaggctgtgcgaaaccagaggagaggctggaaaagtaggagggcaggcagtaaggagaggccactgtggcataagcagggccaccgagctacaaaaaggaggccgcggtggatagagaaggccagtggagcagtatggaatcaggggtggcccctcacaggtatcctatattgtactatcctgacgaattacccctccacttcagtggacaagtttgttgaaacccaccaaaacctcactcatcacaggcattgacaatgttaattttagtaataaaagcagaagccgatgtttatatagtgcttgctttgttccaggcatgatgctacacataaatgaactcactcgagttctataattatcaactccatttgcatttcacacatgagaaaactgaggtccacagatatcatttggaacttctagttaatctcatggaagtaaaaagtagaacagaggatactagatgctgggaagggagagatagagggagaggtttgttaaaggatacaaaattacagctagataaagggaataagttccagtgttccataccactgtaggatgacw

SEQ ID NO: 94170 - DNA, 35053 bp, Homo sapiens
  misc_feature (1)...(35053): n = A,T,C or G
ggagggctgtcaggacccaatcttcagctccagagccctgttggctctgcgacagccatgctggggaggggtcttccttcccggcaccaccgcaggtgcaggtagccttgtgcccagccagctccaggtcacacggtgaccgtcggcacagcctcctggcccgacccttcaagttgtgctcagtgcactgagggaggcaggggctccccaactccctccccaacttatccacaaggttttggtttgtttacaaaggcatacttagatttggcttttatttatttatttttatttttatttacttttttgagatggagtctcgctctgtcgcccaggctgtagtgcagtggtgggatctcggctcgctgcaagctccaccctcccccggtttccgccattctcctgcctcagcctcctgagtagctgggactacaggcgcccgccaccacgcccggctcatttttttgtatttttttttttttttagtagagacagggtttcaccgtgttagccaggatggtctcaaactcctgacctgtgatctgcccgcctcggcctcgcaaagtgctgggattacaggcgtgagccacctcacccggctatttttttatttttatttttcttatttgtatacatttgtggggtgtgtgtgcaactttggtcagtcaggtcagggcttttaggggatccatcacccaaccaacgttgttcccatttattcacaggctttgaaactgagccccgggcatgaatttagaaagtagcaggacagtttgatttcagggctgggaaagaaaaggacgtttggcttccatctccctgattttctagggccacccctaaatctagctgcctaggctctgcgtgggaggcctgtgggggtgctttctaccccaaatcaggtcctgtcacttggcagtgggatgtgtgctcagggtttggggtgtccagaggaagatgagcttgctgagacaggagctgtggggagccaggtgtgtagagctcagtctcctatcgggactgggggtgctgggggagggctctgggcaggtgctgcaaggagatattgacaagtggactttccctagcttgcccccaaatggagaccctccggccatctgtgagatatcgcccttggtgtcttactctggagaggtgagagctgcccatccctatctggggcttttctggtgtcaggtttggaataccatctggggagaggtggctgctcgggtggagacggcacagctctacctcggttaaccaatggggtcggtggtttaaatttgcagaagactttccaagatatgggttggggtggggtgaggcatccagaggcctttgcaggtcctgggagggcatggggatgagacagcccaggtctgagcccagtgtggggccagtcaggccttggtgggggccttgcggagggaggacaccggcctctgctacctccctgacctcggctgcccttgcccctttctctggtcaggtcagacctgtgcgtgacaggagggtcccctgctggcctagggtcttgagtgtggtcttgggtggccttgcagtgtgtgtctgctcctggccctggaagcctttctgtccccacccctccctgactccaggcagacctgggatcgcacctggggactgtggctcttggtgtggccagaggggctgtgacccgccaaaaggtgggtacttggccattgtcccctgctcgtctccagggtttagaagtgtacctgcaaggccgggagttccagtccccgctcatcctggatgaagaccaggccagggagccgcagctgcaggagtcctgacccgcccagactgcccccagactcccccgagacctgccagccccggcatcctggaagtcccgactccccccagacctgccagccccggcgtcctggagctgggggctacagcccagcctgagctctgggtgggaaagcagcctgccccatgcttccagcctgcagaacacagaatgaaacatgctggtagactccacgagggcagggcctctcctgtcgcctctggacacaagtggcgacagcctgctgggggctctgtggctccattcctggctgtggggtctagtcaagaggcagagggacttgggacctgggagaatggggctgagaggaggcttcgggttggggcccaagggaggtgtggtgtcatctggggagaacaggagggcatgtccctttgggagcccgccttgtggatccaccacaccccaccgagcactagaagctgcataagctacacaggatgtgcttctgcagcctacagatgcagaaccagaatgagggggacaattccacccactcgagggctgccccctcttccttagcagacgaaccagtaatgggggcaaggctggggcatcccagcccacacaccctggatgcccagcaaggccacagaaagagcctgatgtccatgatccaggtggctctgagaagcttggcctggacacctgagcctgcggccggtactcctgccttctccccatctatccccaaggcctctgcctctcagcctcttccatggtcggtttaggctgctgagttttctgtgcttccccaagaaccagtgggatcaatgccggcggcctctgtgatggttgctgactaatccgggatttcatgagtcagaggcaccacccctcaccccagctgcctgctgcttctgacggatcttggtgctcaggctgcctggctctccgagtgaggacgcagcctccatatttggtgcactcaggcatggctgggacaagccagctgccccagggttcttcccctggtgattctcgcctgctttctcatctcaggggaggcagtggcacctccctctccctgctgacatgaagagagctatgatatgccactgctgccaactcatcctctgcccccacctcgaaacccacagtccccagtggagggccactactcatccccattggtttcccaggggaggggtgttgtctggaagggcaggttcagatgcagccttccagatttagaggcactgggaggacagtggctgagtggaggcgcccagacctgggcaggcagcaggctcaggcccacaccttgtgatttttgaaaccaaagcccagaagatgatgtttacttctctctccctggctctgcccttcttactgcaaaccatgctgtgccttagggcccttctcatagctgttcctcatggccatgactggaacagggatgcaacctctttctacacaagcacagttagttgggtgaagtctttttttttgtttgttttagacggagtttcactcttgttgcccaggctggagtgaagtggcgtgaccttggctcactgcaacctccaggccagcctcagcctccctagtagctgggactacaggcacccactaccacgcctggctaattctttgtatttttagtagagatggggtttgaccgtgttagccaggatggtctcgatctcctgacctcgtgatccacccacctcggcctcccaaagtgctgggattataggtgtgagccaccgcgccgggccggttgctggcatcttaatgttctgtaggtggaatatttccaataaacacaaggtgccgtaattgactgctactctggcaagtgcagtttttgggcagtgcacgggtgttgggaacaaggatcaggtgttcacagctgtgtcccagggctggagctcactgggggcccccttagggacaggagttcacacatgaaggccaagactacttggggtgccaaggaatccccccgcggtcccatcccactcttcaccagggtctcaggagggcctgagacaacctgcggtcaggaacctcggggcgctctccagggcaggcttctgcatgctcagctctgacagcctggagactcactctcctgcacctgcatccttgagatgccaaggtttccctgctaaccacgtgaggatgcttggggtactccagggactgacaagagtgagtggtgtcaacctaaagagaaactcaggctctccagaataaatgaatttaatcaagaataacacataattgcaatgcagagtatgcaagcctcagtgggtcacaggcatatggtgggggggtggggtggggattgaggaaagggggaattttttttttttgagactggatctcactctgttgcccaggctggagtgcagtggtgcaatcatggctcactgcagccttgacctcctggggcttaggtggtcttcccacctcagcctccagagtagctgggaccacaggtgcacaccaccacactggactcatttttttattttttgtagagacaggggtttcaccatgttgcccaggttggactcctgagctcaggggatctgcccaccttggcctccaaaagtgctgggattactacaggcatgagtcactgtgccccgcccacgggaaatttctttttttttttttttttgagacagagtcttgctctgttgcccaggctggagtgcagtggtgccatctcggctcactgcaacctccacctcctgggttcaaggaattctcctgcctaagcctcccgtgtagctgggactacaggtgcctgccaccaaccatgccctgctaatttttttgtgttttttgtagagacgggtgtctcaccatgttggccaggctagtcttgaactcctgacctcaagtgatccacctgcctcggcctcccaaagtcctgggattacagaagccaccgcgcctggccccaaggggaatcttttaaaaaagagaagttcccataaactgctttgaaaccataaagaccaaaggttagaagggtttgccgcaggcgctccgttgctaatgtttttgtgagggcttcttcagggcctcttgttagagtgtgacataaacgacttcatttgggtaccagcaagtgtcacagggggcagagaccagcagaaacctaaagatgacccctagaagagcaggaggccaggggaacagagttagacgagccacgtgctaagcaggacgtcgctgccgggggagctctccagacacgcagaaatgccacagtcaggaccgtgggacgcagcggattcgcccaagggcaggagcagcctggccaggagagaatgaaggaggggccgggcgtgaggttcggctggggagaacccaggcagggagggcctcgggcggccacggacgccgctttgccattttgggcgtttctggggaggacaacgcgtgcaggaagcgcagtcatctcaagctgacctccaaggttaccgagttcgagggctgggagccgggtctgaaagccccgacccgcctatggcgcggggactgtgggtccagccggccgattggccgcctcgctcggcgccggtccaggcgcagcgctcgggccccggggaccgtgagatgcggcgcagccagcttagctcggggtagcagccaccccagcccgggtgccgcccggcctggtccgcgacttcgggagggtccggtccttcccccggcccccacgcctgggtgaggccctgggcttcttgccggtgaccacgcggccagggtgggcaccagcccaggacggcgcccaagggcagcccagctccatccccgcgccgcgggttccggaaccgaggcgcgggacgctgggactctctgccaacatggcggccccgcccgggcgcctccccgggtccctagtgtctgcgtctcccgtgagggcgtgggcaaagtcggtgcagccagacgacaggaggcgagagaagcccagctccaggcccatgaggcgaaccacgtgggagccccagacagcgaccacgccccaggcgaaccaaggcccgccccgttgctacagctacgctccgagcacacctgggcaggcgctgccggacgcatgcgcaatgaacctgagggcagggcggagtcgcagcagttgtctgacgcagtcgccgtaggacgcagccccgtacgctggagcgcagcggagacaggcgcgggcgcactggccgcatagagacgcagcgcacgcgcagtcgcgtatccgtgtgatgggcgggctgttgacggcgctgcgatggctgcctgcgagggcaggagaagcggagctctcggttcctctcagtcggacttcctgacgccgccagtgggcggggccccttgggccgtcgccaccactgtagtcatgtacccaccgccgccgccgccgcctcatcgggacttcatctcggtgacgctgagctttggcgagarctatgacaacagcaagagttggcggcggcgctcgtgctggagggtgagggtcgcgccgggctgactggggcccggggctgccgtgcccgccgccctcccagactgcggctccgagcgggacctgggcgggcggactcgactccccaggcgccgccctctccaccccttccccgcaaaaaggggcaaatgtgcgttcctggttggggcagccgtgggcggctcgcctgcagcggtctcagcggcccaaattctgcggggcggtggtgggaagagggctcagagccccagcaggttttctgggcttcgttcgcttttctgcaaggtcctggcccaggcgcctgcccctcttggagcggaaaccggaggttccccgtggtgtatgctcccctcggtacagtgagaaatgagcccctcttgattggctcctggtctgttcgtggtggtctcaggccgaagggcattgataaccacatgcggactgtgcatcgcctgggcggtgcctgggctacatctgtgggagtcgcaggagtctttctccactgttgatgaaatgtgacagaaatgtttctgcttttttcttatcctcgtctcatctgcaccactgtattaacgacatctgtagtattgtcccagcaatgttcctactccctgctgagagggaacttctccccattcaaaataaatagagctggccgggcacggtggctcatcccgcgttccacccactacactccagcctaggtgtaacagaatgagaccctgtttccaaaaaaaaaaagaaatagagctgaacactggatcttccagaagaattccttattgtcctcacagtttgtgacagttgagacgttccgtgtgatatattcagtaagaaatgtcattctctgtacctcccttagaaatggaagcaactgtcgagattgcagcggaatatgattctcttcctccttgcctttctgcttttctgtggactcctcttctacatcaacttggctgaccattggaaaggtatcagaaacacgtgtacttgaaaacgatatctgtgttgagggttgattgggcagaagcaatcttgcattctaccttaaacagctccaggaggcatatatggcaacgaattggcaagaaatcaagataaagagaaaggtagagctgtatgtaaccacctggctagaacacagatgttaatttgatgctgtctgactactttctaggtctctggtgtaagtactgatatgtcyagcctcccttatagagtaagtcagctggtgggcttgaacactcagcctaaataaccacacaaatttcgtagcactcattagcgtgtgtttggaaaagaccaggcagagttctggtgaggatgtggagaatctcttctcacttggtctaagatgcttctctttggagcaaagctaaagggctcctgcccacctgccacatgctgaacgtccctgaatggaaaataggaaggcaaaagatgtggggttctgtgttatggacaaggacacaaactgccaagtgttttgaaaaagatttcattcccttgggacattgttgaattcatttcagtgactatcaggtatcataatgttgatttgtaatggatagtgcctgccaagtgtttttataaagcagtttaaatctcttgtaggccttgtggcatatttgaaataaaatagcttctgttattcagctctggctttcaggctagaggaagagcagaagatgaggccagaaattgctgggttaaaaccagcaaatccacccgtcttaccagctcctcagaaggcggacaccgaccctgagaacttacctgagatttcgtcacaggtactttgagcaaatggtgtggggttataactggggttcaatccagaggcatttcaaaccactgaagattgagaagaattattttcctttaccatttattaccacgtgtttacctctctctcgttttggactggtcggataatacttggggaaagagaggcgtagtcttygcttcattctttttgaagaccagccatggccagttccggttttacttctgactgtgcagtgttgaataagacagacctgtttcctctcaagaggccacagctggtaggagaggctggtgagaagccaggcacagatgggcagaggcagatggcacatggtgtacatcctatgtggaaaagagcagggcgctggtgaagaacagtggctggtcctgagggttcaggggaggccgtggcactgagggcaagatctgagggctgagaagctgctggcaccgggcaaggtggggagaggcagacttgagcctgagtgaaactgcctgaggcaaggaggaccttggcatatgcgggaaggtgaaattcccagggctgggagagggagcaggggttggctcagtccagctgtggtcctgcaggtcctggaggcagcatggagggtccagttgatgtrtgcgggaagattttggcgtggactggaggtctgagatgtttactgtgaaactgctctggctgggtggagacacagtggagggcaggaggccaggagagctgcctggccgtgggaaaagctgagtggggggaggagtgctccgcaggagtgggccttgggagaaggagggtgagtccccgggtggaggggccagcaaaggctgtgcaggctctggcttggggacactgaggagctccgttttggatctgcccactgtgagatgtctgggaggcgccatggagaccttggtgggcaggtggtgccaggatcagagtctgccaggggagacaggttttaggagtccctaggtataggtggtttgtgtcctctggaaacgttggaagaaggggccaggcctagtcctgggcaccaccaggctgagaagattggggtcagggaggagggcagggggagtggagactggggatgggtcaggaggcagctggagaaccaggaaaacgtcctgtcagtgaaggtttggttcaggaagaacagccaaatccccgacaccgttgagaacaccagggtggtgctgactctggtgtggctgctcggaacccttagaaggcccttagggtgttagttactgttgttggtacatctgtgattgtgtctagcaggtgtgggagtgccttgggagcttcacctgtggccagagtcctcagcgccaggtggacttccctgcagggctgtgacagggacagacagcgctttctaacagtggccttgggagtggtaacctgcygaggaacagctcctgggctggggagctggaggcaggctgctgcccactggctaaggatctcagcaagaggrgcattggggcattggcccccatgagcttgggccaccctcagactgccgtgggggtgttttgatttttttttttttcgaggcggaatctcactctgtcgcccaggctggagtgcagtggtgtgatctcagctcactgcaacctccgcctcccgggttcaagtgattctcctgcctcagcttcccgagtagctgggattacaggcgcccgacaccacgcacagctaatgtttgtatttttaatagagacgtgtttcactatgttggtcaggctggtctcgaactcctgacctcttgatctgcccacctcagccccccaaagtgctgggattacagacatgagccaccatgcccggccctttgatttctttaacaagaaaatgtgtccttttaaaatttctataagctcaatagagaggggatggacagtaccaaaaagcagaaggaagcaaacccacattctcctttcaaaggcagcattcctgtcgctgagcagcttctccaagggtggtctagccgggcagagggtgtagggtgggaattggcccctagaaggtgccgtgcctgatgggagagtcctgctcttgattggccatggggccactgctccacactcttcggtgtgaggatttctgcctttgaccaaggtctttgtctacaaattgaattttcctgactggaaagccgacaggtgcttcctttccttctttggtccttcgtctcctttgcatatggagtatcgtaactgcctgagagcagactgtggtattttttccattgaaagatgtgtttccaccactcacaagtgacccataagccagcacctagtgtccaggagcagctggggtggtggatggtgaatatttctgtctttctcaagcattgacttggagacatcctgccctccagggatcacttgcactgcctctcctgttcagaccctggcacttgtctagacctggttagggatgaggctgtgtttaggccagatccctttctgttaacgttttactttggttgagttcaaatttttttgttttatattttttttttttttttttttttgagacagagtcttcctctgtttcccaggctgcagtgcagtagcgcaatctcaggtcactgcaagctccacctcccgggttcatgccattctcctgccttggcctcctgagtagctaggactacaggtgcccgccaccacgcccggctaattttttgtatttttagtagagacggggtttcaccgtgttagccaggatggtcttgatcacctgacctcgtgatctgcccgcctcagcctcccaaagtgctgggattacaggcgtgagccaccacgcccggccttaaaattatttaatagagatgaggtctcactatgttgcccagtactggtctccaactcctgagctgaagtgatcctcctgcctcagtctcctgaaatgctgggatcacaggcataagacaccacacctgtctgatttcaaatgttataggggcttaggagagaaaatgggaacattgagaaggtataaaggggaatacacagccacacattacccctgttcccagtccaactcttgaaacacttggtatatgtctttcaatttatgtggctgggtatggtggctcacacctgtaatcccagcactttcagaggccaaggcaggcagattgcttacgcccagtctgggtaacacggtgagaccaccatctctaccaaaaaaaaaaaaaattagccaggcacgacatgcctatagtcccagctacctgggaggctgaggtgggaggatcgcttaagccagggaggttgaggctacagtgagctatgatccagcctggatgacagggagaccctgtctcaaaaaataataataataattttatttggataaacacatgtatacatcattgagggttaggggctggattggtatttggatacacacgtgtgtacgtaattgagggttaggggctggattggtccctgtttctttttttatgcacatgagaatattccctttcatacagatttttatagctcttctccattgcttggataaaccatcattttctaaatcatttatctgttgattctttcttcatttgtaaatgtccccattacatccgttgtacgtaaactattaagagttaaaggttgtgaagattttgatgtcctatgacgtgtatcatgacaaactattcccgaatttgcttcccctgctacggtgctgagagtagcagtcagtggtgccatggcagcactgggcattctcgtgtcggcaatgtttccaatgcaacagtcagaaactggcgcctgcttttcrtggatgcttgtgtgtcttgcctagaagcagggacacttacaggaggggagaggtgatgaacggccctatgtgctcccatcccggaagctgtcygtgtcctttgatgagtcttaggacttttatattttcctttattattggtattccctttattattagtatgactgttgtgagttagaatatttcatcctttaccaagtatgcttcttatgacttcatccggcttagaaattagttttagagaactttgctatatagtagcagtaatcaattagaaaatgttattgaaaagagatctccaggaggttgcagtggctcacacctgtagtcccagcactttgggaggccgaggcaggcggatcacttgaggtttgaggtcaggagtttgagaccagcctggccaacatggtgaaaccccatctctactaaaaatacacaaattagccaggcgtggtggtgcgcacctgtaatcccagctactcagcaggctgaggcctgarctgggaggtggaggctgcagcaagcggagttcgcaccactgcattccagcctgggtgatagtgagactcagtctcgaaaaagaaaagaaaagtgatctccatcacaatcacaagaaaagaatgccaccaagtccgtaggagtaatcctgatactaaaatatataaagtcagtataaataaaagtacaacactcaaggtatttgaaaagacctaaataagtagacattttattcttctgctgtgaagatttaagcagtggctcacgcctgtaatcccaacactttgggaggctgaagcgggtggatcacaaggtcaggagattgagaccatcctggctaacacagtgaaaccccgtctctactaaaaatacaaaaacaaaattagccgggcgtggtggcaggcacctatagtcccagctactcgggaggctgaggcaggagaatggcgtgaacctgggaggcggaggttgcagtgagccgagatcgcgccactgcactccagcctgggcgacagagcaagactctgtctcaaaaaaaagagaaaagatttaagttctccctaaattcatctgtaaatccattgactccctatcaaaattccaacctctgtttttaaagatgattttaaaattcatatggaaagaaaatttgggagtaaaactcagatgaacttccctacaagatcataaaactgtgatcattgaacccatggtgattttttttttttttgagacagagtctcactctgttgcccaggctggagtgcagtggnnnnnnnnnnnnnnnnnnnnnnnnnnnnnnnnnnnnnnnnnnnnnnnnnnnnnnnnnnnnnnnnnnnnnnnnnnnnnnnnnnnnnnnnnnnnnnnnnnnnnnnnnnnnnnnnnnnnnnnnnnnnnnnnnnnnnnnnnnnnnnnnnnnnnnnnnnnnnnnnnnnnnnnnnnnnnnnnnnnnnnnnnnnnnnnnnnnnnnnnnnnnnnnnnnnnnnnnnnnnnnnnnnnnnnnnnnnnnnnnnnnnnnnnnnnnnnnnnnnnnnnnnnnnnnnnnnnnnnnnnnnnnnnnnnnnnncccaagtagctgggattacagggatgtgccaccacgcccggctaactttttgattttttgtagaggtggggtctcactttgttacccaggctggtctggaactcctgggctcaggtgatcctcctgcctcggcctcccaaagtgctaggattacagatgtgagccactgcacctgaccctcgtaacggtgatttttaagactagnnnnnnnnnnnnnnnnnnnnccctcgtaacggtgatttttaagactaggtgatcttagtgacataattctaatagtttgttccgaccttccactgtggactcaatagcagggagatgaagaggacagtgattgcatgacctggtggagaagagactagagaaacacagtggaactagtggctcacatctgtcatcccagcactttgagaggccgaggcaggcagattgcttgaatgcaggagttcgagaccagcctgagcaacatagtgagaccccatctctattaaaaaaaaaaacaggctggggccaggcatagtggctcatgcctgtaatcccagcgctttgggaggctgagacgggtggattgcttgagaccaggagttcaaaaccagcctggccaacatggtgaaatcctgtctctactaacaatacaaaaaattaacctggagtggtggcgggcgcctgtaatcccagctactcaggagtctgaggcaggagaatcacttgaacccaggaggcagaggttgcagtgagccaagatcacgccactgcactcctgcctgggcaacaagagtaaaactctgtctcaaaaaacaaacaaacaaaaaaacaggctgggcatggtggctcatgcctgtaatcccagcactttgggaggctgaggtgggtagatcacctcaggtcaggagttcgagaccagcctggccaacatggtaaaaccccatttctactaaagatacaaaaattagccaggtgtggtgacacgcgcctgtaatcccagctacttgggaggctgaggcaggagaatcgtttgaacccaggaggtggaggttgcagtgagccaagattgcaccattgcactccggcctgggtgacaaaacaagactctgactgggattacaggcgtgcgccaccacgcctggctaattgttcgtaattttagtagagatggtgtttcaccatgttgcccaggttggtcttgaactcctgacctcaggtgatccacctgcctcccaaagtgctgggattacagacgtgagccaccgtgcccagccataagtaagcattctttccttttttwaaaaaaaaaaaagtggagcaatctaaatatccatcagtaaagaagtacaaaattatggcttgtgccgggcatgttggctgcaacctgtcatcccagcactttgggaagccaaggcaggaggaattcgtgaggccaggagtttaagaccagcctgggcaacataaggagaccctgtctctatagtaataataataataaaaattaaggtttggtaataccacagaaaactgaggccataggagagaatggatttgcctctagactcacgtaggaggacctaagcctcagtccgtgacacggtctgcagctttcccacgctcctgttcacgtggggaagggagcagaggacggggctctgtgcctgcaggtgtggaaacagggaacagggtggtgggggctggctagaaggcccgcatcacacagcagggggcgcctggcaaggggaacccagctccatatgtcatcggaagctttgtgctttgtagtgaggatgtgggtgcctgcctcactttgcagatgactgtgcgggaggcctggggacccagaggtgttgctggagctggtgtttactgcagccctttgttattaacgctttaggacctgtgagagtttggaaatattcccaccgtgggaggggcttaagcgttttgtctggggccgtttakccagtcggcagtgtccccaggctcctaaggagctgtctyctgaagctgcctgtcrtattgaaaaacgaaagtaatttagtcagaggtcagaagctcagtctgtgaggtgtgggctgcacctgagggcgtcccatagagggaaagaagggcagctcgcagacaccccgtgatttcctgtgtgaccaatttctctacagaagacacaaagacacatccagcggggaccacctcacctgcagattagacccccaagccaagacctgaaggatgggacccaggaggaggccacaaaaaggcaagaagcccctgtggatccccgccyggaaggagatccgcagaggacagtcatcaggtacagagcgcagggcaggctgcacgccgccgctcagggcttgatgttccgaaaaacaagatygcggaaacgcattgtgtctgagatctattttcctttgaaactgacagtgtatgctctgtaatctgtcctcattaaccttagattacagaatcgaatttttaaaactggaggtcagagctaaattaggtccccgataatgtcctcatggtatgcagtaacatttcagaatgttttgtgtgcgtgtgaagggtgcacaggtgcgtggggatggggagccaggctcagaggtggacgctggctgcctgggccacctcctttcccgagccccatctggtcgagcagagagcagagggagagggagttgcccggtgcccaggctcccagagtgctgtcctctgcccggttcgtcaagtccaggtagtggatcccagtggagcttcggtgctggaggcgtctctgcctcgtttccggctccatgttacgctcttagaaacggagttgattgtggttgaggcggaaggaagggttccccgcagacgtcctctctcttctacaaagtgtgggcagagccagggccagtgagggctgctgtgcaggagtggcctgagacaagcgctgtccgccgtgagagatgggctccgaagaaacgggcccagaggccctgaactcaagcgcgtggtgagaggcgtggacatgtgcatgtgaggggtcctcacggccaggaggagaatttgagggccactgtgctctagttagcgttggcatgaatgcaaggacgctttacttccagagcaaaagaggatttgacctcagcttgtcaaaagtgccacgtttgtactcccagcatgtaagccatctgtggttgtaagaggccttttgctgatcctgggacagattcaccacagggccccaagagaacgctcgggcccagccacagttaggaggttgcgcggcaaaccctctacacaacctcatagctgttcctgatggccattggacagaactcgatggggagtttgagtggccatgcgtctcgtgtgtagggacagcccccgtctgtgtggccatcctggcatcttggggccacctcactgtcactagtgctcctgtttggatgaaagattctctactcctccaccatagaggccccccgcctccggcctctgcagagggatttctcacgattctccaagctctggtctctgacctcaggccagccttgaccctggagcagtgctgtggtcttggctctcaggcacgggagctcaggactgaactgtgtgtttcctgccactcagcagcctgcacctcaggatgatggggccgctttgggtgcagggctgtgccttggccgtgggtatggagcgtgggggtgggaaacatggagccacaaatgtttgacggcagctgacacccttccttctcccccgaagctggaggggagcggtgatcgagcctgagcagggcaccgagctnnnnnnnnnnnnnnnnnnnncagaagtgcccaccaagtcctcccctgccaccggaccagggacacagggcacaccaggtgaggccacacctgcaccccttactccccgggcgctcaggggctggtggctgatgggtgcaggcttcgtctcagccatggtgggtggcccccccgccctggtgtgcaccttgcccttcagcatccccctgttgtctgagtcctcacaggctctgcaaccttggtgacaccatgtggctcttggcctgctgtccctgagcacatggctgcagaagaaggtgtgtctgagaggtttgtgtctgggccaggctgccccacgggatccctggagactgctgcccgtgctgtgtcccctgtctcggcctggccagtcccaggcagctctgggggccacttcattctcagcaccgtttgttgggggcctcccaggtgcgggccttcggccaagctcagtgcatgacctgaggcctctttcaacctcatgacaccctctgacacgataagccactcaccctcccgttctccagactgaaaagcagggctgaggacagccacccccagagtcgtttgcttgtctttgggggctcatggcaggtcgctgagtctggagccctgctctcatcatgccccccaggtgtctctgaggtggggagggagcccagagccaggactcccagccccgggcctgtgagggatgtgtagcaatctctgcggcatcaatgagggcagaggcagaggcagaggcatagacatgccatgagcacaaggaggcctcagaacctttcctgagaggacgtgtggtttggtgccgttacacacgtgtcaatccacacattagtcaatgttggccgggcgtggtggctcacacttgtaatcccagcactttgggaggctgaggtagaaggatctcttgagtccaggagttcaagaccagcctggacaacacagtgaggccccatctctacaaaaaaaaaagaaatttatatatatgtgtatatttgagacagagtcttgctttgtcacttcactgcaacgtctgccttctgggttcaagcaagtctcctgcctcagcctccctagtagctgggattataggcacccgccaccacacctggctaatttttgtatttttagtagagacggggtttcgcgatgttggcgaggctggtctcaaacttctgacctcaggtgatctgcccacctcggyctcccagagtactgggattacaggcgggagccaccgtgcccagccaaaaaaatttaaaaaaagggaacgaagggactgtagcgcgtgtgcacagtgcgattcccgtggagcacctgaagcccacgtggcagaaggagcgtgtttgagtcgaggatgttcatcgcgaggtctgcacccgtccgtgtttcacattctgagttggcaccacactcacccacgtctccacaggctgtgctcactgtgctgtcccagcgcccttggggcagccacccttgtccctttggccagaggccaccgaggcccaaggagggtgtgcctgcccaggcgccaggtggaggtgcatgggccccagtcaggtggtcgggtgacaggtgccatcctgtgcagtctccagaggtctcaggcccttggcaggctgtgttctccctgggggctgctgcagcctctgtggccctggcctttgctgtgcccaccaccgcccttcccgtcgtcccaaacccaccgtcatctttgccccatgggggtcacagcagtgctctgcctgagggtgtccatctgtgccgacrccaggaccacgtccgccatggcctgtgctctctcccccctactagtgcatctgaactatcgccagaagggcgtgattgacgtcttcctgcatgcatggaaaggataccgcaagtttgcatggggccatgacgagctgaagcctgtgtccaggtccttcagtgagtggtttggcctcggtctcacactgatcgacgcgctggacaccatgtggatcttgggtctgaggaaaggtacctggtgctttctggggaggggctgagccctccgtgtgggcctcgtgtgctgaggcagagtgtgggttgcacacrgggtgaaagctgctgtttgcatctgaccatgggttttcccttctcctgggtgcgggagtggacgtgttggctgtggtcagttcctgttcttgtccagccacccaaggcacacacagggccgctgtccccagacctctgcaggagttgagtgtggactctttgggggacgtccaagggacattcccaggctgtgcttctcttgcagctgggggtggtgggatgagtgactgtggggccccgctggtcccagatctcagcagcatccttcatagaccagcacatccactttgaattgggagtatgtgtcttcggttatttaagcgataatttaaacatttgcctaattttttgaataggttgaagaccaccagtaaacgacgtgtgtaatttttttgggtcgtagcctttggttgtgacccattggtggccatagcaactgcactgctgactccgttttattaacaaatgttgacgacttcaagatttacccccttgagataggaggtgatattgaagccctgcaggggaacgataaygccccagacatgggtttggttttttgtttttgtttttttgtttttgagatggagtctttcactgtctcctgggctggagtgcaatggcgcaatctcggctcattgcaaccttggcctmctggtttcaaacgtgggttttttggagacagagtctagtggtgtggcccaggctggagtgcagtggcacgatctcagttcactgcagccttcgcctcccgggttcaagctattctcatgcctcaccctccccagtagttgggaccacaggcatgcgccaccayactcagctaatttttgtgtttttagtagagatggggttttcccatgttgtccaggctggtctctaactcctgggctcaagcaatccacttgcctcagcctcccaaagtgctgggattacaggcatgagccaccacgcccagccaaatgtattttgaagatggatagataataggaaaacgttggagccatccatttgtctctgcatcctttactgttttatgtcatagaatttgaggaagccaggaagtgggtgtcgaagaagttacactttgaaaaggacgtggacgtcaacctgtttgagagcacgatccgcatcctgggggggctcctgagtgcctaccacctgtctggggacagcctcttcctgaggaaagctgtaagtgtcttggggtgtcctgcagggagatggtggactcgcattcaagcagttacccctttagtggacttgtggggacgtgactgtcttcctgtttcctcttcaaatgcactggagtctgtttctgagctcatattcgtgagctgatgaagccactttgatcaccactggccttgtagagacattcactcagtgcagagtgatgcccgtttccttgctgctgtgttgaccccagagagccttcagtgtctccactgaactgcatgaaagggtgtagacgaggcctctgggtgacctgaacgttggttctctactctgctcatataccaggaggattttggaaatcggctaatgcctgccttcagaacaccatccaagattccttactcggatgtgaacatcggtactggagttgcccacccgccacggtggacctccgacagcactgtggccgaggtgaccagcattcagctggagttccgggagctctcccgtctcacaggggataagaagtttcaggtaagggggcaggctttctggctggatgcgcctcccctggagctaccttttgctcatcacagcaggtactgtgtgtgtgtgtgtatgtgcatgtgtgttttcaggttttttactgtgataaaacacacaaaacgcaccaccttaaccatttccaggcgtggtcggtggtgttacattcacgctgttgcaggcgtgcaggtcggtggtgttacacacattcacactgttgcaggcgtgcaggtcggtggtgttacacacatttgggctgttgcaggcgtacaggtcagtggtgttacacacatgctgttgcaggagtacaggtcggtggtgttacacacattcatgctgttgcaggcgtgcaggttggtgctgttacacacatgctgttgcaggagtacaggtcggtggtgttacatgctgttgcaggcgtgcaggtcggtggtgttacattcacgctgttgcaggcgtgcaggtcggtgctgttacacacattcctgctgttgcaggagtacaggtmggtggtgttacacgtgctgttgcaggtgtgcaggtcggtggtggtacacacattcatgctgttgcaggagtataggtcggtggtgttacacacattcacgctgttgcagacgtgcaggtcggtgctgttacacacattcatgctgttgcaggagtacaggtcggtggtgttacatgctgttgcaggtgtgcaggtcggtggtggtacacacattcacgctgttgcaggcgtgcaggtcggtggtggtgcattcatgctgttgcaggagtacaggtcggtggcgttacattcacactgttgcaggcgtgcaggtcggtggtgttacattcacgctgttgcaggagtacaggtcggtggtgttacacacattcatgctgttgcaggcgtgcaggtcggtggtgttacacacattcacgctgttgcaggcgtgcaggtcggtggtgttacattcacactgttgcaggcgtgcaggttggtgttacacacattcacacttgcaggcatgcaggtcggtggtgttacacacattcatgctgttgcaggcgtgcaggtcggtggtgttacattaacacttgcaggcgtgcaggtcggtggtgttacacacattcacgctgttgcaggcgtgcaggtcggtggtgttacacacatgctgttgcaggcgtgcaggtcggtggtgttacacacattcatgctgttgcaggcgtgcaggtcggtggtgttacacacattaacgctgttgcaggcgtgcaggtcggtggtacacacattcatgctgttgcaggcgtgcaggtcggtggtgttacattcatgctgttgcaggcatgcaggtcggtggtgttacacacattcacgcttttgcaggcgtgcaggtcggtggtgttacattcacgctgttgcaggcgtgcaggtcggtggtgttacacacatgctgttgcaggcgtgcaggtcggtggtgttacacacattcatgctgttgcaggcgtgcaggtcggtggtgttacacacattaacgctgttgcaggcgtgcaggtcggtggtacacacattcatgctgttgcaggcgtgcaggtcggtggtgttacacacattcatgctgttgcaggcgtgcaggtcggtggtgttacattcacgctgttgcaggcgtgcaggtcggtggtacacatgctgttgcaggcgtgcaggtcggtggtgttacacactttcacgctgttgcagacgtgcaggtcggtgctgttacacacgctgttgcaggcgtgcaggtcggtggtgttacattcacacttgcaggcgtgcaggtcggtgttgttacacactcatgctgttgcaggcgtgcaggtcggtggtgttacattcacgctgttgcaggtgtgcaggtcggtggtgttacacacattcacgctgttgcaggcgtgtaggtcggtggtggtacacacattcatgctgttgcaggagtacaggtcggtggtgttacattcacacttgcaggcgtgcaggtcggtggttacattcacactgttgcaggcgtgcaggttggtgttacattcacacttgcaggcgtgcaggtcggtggtgttacacacattcatgctgttgcaggcgtgcaggtcggtggttacattcacactgttgcaggcgtgcaggttggtgttacacacattcacagttgcaggcgtgcaggtcagtggtgttacacactcacacttgcaggcgtgcaggtcggtggtgttacacacatgctgttgcaggcgtgcaggtcggtggtgttacacacattcactgttgcaggcgtgcaggtcggtggtgttacacattcacgctgttgcaggcgtgcaggtcggtggtgttacattcacgctgttgcagacgtgcaggtcagtgctgttacacacgctgttgcaggcgtgcaggttggtggtgttacattcacactgttgcaggcgtgcaggtcggtggtgttacacacattcatgctgttgcaggcgtgcaggtcagtgttacacacattcacgctgttgcaggcgtgcaggtcggtggtgttacacacattcacgctgttgcagatgtgcaggtcggtggtgttacattcacactgttgcaggtgtgcaggttggtggtgttacattcacgctgttgctggcgtgcaggtcggtggtgttacacacattcacactgttgcaggcgtgcaggtcagtggtgttacacacattcatgctgttgcaggcatgcaggtcggtagtgttacacattcatgctgttgcaggcgtgcaggtcggtggtgttgcacattcatgctgttgcaggcatgcaggtcggtggtgttacattcacgctgttgcaggagtacaggtcagtggtgttacacacattcatgctgttgtgcagctatcacttccatctccagagcccttttcatcttaaaactgaagctctcccatcacacagtgacccttcatgtccctccccagtccctgaaaaacactgttcaggtttttcttcctggacctcattgtgtggagttcctcgtgtgagtgcagtcacacacgatttgtccttttttttttttcgtttgttgagacagagtctcattctgtcactcaagctggagtgcagtggcgtgatctcagctcactgcaacctccactcccaggttcaagtgattctcctgcctcagcctcccaagtagctgggattacaggcgcctgccaccacgcccagctaatttttgtgtttttattagagacagggtttcaccaagttggccagactggtctcaaactcctgacctcgtgatccacccgcctgggcctcccacagtgctgggatgacaggcgtgagctaccacacccggctgatttatccttttatttgggctcctttcactcagcgtctttaagcttcatacgcgaaagatgcttcagagattcctttttcaggctgaatatctgctgcgtggctaggccactttttgtttaatcctctctcctctggtggacaccaggactgtgctgttttggttgctgtaagcgcgggtgcacacgcctgcctgaggctgtgttttggccgttgtgagtgtgggtgcacacacctgcctgaggctctgctttgttgtgagtgcgggtgcacacacctgcctgaggctgtgttttgggtgttgtgagtgtgggtgcacacacctgcctgaggctgtgttttgggtgttgtgagtgtgggtgcacacacctgcctgaggctgtggcgcgatctcggctcactgcaacctccacctcccgggttcaagcgattctcctgcctcagcctcccgagtagctgggaccacacccaccaccacaccccgttatttttttgtatttttagtagagatggggttttgccatgttggccaggatggtctggaactgacctcaggtgatccacccactggcctcccaaagtgctgggattacaggtgtgagccactgtgcccggcctctttttactttgttaatggtgtattttgatagataacagattgtcattttcatgaagcacagctggtcagtttattgttgctcatgtatttggcctcatgttcgagtccctgtttttaatcatgagctggacacagccctctttagagcaactgtgaccacttgtggtgagaagtgcagcccacaccatccacgtgaggctcccatgcagacatttagaaggcgttttcactgcagctcagaaaatggccccaggcccccatgggcacccccatgtcaccagggcctctggttgctgccggtacacagggataggcagccaggcctcgaaggtgctgggcatgggtttgggtgtctgcgttgggtagagacccggagcgcccttgctgggcgtgccctaacatcccggtaccctgtgcccctctgtgggccaggacgcctggtgctgccagctgggcgtaagccctgaggagctgagggtggctgtgatttggaggatgagtaggagctcaccaggagggcgtggagccgaggcgtttaatatcatcaggagcaacactgggctcagaaggcaggcacacttgccgtccctccagagccatggctgacggccaggcctggtgggctctcgtgaggacagtgcctgtggttgtcagatgctgtcccttcgagtaagggatgagagccatcctgaagatgggtcagctctgtggtgaccacccgttgggagcagtgacattcaggtgcgttgcactggtggctgtgtggctgtgtggtacggccaccaggagccatgtgggcaaggacagctgtgggctgggcacagagctctctctgctgggagtcagtcggtgctggggcgaggggaggcagagctcacagagcccctctacagctcaccctgcagctcggccctggccagtaaacccaccatccccctttctgccgcaggaggcagtggagaaggtgacacagcacatccacggcctgtctgggaagaaggatgggctggtgcccatgttcatcaatacccacagtggcctcttcacccacctgggcgtattcacgctgggcgccagggccgacagctactatgagtacctgctgaagcagtggatccagggcgggaagcaggagacacagtgaggcccggcccgctgcccccagctcccgcggctcccccgttcccgcagccccccactcctgctgcccccagctcccacggcccccgctcctgctgccccccgccacactgtgtgtcaggaaaccgcagccgtgccaggcctggcccaggcatttatgtggagggcgtattcattcacctctcaccgtggcctctgggggggtgaggggggcatcttcactgagggccatgggctgtgcagggtggcaccttctgtccggcaagggccaggcctgctgtacttgtgtgggcccaggatgtgcctgtccctggtgccccacgggagccgatgcaccgtcctggtagagtgagatgactgctggtgtccacaggctgctggaagactacgtggaagccatcgagggtgtcagaacgcacctgctgcggcactccgagcccagtaagctcacctttgtgggggagcttgcccacggccgcttcagtgccaagatggtgagtgtgtctgcggggccttccggccgccgccccttttaccttggcttccaaggtgcctgagtcatgatgtcaaaaagaacaacgaaatcctggccatggcgcccacgtggaggccctgggtggaccgtggctgcctggccaggcctgtcttggcaacagggcagtaaggccttgtgtggcacctggggtgggcagggcttccccagggcagctccctccccgtgcccggtgtgtagcaggtcctcgggcggtgtgtgggggccgggttggagggcctggtccaggcagctccgctgttccatgccaagtgccctcgcgtggcctcccctcccagggtaccagggccgaggcagcgctgggctcccacgttggctgcccgtgcagctgcaggctgagggcagggcctgggatctggggctgaagagaccctctgattccaggaccacctggtgtgcttcctgccagggacgctggctctgggcgtctaccacggcctgcccgccagccacatggagctggcccaggagctcatggagacttgttaccagatgaaccggcagatggagacggggctgagtcccgagatygtgcacttcaacctttacccccagccgggccgtcgggacgtggaggtcaaggtgggcctgggcctgggtcagggtccatcaggaggagggtgctggcagggctggccttgccctgagctctgctccgcccacagccagcagacaggcacaacctgctgcggccagagaccgtggagagcctgttctacctgtaccgcgtcacaggggaccgcaaataccaggactggggctgggagattctgcagagcttcagccgattcacacgggtgagcacctgtcctcgccccgcgtggtcacggccaccgggccacaggcacggctgggctgtggrgctcaggytggctccgctcttggtggtggctgtgacctgggtccgggaggggcgggcttgccgcagcctcggggtggccacrctgcagcttgggggccctggcatccccatccccactgagcttcatggttgtgggacccagagtacttggaggggctgggcamccctcattttcatttctcagggcctgtctagggagggtctctgctgtgggcccagcatccccccagtttaggaggcacacgcacccatgactggggcaccatccccactgtggaccaggccctgttttaggtcacgccctccacgccagagtgtcacctcctggctctgctgtgatcttggcctgaggcccccgctgcctccgctcccaccgtctgccctgtgccctgtgccctgtgcggcaactgtgaggccccctgagcccaggttctgggggaggcggtttctgtcgtggtcacttgagggttgttggcatttccaggtgggctccggtggaaccacacggctcgcctgggggtggccatcatccaggcgccctccaccctgagcttgcgctgggggccacattcacyatggggtggagagcgcttcggtgatgaggctgaggggggtgcagggtgccccccgtgtggtgacgaggccctggctgctgcacaggtcccctcgggtggctattcttccatcaacaatgtycaggatcctcagaagcccgagcctagggacaagatggagagcttcttcctgggggagacgctcaagtatctgttcttgctcttctccgatgacccaaacctgctcagcctggaygcctacgtgttcaacaccgaagcccaccctctgcctatctggacccctgcctagggtggatggctgctggtgtggggacttcgggtgggcagaggcaccttgctgggtctgtggcattttccaagggcccacgtagcaccggcaaccgccaagtggcccaggctctgaactggctctgggctcctcctcgtctctgctttaatcaggacaccgtgaggacaagtgaggccgtcagtcttggtgtgatgcggggtgggctgggccgctggagcctccgcctgcttcctccagaagacacgaatcatgactcacgattgctgaagcctgagcaggtctctgtgggccgaccagaggggggcttcgaggtggtccctggtactggggtgaccgagtggacagcccagggtgcagctctgcccgggctcgtgaagcctcagrtgtccccaatccaagggtctggaggggctgccgtgactccagaggcctgaggctccagggctggctctggtgtttacaagctggactcagggatcctcctggccgccccgcagggggcttggagggctggacggcaagtccgtctagctcacgggcccctccagtggaatgggtcttttcggtggagataaaagttgatttgctctaaccgcaatgtcgcctgtgtctttagggatctccatgactggaaagtctgggcggacgttggggagaaggtattcttcaagtcacgtctcagaattcggtttgctgagactggactctagctgtcccctgctggtgggcagggagaggccacggggaagctccgtgtccctggccccacggggcagatgcttggcgggaggcatccttgcacctgcgtttcacacagggcctgtttccctgcagggctggcactgaggcgcacagctgagggatacacgggccctcaggtcaggcagctcccagcagcctggcatggctatggccccgagccctgggctgtggtggcagagttgtcctcatcatcactctactgctgtccctatcccagggctgaccctgggccttggctgggttccccccgaccctgaaccaggtgacctcttaggaccacgccccctcgctctcccctgtgaaaaatccatcaccttcacttccggaagactccccttccctgggaagccagagccggtggcggcacagggcagggctacccggacccagcccaggattgccagctccgcccctcgggacgtcggggccccgagtgtgggcctcggctctgcctgtccccacaacccccaacatcccacagcagccacctgtgtccctctggggacagtgggcaccctggggcttcgtctcccacctcatgctgggccctgatcctgcactccaccctctgtgcctggaaaggtgagaacatcggctgtcatgtgaccctggcgcctgccccttgtcacggtgggcccagcacggccctagcctgccccttgtcagtaccaccctagcccgccccttgtcacggtgggcccagtgctgccctcctggaccaggtgccccatggccggctgaacgggcaggactagggcagcaggtggggcctcaacagccggaaaaggtgcaccttctccatctcacccagacctccgagactaacgtgctgggggcgtggtcccagagggtggagggacagcaactgcatgccccttgggggccaaaagcactgtccagtggcctcccctggaggggtcgctgtgtacagaggatgtcagggaaggagtcaccttggaggtgtggctgcagcctctgtctgctgcggctcagcagagcggggcttccttgcggggcactgccccccgctgccctaaggagcagacctgagcgttgtggagcctctaccttgtggagcacatggcatacccggcctgtgtggggtgcgccgcgtccccagccgtgtctccgagggtcccgctcccacagcctgtgtgtgggccccacagacaggaaggacgggacatacatggccaggcctccaggcgtttattcagccccttccctctgccgccagctgcttgagtgaagcccccactccatgaggagccttgagacccctccagtcctgtgctcagaggctgagtctgggccccccacgcagagctggctgctgctcacgcctggctgcctttacccactcgccgatgatggtggcctccagcttccgcgcctcaaccacggaagcaggatcttctgggtgggaggctctggggagcgggcacagagggggcccgtcagccccagccctcggtgagcctgtcccgcccgacccgcgaccaccgccaggccacctccctccgcacctgaggtcgaggtggtgcgctcccccctggatggtgacggcgatgactgaggcactcaggttcctccgaatctgtggtcagtggaaagaactccatcaggtgaggaacgaggcaactgcccagcctccgtgggcccattggagaggagacgtgagagggcgagccgagactcagtgcccatcaagcaaccagagagaaccagccagagacggaggtgggaagtgacgagatgatgggggcaaaaccgggtgagacaggagcagggaaggggcaggtgtgaggcctgtgatcccagcactctgggagtaagacaggagcagggtaggggcaggtgaggggcctgtgatcccagcactctgagggtgagacgggagcagggtaggggcaggcgaggggcctgtgatcccagcactctgagggtgagacggcagcagggtagaggtaggcgaggggcctgtgatcccagcactctgggggtgagacgggagcagggtaggggcaggcgaggggcctgtgatcccagcactctgggggtgagacgggagcagggtaggggcaggcgaggggcctgtgatcccagcactctgggaggccatgcggggaagatcgtttgagcccaagagttcgagaccagcctgggcgatatggtgagactgtgtctctacaaaaaaatatttttttaaattagctgggcatgttggtgagcgcctgtagtcccagttactgggaggcttgagcctcagaggtcaaggctgcagtgaaccctgatctcgccactgtattccagcctgggcgccagagaaagaccctgtctcaaaaaaaaaacaaacaaactaacggggtcatagggcccaggccaggactcaccccgccccctgcccaggggtccaggttcccgttggagaagatgatgttgctggcggctctaagatctgcaaggggcagagaaagttgtgatgtgggcccctcacgggggctgtgagccatgggcagggggtgcagagctcggggcagaaagcaggacgctggcccaccccccctcagccttaccacccccccagaagctggtcagcagccagtcgggccggggccacacgccccaggtgtccaggcagtaccgctggcggagctcgtcagtgaagggcaggtcggggaacatatcggtcacattgttgctggcgaaggtcaggttgatctcggtgcaggcctgcaggtgccccagcctgagtcaggccagcccacgcccacccttgcccccgagtggttccaggccacccacacccccacacctggtagtcccaggccctggcgtcggggccggtgccgcagccagtggggtcagcacagctgtggtagagccggtagatgtcgtagcagtgctcggagcccgaggcgttgtagaccagccctggggaggagaggcgctggggcccagcggccacacacagacacaccgcgggctccggccaccaacctgtcccccctcggaatggtcctgcaggggatctggggctctgggatctgtaggtcccagtgaggaaggccctccaggctacctgcttggaggtcggcggtgtctgtgctgccagccccgggcctgactgttgagggcccccccgctctccacggggcagggtggggcctgctgccctctgttgccctccatgctggggaccccaggggccccttgggcagcacccaccaagctgggcctggctacagccagtgctgagagggtccccagggacggcccctgcctcccccagggtttctgggaaggtcgtgctgtccaccccaccacagccctggggcaggaggcaaagcccctggccgggctgcggatcctcgccccacccggccccaggacccaagccaagcctggggtctccacacttgcccatctggggccgggggaagggcacctgccagtgctcgcagccccgtgatcctctgggcctcactcagcagccgatcacagcccacctggagtgcaggggcagcggcgactcagcggggtcccctccaccagctccgcctccctggctcccaggatgagggtcaggccgctgaccaccagcctcgggacactccagccggcctctccctgcgccctgggaggcggcgcctcaccttgacggggttggcagggaggggacccaggaagtcagtggggtaggggtagtccatcatggccagcacggtgaaggcattccgggcgaacatgaagagctgggtcaggtccttctcgtctgacagcggctggcaggtgccgaactcccagcggaccgtgtcgtaggctgcgtggaaggggcagagacttgaagtttgggcatagctggcgctggggcgggtcaggcagtgggaggcggtgggaggacctcacctccctgtaggaacaagtccttgatctgtcggaacgcttcccgcacaccctgggtgcatttgggactctggccctcaaagtcctgggggaaagagaccgtgctgactgcagctgctgtcccttagggggcctggaggaccccaagcctcactcaccgccgtgacgtcccggaagaactggttggagtcgccgaggcctgccacagctagaacgggcgcgctggccgccagcgcccccgccaccaggtggggatacttcatcctcaggtaggcactgagcatccccccataactgggtgagggacacagggttagggctgctgcccccaacaccccatttcctcttttcctcctcaggggcccacaggtgccacaaggaggacgacacttctgagacccacaaattccaaccctgggccaggtgcgggtgcagctctcactgggaaaggccgctagtgtggccgcacatccaagctgagcaggtggctgggaggacaggtgggagggcttcctgggggaggcaacactaagcctggaaccactgcctgaggccttacgaaaaggcagcggtgggagtcagaggggagtggggagaagggctgggggcgctgggtcggggcaggggagggagggggtgcggaggccgggggaggcgcccaccttccaccgaaggcgatggcgggggcatcctgggccccgaggtcgcgtcgtagcgcgcggagcagctctgcgaagtcggccagggcctgctccaccgtcagcagctccgtgtgcccgcgctgcgtggactgnnnnnnnnnnnnnnnnnnnnnnnnnnnnnnnnnnnnnnnnnnnnnnnnnnnnnnnnnnnnnnnnnnnnnnnnnnnnnnnnnnnnnnnnnnnnnnnnnnnnnnnnnnnnnnnnnnnnnnnnnnnnnnnnnnnnnnnnnnnnnnnnnnnnnnnnnnnnnnnnnnnnnnnnnnnnnnnnnnnnnnnnnnnnnnnnnnnnnnnnnnnnnnnnnnnnnnnnnnnnnnnnnnnnnnnnnnnnnnnnnnnnnnnnnnnnnnnnnnnnnnnnnnnnnnnnnnnnnnnnnnnnnnnnnnnnnnnnnnnnnnnnnnnnnnnnnnnnnnnnnnnnnnnnnnnnnnnnnnnnnnnnnnnnnnnnnnnnnnnnnnnnnnnnnnnnnnnnnnnnnnnnnnnnnnnnnnnnnnnnnnnnnnnnnnnnnnnnnnnnnnnnnnnnnnnnnnnnnnnnnnnnnnnnnnnnnnnnnnnnnnnnnnnnnnnnnnnnnnnnnnnnnnnnnnnnnnnnnnnnnnnnnnnnnnnnnnnnnnnnnnnnnnnnnnnnnnnnnnnnnnnnnnnnnnnnnnnnnnnnnnnnnnnnnnnnnnnnnnnnnnnnnnnnnnnnnnnnnnnnnnnnnnnnnnnnnnnnnnnnnnnnnnnnnnnnnnnnnnnnnnnnnnnnnnnnnnnnnnnnnnnnnnnnnnnnnnnnnnnnnnnnnnnnnnnnnnnnnnnnnnnnnnnnnnnnnnnnnnnnnnnnnnnnnnnnnnnnnnnnnnnnnnnnnnnnnnnnnnnnnnnnnnnnnnnnnnnnnnnccgcgccggggctgtgccccccaacaccccgcgccccgcggccgctgcccaggggtccttcccgggcacggcgcggggaagcagatggcccccgggccatctccgcggcctcccgccccactggctcgtcctcctaccgcggccccatccggagctgcgctagggcgagtccctgctgcgcccgccaagcctccccagcacttgctcctggcaggtgccccactccaaggcagggccaggagagtgggggccgttctgctgccctaagggcgggagggagagggtcccaaacagagtgctggccccccgaagaaagcaacccagggtttgtccaagcgataacgggctgggcttggcggggcg

SEQ ID NO: 94171 - DNA, 47733 bp, Homo sapiens
  misc_feature (1)...(47733): n = A,T,C or G
tggccaccattgctggtgagatgtacctaatttcagagatgtcagaatgtgaaaaaaaaaaaatgcatcttagagtcaatgatcccagttttcctcatttcatgcagtgtgatctgtactggggtttcagtttgcccagaaggctccataatttagtctgaccacacattgtcttattaagcgttataatgaaagaataagcttgggagtcaagtagccccagagggtttgaattctgcctctgcctcttgcaagttacttgacctttacagacatccagttttattaaaaatttgagatagtaatgtctatcttgtaagcatcattgtgagcatgaaatgagattgtgtatataaagtgctgagaatagtactggaaacaaataagctatcaagttgggaaagagggggcattttgttactccatttatctctttcttcaatctctttttttattttaagtaaataaaaaatggagtacatttaaattttttattaagttcttatgttccattattttgtttgtttgtttgtttgagacagagtcttgctctgtcacccaggctggagtgcagtggcaccatcttggttcactgcaacctccgcctcccagaatcaagcaattctcatgcctcagccacctgagtagctgggattacaagtgcgggtcatcacacccagctaatttttaagttttttttagcagagacgggatttcaccatgttggccaggctggtcttgagctcctgatctcaagcaatccaccatccttggcctcccaaagtgctgggattacaggcataaaccaccgtgcccggcctctccaatcttttttgaagagaaccctgagctggaatccattctgggactagtttctgttctttactaatattgtcatattggacaggtaagcgacaacctcttgagtccttggtttcttcatctgtaaatggatttcataatccccaggtcccttttagttctaatgctgggatcctcctaatatgccctagctcccagccttcctctctccttctaagctggccaccttcttgtgttgtctgtgagagtagcatggtgtcaggcaaagagacagaaagacagacagttttaacttctaatcctgtattttgggcaagtcacttaatccctgagtgtcagttttaacatgaacttttttgctttttcttaactactcaactctcccatccctgaggaataggcgtctctcttctctcctattctgcgaatccatcctcctgggctctagccattcatgcctgccttctccaccacctttatcatcagttgtcccccttcccatcatagcgtcccagcttctttttctctgctggctccttctctcaagggtatactgaaatttttcccaccttaagaacacacaaaaaaagaaccttctcccttgatcttcttggtcccctccagctaccatcctattttactctattcctgtcacagccaggcttttgaaaaaacagtgtatattggcatttccattgccttatctcttcaacctaccacaatctgacttttcctcatccctgccttctccattaggtcactaagtgttaaatccaaagggcagttttcacttttcatgcttcttgacctctctgtggtatttaacactgcagaccatgccccctttcctcaaactttacctccttacacttccatcacaccatgttctccaggggctcctgcttttggccatctctttgtggctcctctactagttctttttcctccctgttaaatgttgatgctccccaggaatctgtggtggctctcttcttttagcagtattccagattccctgggcaatctcatccattcccatggctgatggttctcaaatgtcttcaggtagtcctcctacctgagctccaaactcaaaagggccaaccaccctgtggacattttcacttggatgttcccttgatgcctgaaattttaacaacccctcaaatggaattcattgtctctgccctgctttttattctattgtctttgtatgtttggcaacatcaccactggtcaatcaaataagccagacacctggaccatcttacctcctaaatatttcttgaaactatccatgcatttccttctgtactgcctctgccctaacccaagctcatcctctcttacctggttccaaaataattttttttctagtaagccaatataatcatttcacttctctgctctggctaaaatctcatcttcttactttcccacataaagtgctttataacccggttccacctatactgtctccatcttttgcccagcctagtctatagccatactgaatgactgacctctccctgaatctgacacgctctttcaagccttcaatacctttggatatgctatttcctctgcctggaatgcactcactctcttggcaaatgccttttcacccttcaagtctcagtttgtgttccctcctctgtgaagtttcctctgatgccactgggccaatgtagaggttcccactttgaacattctgattgcattttgaacataccttcatgataacaatgattacattgtactctaattgtctgaacatctgtctcccaattagactgtaatctccttgagggcagagatttcatctttccatctttgcatcccctggatgtagagtatactaatcaggctctggatcaaatgaataaatatgaatgagttcctctccccacaggtggcttctgattttrcacacaagggggagctatgctcccttattgccctgtgctaataattcaatattaactgagtgtcaccaatacagagctaaggactgggcacaaagggatttgactaaccctgtcaacttttagtaatttctcaaaattttcagaaagcctcttccaatagttagagtctccaagactaacaaagacccaaacatgaattttcatgtttaattgaatcagaaacatacatctcaatcttagctgaaatgagtaactaagaattcgtgtattaaattattttataaaatatgtgatagtggtatttattttaaagcagatgtttactgacgtaagaattctttatttatgacatgtagactgaagctattatatttttaaataaaagttcataggaggaaggtctataaaatgtaaaatatcttggctaataagatagaagataaagcgaggctaacagcaagaacacatgtgatacgctggagttcaaaaaggagtatttttaatatatgtgaataagagataatataatgtattttggtcagggttaaatattattcctgcatttattttaaagggaggttataaaaaaatttacaagaatgtttcatttctattaacatgtgcttaaaagaaacactaacaaaaggcttttcgtattttaagtatagaacaatgttaayttatttccagttctccaaaatgtcatatttattaaagatgacagaagcaaaaaaacagttggtaaatgaaatttgcctttcttaatttcttcttgttccatttcataacttaggtcttcctttatttgcattgcctaatttaaagttaatttttcatgaccctgaccctaattttgttttcattattaagctaacagggctcatgcatgaagaggtgggacagaaatgagaagaccccacaccccacagtcctgcttttcctacaacgcttgtgtttccctggggaacatctttctttctggctcgtcaagtaacatctgacagtaaaattagttttaatgtgagaaaatctcatatcaatattaacttgacccactcctcccctacctcatcaccatgactaggatgtatgcacagtgtacattgatataaataagcagacacaagatacagtcaaatatgcacctacaaatttagataaacagagacacagacgcaagaaccacccagactgtcattctcagtaatatagacttcatcccaggcccctgtgacaaaattgggatgctttctcatggggtggggggagtttcccacactttagggtcctcctttctcacctggcctagggaggaggaggcagcatcctccctttccaggctcccttatgtactgaagactttccttatgctcaatcttattatagacacaattacccaatccttacctaccacaggttgaagtggagttcctatgtgtgtatgagaggtgggtaaaacataaagttacaatctttaagaaaattcagcctagaacaacctccagccttcttcattcaaagttatgtgctaacgtcttgtggcctctcttgtagcctgacaggacttttttcctgaagtcttcccccttgcccacctcccccatctgctggaaactatagagtaagggccactaattctccacaagtggggagtgggtgacatggctggagttgccaagacctctgattggtaatgcacagctactgcaatgtgatgcttttttctctgattggggtagaccccattaaacgtttacagctgtggctagctaaggggaccctgtcaggaactcctgtgctagactttcctcttcaaggaaggggtctgtgtgtacgtgtgtatctgtgtatgaatgtatatgtgtgttgttgcacaaaaataggagttaagtggagaaattgaacaagatctgaaaagtggattggaggcaggattccccagtaagggctgatgtggataaggaattcaagggtgcagaatcatgcaagccaaagtatccagactcgagttaaactgggatggcgattcgatgtctataaaccttgtggcatttatggccttaagaggttttccttgcctccccagtttcttaccaaactctctctttgaagaactcccacttgatccgaacttggtctggatgaaagcaggaagtgcagccctaggtgccagggcgggagcaagcacttcaagaccccctccaaaatcacctggaccgcacagatctaagcagccgcatcccccaccacccacacccggaccactattccctaccttcccctcttccaaacagtgcgtgtgtggcagcctgcgcctctcgccttcccccgtggaacctcacacgaagcgcccccgggggtgtgattaaagagggaaccaggtcccgacgttctgtgaacaaacgcgcgcccttactctcagtggggctcccgtccgacccccactcctctcctaactcacgtaaggacccggctgtgaccggacaaaccgggtctggggtgcttccagtcactcttcaagtcactcccaaacttctcagactgcacccgaggctctgcggcgccgcctccctctcccggcctggtacagagaagggctgggtgcgccaggacagtagtaccggggtctgccagctccgcagaggtccctccaatcccccctcctcctctgcgcccccccacccatgcccagcaatcccagcagctccagcgcaaacctagcgacgcagttccgggtctggcggggcgcgggcgcggctcgcagggcggtgggacccccaagacctcacgaggatccccggagggagacgtgactccrgggtcttagaggggtttaggtcggatgggtgacttgctttgacgcctggcctggtctgtgggtggcaggtgatcgatggccttggacttggagcccagacccgacggtgtcgagaggatctgaggagagtctcccctccccataccctctccgcctcccaccctctccccagccccatgggacttgtgaaggcggacttgcttttttcgccgtccacacaaccgcactagccgggccttcggcaccgacggaacatctctacctgcgccccgggagccctcgccgtctcacctcgcgcgctgccgtccgctggaagcacctccgcgcctccccaggcgccagactccatcccgccccactgcgccccgccccgtggctgagccgagccgggccgtgccttcccctcctcacccccagccccgcccgtcccggcgcagagctgcagaggcaccggacgagagagggctccgcgggcccagctggcagccaggccggagacaagttgcagtcccgggctctggtgacgccgtggccgcaggtcagatttgggagggcttttcccggcccgcgggcctgggcgctccgggggagggagctccaagggcagggtggcgggggagccgcagctcctccacgttatggaagaaaggggaatgctagccccctgcgcctccgatcttatcctaaggctaaaaccggtcctgttagggcctgtcctctgcccaatcaaggttttgagagactgggttctttgggacctgggaatgttgggtggcctagtttgcctgggcctgcgggttcttctcctggcaccagcacaacataccagggagggagctttgggctttaggatccaagctttccccctcagccctcccttaggaccaagatggccttgacccatcttcctcccacctcagggccaccagggtcaccactctagggcttcaggctggaaaagcagccatgtggggcaagaacaggcaggcctgtgttctctctctggttctgccgctggctctgcctggggcttcactgccctgtcctgggcaaccttcctgtcaaggttgttgagaagttactgccccatcgttgtgtaaatcattaagggcaacccacccacaaggagtggttattaagcatgtccaccttcctcttcaggtcatccccacacagcctggtctgaaagcccatttcatgcccttaggggctgagtggtacattagcgttgaggcccaggatcctgaagacatggtggtggcgggggaggggaatgacatcttgggatcagggaaggaccgctgtggctacttccgtatatccagctttacagcttcaaccatccagagcccagctcttcatgcactattaaaggccagcacctggacagactctgtgaaatgcagcaggtgatactgagctttccagttatggcagggcctaggttttttcatttaataggagatggagtagggatgaggtcactccctgggttctctcctctagacaacccatccaggaaccctgatgtttggctggggatgaggctttccctgagctcctttcttcctctatcctaaccccaatctccaggttgccttcaggaggtcttcgccggctttaggtactccttactcgcactcaggagtcccagcctgagtcctctgctgcctctgtttccctgttgactctgggtggagagagagagagcaggaagcttgcactaaatacatgagcacctggtagtgcatcccttctggatccaaccagaggagacaagctcccgcctaccctctctatatcacatttgcccaacacctgtcacttgctttgaattaaacctccttctcacatttgattctggcaaccatgcttagaagtaaacagttcaggcatatttgctcccatagctggaagaggaaaacaaggatcagattggagaagtgatttatctaagatcccacagtggactggsagcagcactgagacctcagcctagtctcctgatccccaagcagggccctgcctaaggaacacactctgcagagtgctgggccaaagcagggttttccaactaatcttagaaggtaaagtccatgaaggtatgtaccagggatttctgtttgttttgttcgtcacttaatctccagtgtctatgtcagtggctggtatgtagtggtgctcatgaagtatttgccgaatcaattaaagaattttcggaaagagtgagtctcttgaactttgctacctactgtgaccttggcccagccccaggccttgattcacagaggcctgcagagtctttcacctgattcttctgagtagctggggctcattctttgcctgtctttttctagggtctccattttgggacattctaatccctgagcccctattattttcatcatgggcttctgcctggctctagcatggacacttctggttggggcatggacccctctgggtgagtacagattggaggagaagcatggttaggagcagaggaacccagcatcctctgggctccsccaaggacaggatccatttgatattcatctgtatctttagtctctagctgacacagtgccctgcacatgagagttgctcatttctagctgttgaagaaatagatggataatggaatgaaaattatccccaaatacacagaattagggagccttcagctgctgtcagcactttctcttttattcttacagtttgggggccctttctctctcctctctcttctcttgttttccataaagtgagggcctctgactcaaaataggaaaagattgattagacacataagacaataaaggatcttggggtcagattggacccaaagctgaaggggagtcatcaatatgtttaaacattatgatgaaaaacaaaagcaatatcttccataagagtttcatgttgctgccttcagtagacagtttcttgctggaatctgaggctgctctctgcagtccggatctctgtggagggaagtgggcctacagtgccacagttaaagttaaaagatcaagtccctgatcactggggatgggagatgcaaaagcagaaagcagagaaaacctgtagaaggatctgtcctggctggaggtgacaggatggtgacaccttccctacaacttctcccttgccagagctrctcacatccacgttccttccagccctcttctttccctagctttggatttcccttttttccctcagctctcacctcttatccccaagaggcgctttccctgtactgtcctgcaaaggctctctcctttatgtgccacrggttcattttattttagagatcacatgtgtggccctgcccaaagtcttgaacccttagctgggttctttgctcaaacatcaggccctgagtcattttcccccctgactctctgctgagtgagtgtgaatgtgtgcgtctgttctctgaagtgagcagagaagaagccccaggcctatagactcctagtttgggggaaagaatcaggccagctatctgctctactgatcagaaagatccctgctccatccctgattccattatccattctggatcttccctctgtccctcattcctcagttctttccccagcagctgagtgctccctcctggaccctcattttggagaatacaacaggatcaagaggaggaattgtatgggggacaagatgccccagaaaaagggcaaagtcatccacatcaccagtccagtccctggtcctacccaagaaactggggaaaaaagcagtagcaacaccacacccttgccctgggctctgctcagccagagatgactagtcccctcaccacaccgaccctgcccagggatgggtcacagaatgacatgtccttctccggtatggagtgtggctggctcttgctctgtgtggtgtcttagggctggggatggattctgtcctgttgtgtcccctcagggagctgaagtttaaggggagtaaagtcccctgcatcctattccccatcaccactgctctcctccagccccctctccctctctgaggccgtctgtcagcacactctgctccctgctccactgctttttggctccctgccatgtctcccccactgarcagcttaaagatctggcttgagtttggacactactttgccctggtttttccctctgcaccctacctctcacatccacttcaggtatccactttctgctgctccaagtgccaggctcacagcacccatatccggcaggcctgcctgtcctctcacgcactgacttgcccagctgccccttccctccattctcacacaggagctcagaaccccatttcgtgggaggtgcagcgatttgatgggtggtacaacaacctcatggagcacagatggggcagcaaaggtaagtgagagccaagtggggatagaaccccagggccaggggggtactgagtgctgcggggcaagagctggcaagtaccagcaaaggccatccatttccaaggttttaggatccatgacatggaggaaagcctgggagagagggggtcaagaatgccccctgaagattcatccttatccttacccctcctaccccaggctcccggctgcagcgcctggtcccagccagctatgcagatggcgtgtaccagcccttgggagaaccccacctgcccaacccccgagaccttagcaacaccatctcaaggggccctgcagggctggcctccctgagaaaccgcacagtgttgggggtcttctttggtgagaacttcaacctctggggaaggaagccggtggggtcggctggacacctctgcatgtgaagaggggtcagaggatgagagagaagtgatggaaggcctaagggatgagggtgagaggtggaggaggcagtggggtatggtaggggtagaagcaggtggagagaggatccatgctgaagtgaactctggttggggaggcagaaatctgccccacacagaaagatgaggggtggggttagggaaaaggggcatccctcctcgttgggttgttggtgggggtaaggggctggtagaggcagaaacatgaaaataatctgggagggcctctccgtgggaccctgttcttaggcattgccccatggcttctaggacaggctcagggcagggttctgattctggcagagtggactgaggggaagtcaaagtgggggtgctaggatggcttgaccccagtgacaggattggtggctggtccatcaggaatgcctggctcctgctgcgttttggagctggtgctgccggcccgtttgcctaggcacactcacagggcacctcccagttaccaaggagaaagccaaactgtcaacgacaacagcttggatcaggtgtaggcacagagggacagaagagacaaacaactgggagggagtgcctaaggtcagggcttggacttgcccataatggctgctgagtcttttgaagcttcaggggagggaaggaaactggatacctagggtaagaaggaaagtggccctctgcttgccctakcaccccctcctgcactgcccgcaggctatcacgtgctttcagacctggtgagcgtggaaactcccggctgccccgccgagttcctcaacattcgcatcccgcccggagaccccatgttcgaccccgaccagcgcggggacgtggtgctgcccttccagagaagccgctgggaccccgagaccggacggagtcccagcaatccccgggacccggtgaggcggggaaggcggcgggaagggaccgcaccccagccaggtgggacctgggcttcgggcctggcagggcctggaggggagaggcgcccactccccagccgcggacacccgccgggccccggccttccctagctcgccgccgcccatcgacccgggctcacccgccgcgtgccccgcaggccaaccaggtgacgggctggctggacggcagcgccatctatggttcctcgcattcctggagcgacgcgctgcggagcttctccaggggacagctggcgtcggggcccgaccccgcttttccccgagactcgcagaaccccctgctcatgtgggcggcgcccgaccccgccaccgggcagaacgggccccgggggctgtacggtgaggccannnnnnnnnnnnnnnnnnnnnnnnnnnnnnnnnnnnnnnnnnnnnnnnnnnnnnnnnnnnnnnnnnnnnnnnnnnnnnnnnnnnnnnnnnnnnnnnnnnnnnnnnnnnnnnnnnnnnnnnnnnnnnnnnnnnnnnnnnnnnnnnnnnnnnnnnnnnnnnnnnnnnnnnnnnnnnnnnnnnnnnnnnnnnnnnnnnnnnnnnnnnnnnnnnnnnnnnnnnnnnnnnnnnnnnnnnnnnnnnnnnnnnnnnnnnnnnnnnnnnnnnnnnnnnnnnnnnnnnnnnnnnnnnnnnnnnnnnnnnnnnnnnnnnnnnnnnnnnnnnnnnnnnnnnnnnnnnnnnnnnnnncactccctcaaatcccctggttccttgtggggacaggcctcacactgctcctgtttgagttgcttctcccatgactgaccctggctggtcctcatctccacacggaagccgtccttgggctcagacccttccaggtccctccccatccaactcgtgcctcccctcgcccctctctgcccctcagaacatcgctgtgtatgagtggctgcccagcttcctgcagaaaacactcccggagtatacaggtgagggagcggggaaggaggatgggagggcttgcgtgtgtcttgcggggtggggtggggactacgttggggattttagggctaaattcttctgtcctctcttctcctatttccccaggataccggccatttctggaccccagcatctcctcagagttcgtggcggcctctgagcagttcctgtccaccatggtgccccctggcgtctacatgaggtgagggaggggctcaaaggtgtgtgtgctgggagggatggggctgtcaactgaggaaaatctgccctcaggagccctctgtacaggattatcagtctgaagtgtccccaagggaaagaccgatagagaggggaagaaaacaattgttttaaaagatacatcactgtggtttttaagtatttttacttccattctcctgctgctggtgtagatattaccctcccccccaccattaaatatagagtaataaaggttcagagggtgtcacaaagtccactggtctaaacctcatgtcttgacactacactggggacatttttagctataatcacagagcccagggcctgcaaccttttgggggcagagggttctaaaatgtgtgcaatctgaaggaaaatattggcttcaaaataatgaaaagggaactttaaaaagacataggccgggagcagtggctcacgcctgtaaccccagcactttgggaggcagaggtgggtggttcacctgaggtcgggagttagagaccagcctgaccaacatgcagaaacctcgtctctactaaaaaaaaaaaaaaaaaaaaaaaattagccaggcatggtggtgcatgcctgtaatcccagctactcgggrggctgaggcagaagaatcgcttgaacccagaaggcggaggttgcggtgagccaagatcgtgtcattgcactccggcctggacaacaagagtgaaactccatctcaaaaaaaaaaaaaaaaaaaaaaaagacacatatttaaataatgtatatgtatgtatatgtatatgaaacaaagcatgtccatttatatttttacaattgctttataatttaaaacaattcatagattagatttactctggaataatctctggggtatgcctgatgatgtctgagaaatagacaattgagttattcatagacaagtagtttcagaagaacaatttttgaatcctttaaataggtatatatgtacacatatattgtacatataactgtgtatatatatattttatatgtgtgtgtatatacatatattgagagagagtcagagagagagtgtgtgtgttaatgagctatgagtacattttagatatttggtctgatgttgtagatgggaccttccaaaagtcagaccctccaggatgtgctaaggtccgaaccacacaccacctcggaaagacgatggcctggggtccctggataccgcctcagagaccagaactgatgcctgacattataaccccattatctcaatcaccatctccctgctccttgcatttcagaaatgccagctgccacttccagggggtcatcaatcggaactcaagtgtctccagagctctccgggtctgcaacagctactggagccgtgaggtccgagctgggggccacatatgtggtggatgtgtgtgtgtgcatgcttatgtgtgtgtgtgtakgtgtgtgtgtgtgtgtgtgtgtgtgtgtgtgagtgcatggtgaaagtggtcagtaaggctgacgcaggtagctgggataggctggggtgaaggaggcagcctggaggacctcaggcatctcccctacaaagtctgaggtgaccaggtagctgaacatggccaaaagccaacccaccaccccaacctcagggctgtgggaaagccagtgggacctgtgcaggtatggttccgccttcgttgctccctctcacgttttccctctccttcgacagctttgggcgtcctgtaggccttggagtaccccaactagtctcacttgccccaaggaaacatcccattagacacacatcccgggcagtgtgtgaatgcgtatgtgtgaggggggtggggaggaagcaggggttcctagagattattggggattgtccatccatccaaatcaggccagcatgggtgaagaacattgattgtgaatttaaagcaaaatgagatactttgtgtaaagtgtttactaaggggaagggagtggggaggaagaaaaaagaagccatagaatcagagccctggagctgagttgaaagaggactcagtgtccccctcatcagagtccctttttattaagggaaggaaactgagttcagagagggcctgtgacttgcccaaggtcatacagctggttagtaacagaggactaagacctagatcttctggttactttgccaaccacactgtcaagtatcccaaggtcaaagtaaaattttaagatcccttgtgcttgtatagacctctgtcaggcagcactgacagaggggacacccctcaccctgagtggggaatcaacctgcagaagaggaatgtcccaccggtttgggagcaaacagcaggactgggtgggctcagggataaggatgatggtgtggagggagccggctgtctaacctctgaccccattaaccacacccctttcctccccacccccaacctataaagcacccaagcctacaaagtgctgaagatgtggatgcactgctgctgggcatggcctcccagatcgcagagcgagaggaccatgtgttggttgaagatgtgcggggtgagtctgaggctgtccctgcaggttgtgaactcctggcctctgggaagaggctcagctggacttccagaaccaggtatgagggggtgcctggggctgggagcctgcactgcactcactgatgaaagagcttctgacatgctgaccatggctccttctggctcaagtctcctggggctggttggagcttggggcctggactggacactgctgtggtggccctgagctccctcagactgtctggtatcttgtctccagatttctggcctgggccactgaagttttcccgcacagaccacctggccagctgcctgcagcggggccgggatctgggcctgccctcttacaccaaggccagggcagcactgggcttgtctcccattacccgctggcaggacatcaaccctgcactctcccggagcaatgacactgtgaggagkggtcaggacccagagggtagggcgggagggacaaggcacgtgggcctgagacatggaagataggcagtgaaacttgagcacaagagacaagcacctaatgggaggggcagggcttacccagatcacttttcccaatattacatatcaggatgaagattaccagaccagcaagatttggctttgcactcggattgttcagatccagcaagcgtgtattaagcatctattgtttgctaggcacttaatagkcactatcttatttactgttctctccaccctcctgagtgggtatagaaggtccttgacttaggaacaatctgtgctttcttgcaccgatgtttaagccacctttcaggagtcagctgttacaccctgagctaccacctggactggtggcccaggccaaggtagagcttgaggcggaggcccagcatgccttacccattcctggtgttctcaaaccagtagcggtcaccatcccacagccgcacaaattggtcaaggatgatggtgctgaacaggggtcctgttcagctgctagccaagagaccagattgggataccttaccatcttgacacagcagtgtttctacagttgtgtgcctattctattgcattttgcccttactattttataaaattattggaaagtggggatttgaaaggccaataaagaagtgatatgagcatgggggctcgtaaactttataaaatcaatatatagataggaaccaccaggcacaccaaaagtagcaaatctttagcttcaaatgggcctcagtgggattaagctggtcaagtgctatttacactgtggagaaaagaaaactaaaataaaggtcaggtagaaaatgctggtgatatgtttttgaaaactgtctccaaaaggcaatatataatcaggcatttgattaaaaaaaattttagttctaaagaatagaaaccttttataacacatcattctgccattcaacttttgcacattctgattttgtcccttcaactttcataccttttcaagaacaagttatgaatgcggattggctggctgttttattactttataaaataggcagctgaatgtgtgagagggttcccataaatggagttcacttatgtaaaacactcagagaagtgcctggggcataataagcactgtataggagtgagttactgttactgtcatttattattatcatccctggggctaatccctgggagccacctctttgccttagggtgggtgccgtgtcctttctcttacttctgccccttcttggttccaggtactggaggccacagctgccctgtacaaccaggacttatcctggctagagctgctccctgggggactcctggagagccaccgggaccctggacctctgttcagcaccatcgtccttgaacaatttgtgcggctacgggatggtgaccgctactggtttgagaacaccaggaatgggtaaggcgtgctgggcctccgcctcaggctctacctcggcctgggccccagaccctctttctggccttagacagcccccatgagcccttgattccaagccagcccaccacccacttcccaacacctctgggtctcttttctcacctgggtccttgggcctggggttgctggaggcctgcatccccttcccatcccagtgacttctacttactccaacttaggctgttctccaagaaggagattgaagaaatccgaaataccaccctgcaggacgtgctggtcgctgttatcaacattgaccccagtgctctgcagcccaatgtctttgtctggcataaaggtgagtggccaaggggtggctggaggagtggtgggtckggagcctcgtccctcttcagctctgggcttggctcaatgtggctgaacgtcaatctctgtgctccaagaggggagtgagctgtggttctgcccttgggaactccaggtgccagggccaccacttgcagctgtgtagggtcccctctgcagaactccaggaagtgctgagtgagggcagaactgagactcagagagagstggtgaggaggttcacattcggctgagatggagctcgggctaggtataatattaggagggctcagtgcagtgaggatatcccaaccctacagcagtgagggaagcktgtgtgtgtgtgtgtgtgtgtgtgtgtacacttctgtgtgtgagggagagatggaggttgggattcattttttaccccacttgttacccaaggcagccccttcccctcagctacccagagtgcccccaccccctttctgccaccctaacctcctccgtgatcctgtgccagcacctgtggcccagcacccaggacgctggcttcctctgccttcccaggagacccctgtccgcagccgagacagctcagcactgaaggcctgccagcgtgtgctccctctgttgttcgtgactattttgagggcagtggatttggcttcggggtcaccatcgggaccctctgttgcttccctttgggtaaaatcatggacagagtggggtggggtgagagatgcaagctaggggatgcagtttgggtggttccactaatgacaacaaaccacgcaaaccacacagagcatggtccctttgggtaggagaatgaaacattagaggaggaagggacaagagaagtgtttgacctgcagagaagtcagctcyagggagaattgcctccctgttttcctgggactgcccccagggcccagcattggtcaggagccagggggaatctataatccacagctttttgcaggcctgagcctagaggactgtcagaggcaaatccctgtttaagaacaagggctaagacggggcgcggtggctcatgcctgtaatcccagcactttgagaggccgaggcaggcggatcacctgaggtcaggagtttgagaccagcctgatcaacatggagaaaccatgtctctcctaaaaatacaaaattagccgggcatggtggcgcatgcctgtaatcccagctactcgggaggctgaggcaggagaatcaattgaatctgggaggcagaggttgcagtgagcttagatcgcgccattgcactccagcctgggcaacaagagcgaaactctgtcaaaaaaagaaagaaagagagagagagagaatggaaggaaggaaaraaggaaggaaggaaggaaggaaggaagggagggaggaagagcaggctggggcagacatagtcgctggagtgagggcttggggcttagtctttggcaaggctgtgtgtgggtcagctagcagcctggtggggtgagtctagtctctgacacaaggactctggacttagtctctggccaggaagggacgtgagtggtggaatctgaggaggaagggtgggtatcttagatgctacccaaagctccccaygggatgcagagcagcttcccccagggaccttcccaatctgaaacaattgagcaagctgacctaggaggtggggacaataggtggtattgccaggtaaggagctgagaaaggagctgcttccatcccctagacccccacgtctccctgaacctctgcctctgccctcccagtgagcctgctcagtgcctggattgttgcccggctccggatgagaaatttcaagaggctccagggccaggaccgccagagcatcgtgtctgagaagctcgtgggaggcatggaaggtaggtctagggctggccagggtggtggtagggaggacatggctcagcgctacagctacccacctccaccccagcagcctaaggaaaaggcctcccttttctaggactgtaggcaaggccacagtggcattaagcagaagttggacatggagtcctgcagcctccagagtttctcatgtgcagcagtcattggaccttgccttacagggagtaagtgtaagaccctgtagtgatcttacagggtcactatgacttacgaatccctgggaactgctgatttgtagcatctcaygctggaactccaggcaacagagaagtggtyaatgaaggtccagagtcagactgggattggaatcttggttccaccaycactatgggctattgggccttaggcagatttttgaatctctctaaaccatttttttcttatccataaaataggaataataatagcacctacctcacaggtttataattaaatgaaataattcatgcaaagcacttggtatagtattgagcacatagaaaacattcaggaaatgatagttactattcttttcatggggctagaggcacagccaggctttcagggagggaatgactctcagtaccccagaaggggacaatgaactgtggaggccttgatctaatttcagccctgagctggccctcttcctcccaatgtacctctgatgggtcccagctgacgaagccctgtctctctccccctagctttggaatggcaaggccacaaggagccctgccggcccgtgcttgtgtacctgcagcccgggcagatccgtgtggtagatggcaggctcaccgtgctccgcaccatccagctgcagcctccacagaaggtcaacttcgtcctgtccagcaaccgtggacgccgcactctgctgctcaagatccccaaggagtatgacctggtatggctcagctggcatctggctccttgtccacagccaaggccagggaggcagccaggtggaggggaagaagcatggggtcaggaggcaggaaatgatagttactgtgcaggagtctggcttcttgttcccaggtggagtacctgatagagagataaacttggacacgtttatcctgctccgggtctgctggatgacataatctccatggtttcctcctaactcttgcaaccacagtctgcctcctccttttctaaggacaacctgtcaggtcccagctgggtgtccttggaagaagcaaagccctcttccctgtcctcttatctcaggatgtagtgaatttttagagattttggaggagagctaaatcagaggcctggcccatgatcccctccatcctctggccttcctgccctcctctgccttctccagtatggaatagagggaagaatgtctttgtacatgtgcctttaaatccaaactctgcacctatgagcaagtcacttaaccctactgagcccctttcctcttctgtaaaaggagaaataatatccctttttcaaggccaccccagtggcccctctgacataatccacataaactgcctaacctcaagaggccttggcaaatggttgcttttgctcgggctgcccccttaggtgctgctgtttaacttggaggaagagcggcaggcgctggtggaaaatctccggggagctctgaaggagagcgggttgagcatccaggagtgggagctgcgggagcaggagctgatgagagcagctgtgacacgggagcagcggaggcacctcctggagacctttttcaggcaccttttctcccaggtgtgtacatgggaccagatcaatccttatgctgtggtggtgtccttacctgcatgaggccatggggtgactcgaggggaagtcaaagcccagagttctcagctaataatcaagtctattgcaattttggatgaatcaccagactttatcataaggagttgcccctgcccccatctgaaccccacctccaactaygaggctccagtggggggatgcccaggaatgggcttctctgcatgtgttgcttatcgctctcctcagggctgcccagactttccatcctcactcatctcagcctgcctcaaaggctgcagagacccagagcagygtgggcaccataagggatattgttcaccccttcttgggggagtgcagctgccagagccctccatggggcaytgatgtccaccttgcagacttctgagagagactgggaggatatagggaaacaagacaaaaatgcagagacttgagtccacagctggcacaaaaatagaggcagcctgggagcagggtagtggagtggagaaacatggtagataaagataaatatggtcaggtgcggtggctcacacctgtaatcctagcactttgggaggcggggcaggtggatcacttgaggtcaggggtttgagaccagcctggccaacatggtgaaaccccgtctctactaaaaatacaaaaattagccgggtgtggtggcgggtgcctgtaatcccagctacttgggaggctgaggcaggagaatcacttgaacctgggaggcagaggttgcagtgagccgagattgcaccactgcactccagcctgggcaacagagtaagactccatctcagttaaaaaaaaaaaaagataaatacagcatggttctcccactgaagaagcttatccttccactggggagatggaacatgcacagaaaggaagataactggcaaagaatgaaggctacaaaagtgattcaggaaatcagcaatccgggagctcagagaagacagtgagtcttcagcctgctgtgagatcatgatggaggtgatatttggcaaggacttaaagttggacaagttttggctcagaggaaaggaacaggagggactaaaaagagggctccatggaagagcaaagaaattaatgtttgaggagaaaaagcaggatcatgtggttggggagaggattcatgagagaagcatccattgaacagacatttactctgtgccaggaacatgatttaaagtcatttgaggacaaacaagttgaayttgaatatgtacaagaacagagggaccctcagctgggtgactccttcccagagcccaggcaggactgggcatctccactcattcaggatccttcggggctatgggaactccctgtgctgagacacgaagggtgctgatatatcctgggggtggctgtcagtgtctcatatgatttcagctttcagaacattttcaacacaaccacttttgttgatctcgcaataaacctgtgagataagtagggcagatgaggaaatgaattccaggcaaccgaagagacttgcatgaggtcattcagcaagcaggtgacagagttgggacatgaacccaggtctcttgcctccagccctaggctcttcccactacagcaccttgtttgaagctgtaaggtttaccccatgaaaccatcaccagacttggagtaggcacctcacttgacaggcaggaaagacaggtactgtggcctgtggcctgcctgcttcctcactgtctgttctctcatactggggaagcctctgggtgggctggggatggccacaatgagaattcccctttctcaagcccagcttttcctcaatccagctgaagccttgtcttagttaaaactttttttacacataaataagagaaaccccaataagctagcattgacaaagggtcacttgactctgagaatacagagatgtctcaggaattccaaagggaggacatcaacctggcctgaaaggacctagaaaaggaaagctgtcagccaatgaggccactcctcccctaggctgcctttgccttacttgatctctaagtggctgagcacttggaggaagagagtggtccacactttctgagctttcttgtgctcaagtcaagacagacctcacacttcttaattccaagtgagttccctgtccagtcagctaaggcagagggtcagggttctgtagaacaaacatggcctcaggcaccaccataaggcctcctagcagagggggtcctgggcagacacctcaaaaggtggctcctacagggctcagctgaacttcaagtcaaggaagccttgtctcctctccctccctctgcttctgcccaagtgcaggtgctggacatcaaccaggccgacgcagggaccctgcccctggactcctcccagaaggtgcgggaggccctgacctgtgagctgagcagggccgagtttgccgagtccctgggcctcaagccccaggacatgtttgtggagtccatgttctctctggctgacaaggatggcaatggctacctgtccttccgagagttcctggacatcctggtggtcttcatgaaaggtgagggaggagggaatgataggagaggctggacaggggctgatctgttggagrtggggaagccctgggaccaggtctccagccatggcagatgcccagaagtgcccaggccgaggtcaggaagcagagcgacccttgctgtgtccagaagtgggtcatcacactggtgtgaggccccttttggccagcctgggggttcaggcaggcaggcgggggctctccttatggagtcctccctctcccaggctctcctgaggaaaagtctcgccttatgttccgcatgtacgactttgatgggaatggcctcatttccaaggatgagttcatcaggatgctgaggtttgttctctgggacagccaggagaatgggccagggcagggatgccagggcaaatagatgggacctgaaggagagagcagaagggccaaggaaggaagcctcctccttacccatgtaaccagaggctgttcaaactagcagggggcttgggatgtggccagtcggggcccctccacatgggcacagagaacttggtgcgatggagtcagtgtgtcctgtgtctgggtcgcaggccccagtcagggccggatggttcctctcccccaaccccagatccttcatcgagatctccaacaactgcctgtccaaggcccagctggctgaggtggtggagtccatgttccgggagtcgggattccaggacaaggaggaactgacatgggaagattttcacttcatgctgcgggaccacaatagcgagctccgcttcacgcagctctgtgtcaaaggtggggcagcctggtaggcagcactgactcattggttaggcatagtaggcacaatgcccacatacttttaggagtccacagaaatgttttaatttccattaaaatcagaagaaaaaaatgaatgtagtaatatgtaataatgtatccaatctggattgtagttttctttatatcaacataattatacaatataattttaaaatattattttttatttttatggaggaaaggacccaaaaaggtgaaagtgcctagggcccaggaaagtcataatgcagctctgctggtggggtgggtagggtcaggatagggtaggaaatggtgattggaactctgcttcccctggctccctgccaaagccccctgtgcgtggtgcccagggcagggggagactgtctccctgttacagccctacccaggccatacttccttcagctgggatgtctggttgtgggggtggggtggtatctcttggggtttttttttgccactatatctcctggctgagtgctcagtaaatgtttgctgaatacatgaagacccagttctgttgtccttccccctacttcctgccccaccagtgtctgattcaagtgggtgggggctagagttagagtgaggaatgggcaagcagcaggcaggagggtctgtctgtggcctgctctgagctgttatggtatctttgcatcttaggactctcactggggcatgttgagaccaaacccagcccctcccagaattatgagaaggggtaggctgagcagmctccacagggaagaggggcaakttagataagacacagatgagcctctggtcagggcttccccctgggggtaaggagagctggaagagaaggaacccagcactcctgattctgcagctttttacctttcccaggcagccagggcagcaggcacctgagcctaagggcaggggcaacgaaggtgcatggaagggagcccacaccacagagtcccagggacatccaacacctggggtggagggtaaaaccaggcttggggattgaggaagattagcactgagtattgttttcttttaattgttattgactccagattttttttataaagattttaaaactaaagaaaaggaacaaaaggccaggtgcaatagctcatgcctgtaatcccagcactttgggaggccaaagtgggaggatcacttgaggtcaggagtttgagaccagcctggccaacatagagaaaccccatctctatttaaaaaagtacaaaaattacccaggtgtggtggcacatgcctgtagtcccaagtactccagaggctgaggcacaagaatcgcttgaaccaggaggcggaggctgtagtgagccaagattgtgccactgcactccaacctgggcgacagagactctgtctcaaaaaaagagatgttccttcacttttcacctagatatgctatttgttaccattttaccacatttgctgtttgtggaacatttgagagtacaggcattaatactttgttttaaacattctgatttaattttaatatagttcagcttatcttcttttgacctcaactatagaccagggtcatcttcaggcttggttcagcacttggaagaaacccagagattcccaggactcctgtaagaatttggctttgcagcttagtcctgccctgccttcagtgctcagcctagacaggaacaatggggtggctcctgggagagcttttctcctgcatattttattatgaacattttcaaacacagaaaagtaaaaagaactgtagcgtgatctcccatatacctaccacctagattctacatttagctcttggaggttttaagctagaggatcttaagccaaatttttatggcagagcaggctcagaaggcaggttatatacagttcccgaaatctaccccatagtcccagaagtgggactgatgatggacacactttagggaagcctgcctggccaactttctttcaggccttttccctgcccacctatggctgggtccagctcccattggggacaagggctgaggttsgagcacccgaaagcagggcctccattggtctgggactgtctactgtgcctgagcatgggatggtaggagtgctgtgcgtttgagccaggtcttcctgggctctggaccctgagctgctccctagcctggctctgctttgcaggggtggaggtgcctgaagtcatcaaggacctctgccggcgagcctcctacatcagccaggatatgatctggtgagcacccatctgggaatgtcggggggaggagttggggagttgccatttctctcccctgaatggctgggatcagggccaccgctagcccatgcagcaccttcaaacaaattagaaaaggacacccctttctctaggcagacacagccctgtgccagggcaagcagaaagcctgctggatttccgctctcacttacggcctggcccagatgcccttgtgaagggtaaaggcatatgcagcagccttagcgaggacccccaagatcagactctgtctataggtgactgtgggaatcctgctgtccccttgctgacagctctgatccttcctcagcagaatgggtttggaggcagaccaggatagcagaggaacgagtggttgagatggccagcatcctatctcttaccattcttgtcttagtccctctcccagagtgagtgcccgctgttcccgcagcgacattgagactgagttgacacctcagagactgcagtgccccatggacacagaccctccccaggagattcggcggaggtttggcaagaagtatgtctgctcttccccttaagcccaggcagttcatccattccttcagcttataaacatcttttccttggtgccaggcactgtgctaaacattgtgggtacaggcagggtgaatagtccttgcccaagaacatcacaatctaagaagagaatctggtacactgataatttcaatgtcccactgatgactgttctaatagtggtaagagcgaagggctttggaactcaaggaagcactcacctctgccagggaggtcagagatgccttcatggaagaggtgtcctttgagtctctagtaaaggctgaatatgggcgccgggtgggagttgggagctacagactggaaggagagggactgagtgtgaatgaacacaggtagatggagtacatcccctgggaagaaatgaccactccaagccatccctccactgccagcttgcttatgcagtgcaatatagcctgatgcggtgaggtctgaacccttcttccacaagggtaactaggtttctttctcggaagcagtgggcttccctcacttctgggcggctcacctccgtgaagtggggccccactagcgttgggtcccatggtgggtgccaaaggctaaggcttcctgtctcccagggtaacgtcattccagcccttgctgttcactgaggcgcaccgagagaagttccaacgcagctgtctccaccagacggtgcaacagttcaagcgcttcattgagaactaccggcgccacatcggctgcgtggccgtgttctacgccatcgctggggggcttttcctggagagggcctactgtgagtgactttacttaccacgagccctgtccctaggcttgcaatgagtgatcgccctgggggtggggcctgcgataagtgccagccctgggtagggtaagtggagcctgtctgagtgaagactgtgcgggggaggcctgttgtgagtggcagccggccagggcctaccgcccctaaccagctctctgtcctctgcactgaccctcgcttgcctgcctgggccccctccacagactacgcctttgccgcacatcacacgggcatcacrgacaccacccgcgtgggaatcatcctgtcgcggggcacagcagccagcatctctttcatgttctcctacatcttgctcaccatgtgccgcaacctcatcaccttcctgcgagaaaccttcctcaaccgctacgtgcccttcgacgccgccgtggacttccatcgcctcattgcctccaccgccatcgtcctcacaggcagggcctgggtgtccctgggaggctctccagggcctcccgcccccgctgacttcccctcgtatgagagcccccctctctgctggcacttacctttaatgtccttctccatcaggatggagttggcctgggccagggtgtgaagtaagcccgggagcctgtcgctggtcacttccaagtgcctcttcccgcactttccagggcgcctcaccagcctcagctgacaagttactaacaccccagaatgagtgtgcataatgtgtcaattctcccaatttttatgttttaaagcatgactctgagagaaagcaaaggagtgaacttctaatgctgtaatttcagactcacatggttgcgcacatggatggtgtgtctgtggggtgttgggtagggccaggtgattgtttagaggtcagaagtccaggccggcgcggcggcttatgcccctaatcccagcactttgggaagctgaggcgggcggatcacttgaggtcaggagttcgagaccagcctggccaacatggtgaaaccccgtctctactaaaaatacaaaaatcagctgggtgtggtggcacatgccggtaatcccagctactcaggaggctgaggcaggagaattgcttgaacctgggaggcagaggttgcagtgagccgagatcgcaccactgccctccagcctgggtgacagagtgagactccatctaaaaaaaaaaaaaaaaaaaaaaaaagaggtcagaagtcgagactcctaaggtacttctctgggacccccactctggccagsgtcctcgatcttgggctgaatgagtgagcacccaccctgggctgccccaagctcaccacttggtctgctcttccttagtcttacacagtgtgggccatgtggtgaatgtgtacctgttctccatcagccccctcagcgtcctctcttgcctctttcctggcctcttccatgatgatgggtgagtaagtgcgartgtgtgtgtgtgtgtgtgtgtgtgtgtgtgtgtgtgtgtrtaatggggaggattccttttgggtggaaagaaattatctggctccagaggagactgtcaccttctaggttacaggacagacagtgaccagcctgagcccctaatgccaagtcagcaggagagactggtgtctgagttggggtgcctcccctgaagggtcccatctggaattcccaaagatctcctctcattagctgggcatggtggtgcgtgcctgtaatcccagctactggggaggctgaggcaggagaatggcttgaaaccaggaggtggaggttgcagygagccaagatcatgccactgcactccagcctgggtgacagagcaagactctgcctcaaaaaaaaaaaaagagagagagatctcctctcaaggtgtctctttgctgtcccttccacacaggtctgagytcccccagaagtattactggtggttcttccagaccgtaccaggtgagaaccctccttgatccatgaatttctggacctgactgtgagttcaaggctctgggttctctgcaccccagagcaacccacgttcactcactcagctcttccggtgacccaggctctgtcctctggcctgaggacactactgggtgggcaggagacttagactactctgcattccagccctcctcgcaggagctcaactgggttcctgcccctactttgggctagttyctyctctagtagggttaggaggagaaatatctcctactatggactagttccagtggaataggagtggctggctacctcttcccccaatacacacacataccctaacagtagctttgaggagtgctgtgccccagctgcatgggggaaggagcaggctctttgtcaagccagacagaggcgcctacccagtatgccttgaaaggagcgtttgggggatattcctaactccctataatcacccatcttagagctattagctgtgaatctattcaaattctcttgaacctatttatattttcagtctgttccttccttggagtaacataatttctatactggctcctctctgtgaaacacagcatggttttttttttttttttttaatcctaaaatgatctgctttgaacttcagagggtgcttgctaattcctgcacactgagatttagtggataaggctgtgtttatgctctcctctccttttaggactttacaggctttggttagatcccttcttaacctttacttttttatacttcagggctctaatcttcttaacttctgcctctcttccttgatcacttgagggagcattctctgtcctctctgccctgccctggctccagtattatccccctgtatacccatggcctggatcccctgtgagaggaggggcctcccaccaactctgggttgtacttggggaccctagtgatgagcagggacagtgtggtcctggccagtcactaacagtgccagtgctcatgctgtgtgctgtggcagccaacaaagagtggtgcagggacaaggaccaaaccttgactcgatgagagtacrgcctgtcatttccattgtttggcccagagggcccagagtggacaccctctgcatccattcattcagcacacatttatatagggcccacggtgtgccaggcccttgcactaggcactaggattcagtggcaaactagcttagcctgttcctcattcttgagaacccgagagtcaggaaagtgacagacaaaaaccaaataatgacattggtgaaaaattggctgggtgtggtggctcatgcctgtattcccagcactttgggaggccaaggtgggcggatcacctgaggccaggagttcaagaccagcctggccaacatggcagaaccctgtctctactaaaaataaaaaaaattagctgggcatgatggtgcatgcctttagttccagctactcaggaggccgaggcagaagaatcatttgaacctgggaggcagaggttgcagtgagccgagattgcaccaatgcactccagggagcctgggtaacagagcaagactccatctcaaaaaaaaaaaaaaaaaaaatcatggtgacaagggctatgaaaagtgaacaatgtctgctgaaatgaaaggtacctgtgatcagtggtgttgggggagaggaccagaggagaatgctgggacattcttactccaacttgggcagtggagtggagaggggaccttggaagctccagaacagttccctttcaaggcactgatcttctgccttccaccctatattcattttgcaggcctcacgggggttgtgctgctcctgatcctggccatcatgtatgtctttgcctcccaccacttccgccgccrcagtttccggggcttctggctgacccaccacctctacatcctgctctatgtcctggtgagggcttttggctgtgagccaggccaggagggtatgggcaggacatttccagggaggcaaggagagctgggacattcattcaatttctagctatttgaagcatcctcttcacttctcgacgtccctctttgaaggtggagatgatagtacagggctctccattaggatgaccccaatatgcagcacttggaagctcggctccctggcatgggttttgcagtagcagccctgccagactgatctccattcctcgcagacacctccaccccacttctgcccagctagtctttccccactttgggtggctggttttggctcctgggtggactacctgcacccaagagagcatcaccctttttgaagaaacttatcttaaatgggttctgccacttttgttctgatcctatttttgggggcattagtcacacctgctaagtgccacctgtacagtatataagcttgttcaaaatgacttcagttggattgttgatctaatgaatttttattttttattttttgagacagagtctcgccctgtcgcccaggctggagtgcaatggcaygatctcaactcacagcaaccaccgccttccgggttcaagcaattctcctgtctcagcctcctgagtagctgggactacaggcacgcaccaccatgcctggctaatttttgtatctttagtagagacagggtttcaccatgttggccaggctggtctcgaattcctgacctcgtgatccacccacctcggcctcccaaagtgctgggattacaggcgtgagccaccgcgccaggccaatcaaatagatttttaagactctacctatcccctttccttctccttaaccttggctcctgcctccctctctccatgttgcctcccttctcatgttcccttcaccctcccctgggtttctcatcggctgcctagctggttagttcccgagctgattctgtgtccctgtgttgtggctctgcttgtctgccttcctcatgagcagaggcaattccctaaagggtactctgagggcctcacttagaagctaaaccaaatcccaaggctccagctgttccctgcagcagaactgcatacagggctctcctttgtgccgagacaaagagaaactgcaccatggcctcggtcaggttggctcctgccrtctgacctgccttctctcaggtgcagttctgtcctcactgacagataggagggtctgtttcatcttgcctgttgctcagcatttcacagttctgaagatgactacttagccttggcttaggatgtttcctagaactgatgatatgcgtttcctaagaaacatctctttctttggaagctatgactaatttaccctctctcctcctcttcccaataatgagtggagccctagcattctcggctactgcttctgttgggggtggaaatgacgttcttgttcctggtgataaagcagctactttgaactagatgagagatccagaagagtggccaggcaggctccctaagacccagagccctttytgatttgtcctggggtgtaggcatcactaggattccaagccacccttcctgccagcaggaaagtcaggggttcgaaaggtgtggccgggcacagtggctcacatctgtaatccagcactttgagatgccgaggtgkgtggatcacctgaggccaggagctcaagaccagcctggtcaacatggcgaaacctcgtctctactaaaaatacaaaaattagctgagtgtggtgacgcacacctatagtcctagctactcaggaggctgaggcatgagaatcgcttgaacccaggaggtgaaggttgcagtgagccgagatcatgccattacactctaccctgggcaacagatggacagcctgtttaaaaaaaaaaaaaagaaataaaaaaggaaaaaagaaaggtggaggcctctatgctaggctatcctcaccagcagtttgggacaatctcatctcagggagatcagggcaagagcaccctctttgttcccacttgtcccaggcgtgaccacttgacttcaagcagaaagataaattacaagtaaaggaccccagtatagactagaccctggggaaggatggccaggcttctgatccaggcagaagagggcagggctagcacatcagaggctgagctggctgagccaccaccccatcccaccagccaacaargaatctgcagcagccttgtggtttaaaaggaaagccagcacaaaatagggtgtagaaacagagcagcatgacgtcaccctgccattgtactcagcctgtttggatgctcagaaagccttaggggtgggtgtgggctccacaatgaaacagtgaacttggggaagaaagagccagttcaaagaagagctcagagaggtttaagttagtcttgtagggaaaggttcaagaatctaggaagacttagctgggggaagggaacgcctgaatggggaaccagagttcagtttaaaagctatctgttggccgagtgcagtggctcgcacctgtaatcccagcattttgggaggctgaggcgggtggattacctgagatcaggagttggagaccagtctggccaacatggtgaaaccccgtctctacaaaaaaattagccgggagtggtggcatgcgcctctaatcccagctactcgggaggctgaggcaggggaattttttgaaccagggaggtggaggttgcattgagccaagatcacaccactgcactccagcctgggtgacagcgagacttccatctcaaaaaaaaaaaaaaaaaaaaaaaaaaagcagctatctgtgtatctgtggagggtcttttatgtactagctctctgtagggcccagcagcagaaggggagactctaatctcttccttaggaacttaggattcgctgtgacaaaaagtggcacatgcatgaaatgatcaaaatgaacacttgatataggattaattgctgagcggagtgttccaaacagtaagttataggagttcactgaagggagtttcacttgggctaaattggctagggaagactttgaggagaagactggacttgggccaagggtctgggggaggtaagctaagctttgasagggcagagtggaaactgaagagcaatccaggtaaaaggaagggcatgagcacaggcagaggtgggaatggtgataggatattcaggaggcagaggggacagggctggctgcagatggccatagggcattaggtggtggcaggacatgctgctggtgatcatgtggcagctrcagttgaaactgaggggctgtggctcagctgagaggccatgccacatggcggagcatagaaagagatgagcagagggtgacaaaaccaggcttgggcaacacccatgactgggggtggcagaaggaattaagccagtggaggagatggaaagcgagtggcccaaagtgggagaaccagtagagcattgttgcagaagtggcgagaaggaggtggtcactagtgcctcaggcttctaagagtaggagccaacatggcctgaaaagatatattttacccatttgtggggctgctgggccctcagtgggaaggtcctaaggagaggtggacgcagaagtcaaactgagccagactcaggagcaagcaagtgggaagaatgtgaccaagtagtgtctgaccatgttagacaaacttattagggaaaggaccagagctggatgatacttgtcagttattacatggaaaagggagactagttaggtattcttagcctggaaaaggagaggataaactggggaagcgcctttccccaacagttactgtgtgcctatcatatgccaggcagaaactgctaggagcttataatggcaaacagtccctaccccttcagtccagtggggaaaacgacagtaaacatgtaaatgaatgaggaagcaaaagtactgttggccgcgcgcggtggctcacgcctgtaatctcagcactttgggaggccgaggtgggcaaatcattcgaggtcagttcgagaccagcctggccaacatggtgaaaccccatctctactaaaaatacaaaaattatctgggtttggtggcaggtgcctgtaatcccagctactcgggaggctgaggcaggagaatctcttgaacctgggaggcggaggttgcagtgagctaagatcatgccattgcactccagcctgggtgacagaatgagactctgtccccccaacccccaaaaaacaaaagtactgtggatgacaacgcatgcactaagagagttaacaggcagatgtggtagagaggactgaggggaggcctgaggaggtggtgtttctactgagacctgaaaaatgagatggagctagccatgggaagaaccaggagaagggcattccaggcaggagatgcaaagatccttaagcagaaaggactggccgtgtttgaggaacagggaggggagaacggctggcaggcagaagtcaagagtacttgtgaggccttgtagtgcaatgggaaggccaccaaagcttttaaagctggggatgaacaggataaaatgaactttaaaaagtcacactggctgccttgaagagacaggaattacagtgagacaagaccagtagaagacctacttccactggaaggctcctgcatgagtccaggtgacaggtgacatcacttggtctagggtggtgtcagggatctagaaaatactctaattcctcatggaatgctatggaggatggagttgggaatggtgaggttttgcaacctagaaggagcatggtacgtggtgaggtgggggctggatataccagcggggaagtatggagggtctaaggcctgagctggccctgtattctgctatgggcatcgctaggtctgagcagagctctttcctccatcyagctcatcatccatggtagctttgccctgatccagctgccccgtttccacatcttcttcctggtcccagcaatcatctatgggggcgacaagctggtgagcctgagccggaagaaggtggagatcagcgtggtgaaggcggagctgctgccctcaggtaccagcctggcaggagatcagcttggtgacactgagggagctgaccgggcagaggcagagtctagaccgcacagtctcctggtcgggcccagtggagctggcaggtgccttgggtggcagggacaaaggagctggtaggggcaaggcgcagtggctcacgcctgtaatcccagcactttgggaggccaaggcaagtggatcatgaggtcaagagatcgagaccatcctggccaacatggtgaaaccctgtctctaccacaaaaaaaaaatacaaaaattagctgggtgtggtggcatgcacctgtagtcccagctactcaggaggctgaggcaggagaatcggttgaacctggtaggcagaggttgcagtgagctgagatcgtgccactgcactccagcctggcaacagagtgagactgtgtcaaaaaaaaaaaaaaaaaaaaaaaaaaaaggaaggagggagggagggagggaggaaggaaggaaggaaaggaaaggagggctgtttgccaggggacctgagcctctctcatcrcagagagcagagaagctcaggccaggctgccccttgcctggctgaccctcagccccagtgctgcctgggcccccacagggtgagcttctgatgggggaggcctcctttgtcatattccagaagcagagctgaggctgtgggtggggagctctctggaggccacattgttgctgggttcagggcagcagcttctcacccaccatccctccccaggagtgacccacctgcggttccagcggccccagggctttgagtacaagtcagggcagtgggtgcggatcgcttgcctggctctggggaccaccgagtaccaccccttcacactgacctctgcgccccatgaggacacgcttagcctgcacatccgggcagcagggccctggaccactcgcctcagggagatctactcagccccgacgggtgacagatgtgccagatacccaaaggtaccagaccctggccagacatgccacatgcgcccatatcccctttgaaggctttggcccggcagcactagactccccgctctgtgcctcccctctctgcatctagagactggttgttccagataatgccacaaatcctcctcttcccctcactccatatacgtatctacctttccttttctctcatttctggcttccgatctatggtggtggccaagcttaactgaaacccacgcccctccctacagctgtaccttgatggaccatttggagagggccaccaggagtggcataagtttgaggtgtcagtgttagtgggagggggcattggggtcaccccttttgcctccatcctcaaagacctggtcttcaagtcatccgtcagctgccaagtgttctgtaagaaggtgagtactgcccccacttcccaccaacccatggccccttcttccttgtcatggtacccatctgtgcctttctcctctgcctttgttcttggcttccctgaactgggcaggggcaagttggtttgaaacctggggttgggtggtragtggggtggtatcaggatatccctagaccctttaggacagaactggtttgcrgatgcctccagaatcctgcctggtttacaaagactctttccctcagttaggggtgctccacataggatttgcttctgggagttcctccaggcaaggttggagggggtaaagaaacccattccttcttacaaaggagcccagcacttggagccttattgggctgggagagggaaggkcatgttgggtggagcacaagtgaaactggctcagctctcaagaggaacaggaggagtggtggcaaggcagggctggtgggccaggttggccccaggaacacagctcaaaccctcaggccctcacacgggtcctttcacaccagcctggacctggtggcaggcccctgctcgtttctctgggcctggcaggtgagtcaggggtgctggaatgcagtgggcagaggcccagcccatgtgctgtcagcattcagagggtgacagctcccctcctgtcctctgccctctgcttcttaactatacagccccrctttcctccctcggaagctgcagagggctccccgcagggcagcttccacccgctggtatctctttgagcccattcccatctgctcaggcagctgctgggtctccctgaggctgctctgtgaaatgccctttagccactaggtgcctggcagcctgaccagggaccactggagggagctgtaggacaggctgagcatgaaagctgcttcccaccccacagaccatcagctcccaatcaccaagggatctttcccatggccctggggtctctcacttccacctctctatgccctgggccaactccatctctggcctcagagcctggccccgtggcccatacactccatctccccaggctgtctagggaagggcacaagctagctgtggtcagaagagttctatcagtatggacacccctggggtttagggagactgagctgagatgggtcctgaactccagccctgtgtccccagatctacttcatctgggtgacgcggacccagcgtcagtttgagtggctggctgacatcatccgagaggtggaggagaatgaccaccaggacctggtgtctgtgcacatctacatcacccagctggctgagaagttcgacctcaggaccactatgctggtatgtcagggcccaccaggagggtatgcgggccactgtctgagctaggaattgaccctagctgtgcctggctgaactttgttccacccttccctaccatagtacatctgtgagcggcacttccagaaggttctgaaccggagtctattcacaggcctgcgctccatcacccactttggccgtcccccctttgagcccttcttcaactccctgcaggaggtccacccccaggtcagtccaacccataaccaggttctcttcctctttatcatttggggtctgagcaaagctcccaaaccttccccatcraggaagaaatcgactgctgatgagaasccatcccctgggagattggtggggtaatggaatggaaaggataggtgggtgtcacccttaggtgctaaaggaggaggcaggcaatagggacttgccatctctgaagccaagatgtattgtccagaaggaagagctcaatcattgagctagtcctcgccaaaaactcggggctaccctcaccactaccctcaccaatactgagtcagtcctcaccctggacactgagggaacctttaccatgagcactgggctagtcactactcacaaatactggtctagccctccatgagaccctgagctgttcttcaacttgaacactgattaacccaacctctattagaaatgttgatctagcacttagcaaaattccactagacctataaacactgagccagccctcaccatgcatagtacaaagcaaaccatcaggagcactgctggctttttttttttttttaatttaaagaaagggtattgctctgttgcccaggctgtaatgcagtgatgcaataccagtttactgtaacctccaactcctgggcrcaagcaatcctcctgcctcagcctcccaagtagctgggactacaggagtgcaccactatgcctggctaattaaaaataaaaaaattagagtcagggatgttgctatgttgcccaggctggtcttgaactagggagctaccccttcctctgaacactgcgttatccctgcctctgagcaaagagttagcctccacttattcctcctgcaacaggtccggaagatcggggtgtttagctgtggcccccctggcatgaccaagaatgtggaaaaggcctgtcagctcatcaacaggcaggaccggactcacttctcccaccattatgagaacttctaggccccttcccgggggttctgcccactgyccagttgagcagaggtttgagcccacacctcacctctgttcttcctatttctggctgmctcagccttctctgatttcccacctcccaaccttgttccaggtggccatagtcagtcaccatgtgtgggctcagggacccccaggaccaggatgtgtctcagcctggagaaatggtgggggggcagtgtctagggactagagtgagaagtaggggagctactgrtttggggcaaagtgaaacctctgcttccagacttcagaaacaaatctcagaagacaagctgacctgacaagtactatgtgtgtgcatgtctgtatgtgtgttggggcgktgagtgtaaggatgcagtgggagcatggatgctggcatcttagaaccctccctactcccakacctcctcctcttctgggctccccactgtcagacgggctggcaaatgccttgcaggaggtagaggctggacccatggcaagccatttacagaaacccactcggcaccccagtctaacaccacaactaatttcacccaaggttttaagcacgttctttcatcagaccctggcccaatacctatgtatgcaatgctcctcagccctcttctccctgctccagtagtctcccttccaaataaatcacttttctgccttcagggtttctttattctgccctaggaccggaaggggcatggggagaggaagccactaacccagccagctcaccaggctggcccagacatctctcaagctgcccagtgtcctgagtaaaggagctggcccaaggcaaagtgccccagctagcaatcccttccccggcccaggggtgcccttcctgacagagggcctgtcagccactagtgtgaggcctggtgagcctgctcaggaggggcagaaacagagggtgtggaagcttctggaggaggttggctggggaagagaacggggtsgggggcagactcagctggagtctatagggagccagagccgcctggcttgttaccaggacctcagtcactcccagcccttctctgagcaaagggagagttgggcacctgtgcctacatggctcttccaggcagtgagatgatagcaggagacaaatgaacacatcacccaacctctctgggcctgttttctcatctgcaaaatggctggatgctctccaagtcgacttaaagacaggacaaccctctgagggaatttctctgagtgcgccccttttttttttgagacagagtttcgctcttgttgcctacgctggagtgcaatggcacgatcttggctcaccgcaacctgtctcccgggttcaagcgatttctcctgcctcagcctcccgagtagctgggattacaggcacgcaccaccacgcccggctaattttgtatttttagtagagacggtatttctccatgttggttaggctggtctcgaactcccgacctgaggtgatctgcccgcctcggcctcccaaagtgctgggattacaggcgtgagccaccgcgcccggcaagagagtgcccaattttaagtgatccttcctattgcttccacaaaacgcctgcataccacatatcctcaatttcgagaaaatagccactggtttagaaactctcaagtactgtgattcacagcacactttggaggttgcacgtttaggttctggaagaggccctcagacggccctttggctcagcggtcccccgaaggtgcctgtccagcatgtcgaggggtcctgaccagcctgcccgcggggtggggcgggcctggggcagcctgagagccgctccgcctggcgacccagtgggcctccgcgggcccgcccagaggcccgggcgggttccagcggtgggcgccggtcggggtgcggcctaggccgcgggccggtggttaggggctcgcaggccggccacgcccgagggtctgcccgggacaaacccttccgttagggcgcgagggaggcgctgcaggccctcagttcctcggccaaggagacaagcgcggcccccgcggcccgtcccgccagccttcccgcctccgccggcgcgcggcttccgcgtrgcaggccgccccgctccccggcctggcgcgctgcctctttgtctctccgcgcctcccctcctcccagacaaatggctgttggcaggaaattggacgcgctcgggggaagccgcgcgccgcggggagggggcgccgcgcggccagcgggcctcgggtgcccccagccggggcgggggcggcggggatgttttgacatctcgtcaaagaaaggaacttgatgcttcgaaagtgcttttcacagccgggctgtgtctgctccagagctgatttatacgcagaatctgcgctcgcttctccgctccctcccccgtcagcccggggacggcgccggaggcgcgggcgcggctgtgcccggcaggatcgggtttatttattgcctctagcccggagccggggcggcctggggactgcacagttccctctgcccgagcccctccccttctctccccaccccccaaagccggctgcttcccaggggcctgtcttccccaaacctcttaccagactctgggcggagccctccgacggtctggggtggaagtcggggacggaggcagagaggtggtaaggcgccccaaggggccgaattctgcactacctcgcacggacccagtggggagagggtggtggtggtggaggtcaccacctctgccctaaggtcggaaaggagccggagctgccagtctgaaactccctaccatcccagtagctctggaacccccttcctccaggggctatcctttctctccagggattcctctttccccagctccagacaaccccttactccaaggccccaggagccctttccctttagaataaattaaggaatctccagcttctactggatcccaggagaagaaaggtttgaaagatcacgtccctggcaagagccacagccctcagccaggtgatgggcacagggctgggtacaggtctatcacagtgccctggcttcacatctaaagagtccggatggccacagggtagagcagggacatgtgttcggctcccttaatgggtagcttgcggctggcatagtggtgcacaatttcagggacgctgctgaagggcgggctgttctggcccagcacatatttgtgttccttggttcgggacagcttcatgtgcatgaatccctggctgctcctgggaagaggagaggagactttggtgagtgggggctctcctcagccccctcatccatccacccagtaaccctccccaaccctacagcaagtgtggtggttccgaagccagctgagaatgacaggtgattaggggaggtggaggtcagtccagaaagcaggggtggtggtggtgtaagtaggtagcactgggcattggctttgtggtaaggccactggttgtgccaagaatgtgtgtatagggagcatacagggtgtgtgcaggtggaaactgagcgaccagcacctcccccgacccctgctggccaaccctggggtccaggcaccccggccctccagcctctgtggccagggccagtttaacctcacctttcttgagctctttggtaggacacccgtgaggggctcctggtgactcatgtggaaccacatatgcccttggcaggagggtggacagatgtgacaaccaagctagtcttcattggggctctcccttctaatgactagggggaagggggaagctgatctggaagaccccccaaaatctgggagtgctcagctgcctcctcctggggatatcccttcactctcttgctttctgggtcttggaccaagcccctagctcatttatccggcccttcagcctacaatgacttcactcccttgctcagaggagacatgctcctgcctctgccatctccctgccacagccaggaaatcagcattagtgcctggccccgccctcaagacaaggaccccactgctcagagctctggctagctcctaaatgtccagggaccctcggcccatgagagggcatgggagtgagacctccaagaacctttgtctaaaccaccacaggcttggtctgtcaggcctcaggtctgaaactcaagcacaggcaaggggtgaggaatgttttggggagccctgaagcctaagtgttatatactgctggccagagcctacttggggacaaggacggggcttagaggttagtgtggaaagcagaaccagtgagggagctgcctccatcctgaggtccaccccccggagaagtgaggctggcaatccttatcacttgcctcccctgactgggtacaaggctctgcccggacccatttcaccaggcccacaagcgagaaatcagagtggggaggctgaagggaggtgacagatgggaggaaaaacggaggccccaaactctatccctctgcctccccaggcatggagtcctcaggagcctagcagactgctaggaaaaggcctgaggccccagggctgggagtcagggtgcagggtggccggggccatctgtaggtctgagataactagggctgacagcacaggcccttggggaaaggagccaagggcctgaggcaaacagcccctgtgggtggtggagaggggaggcagtgtcccctgtcaggctcaaggctgtgggcagcagcatgggccctgctttccttcacctcttctcagtttggggctgaccccttctcccttagtccacctggggaattgtctctcctaaaagctgcacattgtatcttctcaaaagacagatctggctaagaaggacaagtggccagagagctcagccgccatctggataaccaacctcctgcagaggggatggctgtgctttcccacctcctgggacaaagtcccaagggtccattaggacacagcaaagcccttgccagaccctcagggtactggggttaggaccagctgggctgcaggaccaggctggcaagcctttttgaggaagttgtttaattaccagtgaaagctcttccattagtgagagaagagaaaccataattctatttcagagaagccatttatatgcaaacgaggctctggcagacagatgcggagccaggtcagccagggtgggagcaggtctccaggcctgccttgccattttacctcccaggctaaggcaggctggcagggctccactttgggagccagacccctggcatctccccttaccttggcctgtaccaaacaataatatggcactggtggagccctggaataccatagtttgtggagtcagacagagctgggttcaaatcctggtttggggactttattaccgggtggccttgggcaagtaacaaacctctttgaatttattttctgtctataaaaaagagatctatcttgcaggggagtagttggtttagaaatggtatacaggctgcttggtatgctccatgaactttataatttttaaagcaatacacatttctgaggttatgtaaatcaaatttttgacaaaaacttttctgggaaatgcttctttgattttacaattcagactcctagagtatgacagctggaaaaaaagcgataatctatcaactcatttggcaaaggtagaaaccgaggctcggagatattaagtgatttccctaggatcacatagctagtgtatcaaatccaagaatagaactcaggttacctgactatagtccggcactttttctattatctttttctttcttttttttttttttttctgagacagagtcttgctgttgttggcctgggctggagtgcaatggcgcaatatcggctcactgcaacctccgcctcctgggttcaagcgattttcctgcctcagcctcccgagtagctggcattaccagtgctcaccatcacacccaactaatttttgtatttttagtagagacggggtttcaccatgttggtcaggttggtctcgaactcctgacttcaggtgatccacctgccacggcctttgaaagtgctgggattacagatgtgagccaacacacccaccactttttctattatctttgagggaagttgaataattatcccccaaatatgtcttgtttagcagccccaagttcccatagattggatttgtctgaatgggagggtatatctgtactctgatggtcccagagaatgtggtagaaagtggtgcaggtgtcctactagtgatggtggggggcaaatgaacataccaccccactggcttcctaacggggtgcagggtctaccaggcagaactcctggttgcccagggcagggctggccatgctaccagggagtctgggaggctgatctgctgctcctgggaggaaagcctgatggggagggagggccttgcctcctctacgtcttccaggacccaaaagctcagacaccccccatccccgaacacacacacagacacacacactcttcctcagagtaaacagaaatactttgtgtccactgccctgccctccttccaggaaccagccccccccaacaccctacagactccctcacgcaaagctcctatctccttgcctatgcttctagaacatcttgggcttccattaataatgacagtgataatttattgagcccttagcactatgctaagcacttcccatgcattatttcacctaatccttccctatattatcccccatccatttcattagtaaggaaactgaggcctagagaggttaagggggccaggccacacaactagaacagaacccttctgagctggatgctgcggatcaactatttctcccaatggactctgagctccttgagagcaggggctgagtctcagacatctcaggacccccagtgcctggggattgttcatgggggatggggacctccccagcttggttgggcataaggggaatactggagtccccttccaccctgcttgctgtccctgaaaccacaactgtccccac

SEQ ID NO: 94172 - DNA, 25946 bp, Homo sapiens
catttaccaagcaattacccagaatcctcatcccaccctacacccacccttcccctaaaaatgtatgtatatgtttttgtaccataaaaaatacatctatttggctctggaaccagattgcttgggttcaattacctgatctagcatttgctcctgttgactcaatgcaaacaagctctgtaactcattttccccagctgtaaaatggggaacggcagcctgggataagctgcgtctgactgtcagttactaataagcaggatatcccacaaacagattttcagcgaattggctttcagcaaattgatcatttggcaaagtggtcattaggcaaatgggtcatttggtgaagaggtcatttagtaaatcggctttcaacgacttgccctatgagatttctctagagtgagcattttcttgggttaaatgtacatttcatttccataatgaatactcactagcggctagatgggaaacttcccaggaaaccaggagcagccagaagagcctcttaataatcaggcaattaaaaaccctctggtttcttaacaggagggaggtacagacggcatctgctctgcaaggcgcagtgatcgggctcagcattgtcacaggagctcttgcggttctgtttgttgctagtgtgacatacacagccattcatcggaaaaaggactgagtggtctttgggtctcccatagttgatcatcatatgtcgtgataacccatgacaactccttgccacatgccacgggaggtccagcactccaagaacccagcagccagggccggcttcataggcttgcaacctggacagtcccacagggacacagaagagtccccactgtggtttaataatctgccatcaccatcttcaaattctttattttttaacaagggtggccagggatagtggctcatgcctgtaatcctagcactttgggaggccaaggcaggcagacggcttgagcccaagaagtttgagaccagcctgggcaacacagcaagaccccatctctacagaaaatacaaaaattagccaagcgtgtagtcccagctacttggaggctgagatgggagaattacctgagcccagggaggtcgaggctgcaggaggtgagattgtaccactgtactccagcctggatgacacagcggattcttgtctaaaaaaaataaccacaaggccgtgcacggtggctcatgcctgtaaccccagcactttgggaggctgaggcaggcggatcacttgaggtcaggattttgagaccagccggccaacatggtgaaaccccatctctactaaaatagaaaaattagctagacaaggtggcgcatgcctgtaatcccagctactcaggaggctgaggcaggagaatagcttgaacctgggaggaggaggttgcagagagccaaggtcgcgccattgtactccggcttggggcacaagagtgaaactccatctccaaaaaaaaaaaaaaccacaacacaacaagggccccgcatgtgactgaaaacaacagaaatgtattgtctcgcaggcctggatgccagaagcccaaaatcaaggtgtcggccgggcttcgcttcctctgaaatatgtaagagagaatacttccttgcctcttctggcttctggtggccgctggtaatgcttggtgttccttgtagatgcatcgctcccatctctcctccctcatcacatggctgccttctccctgtgtctctgtcttcacctgacattctcctcttttatttttttgagatggagtttccctctgtcacccaggctgaagtgcactggcacaatcttggctcactgtaacctccgcctcctagttccggtgattctcccgcctcagcctcctgagtagctgggattacgggcgcccgccaccacgcagtgctaattttgtgtttttagtagagatggagtttcaccatgttggccaggctggtctcgaactcctgacctcaagtgatccacccacctcaccctcccaaagtgtgctgagattacaggcatgagccaccatgcccggccctcattctcttcttttatcaggacgccggtcattgcatctgcctcctcaccagcagcccccaatccagtacgattcatcattacttgattacatctagaaagaccctatttccaaataaggtcacattcctgggtacggaggattaagatttccaattttttccctgactcaattttttttgagtcagggcctcaccctgtcacccaggctggagtacagttatgtgattatagctcactgcagcctcaaactcctgggctcaagggatcccttgacctcagccttccaagtggctgagactacaggcgcacaccatcatgcccaactaatttttttggttttttgtggtttttttgtacaggttaggtctcactctgctcactctgttgaccaggctggtctcctgacctcaagtgatcctcttgccttggcctcccaaagcactgagattacaggcgttatcccgtgcctggccctctttctacacctcagtcattgcatcattagcctgagctgcgcatattccttattctacccatccctgaccaacctcctcctttaacataacttccacctcgatatcatggggcctgctgggcactgcaaacagcctaaggaaagtggaaactttacttaaccttcaattctattgcaaagtccacattgaacgtaatttatatttgaactataaaattttctgtaagttgaaacatgacctataaaggtctctacaccctgaagcaacgttttagaaagaaatcaattggtccttttctgcagaaaccattaaccataggagagataaaggaaaaacttcaatggactgattgaacttccatgcccatagcttaacttctaaaaggcaaccattccatactgttaaactgccttaggttgttattactgttattaaagagaccctcaaagccggaagttgaatctcgactgtagttcttgcacgtacacgcaaactcttgcaactgaaaccactcagcttgtcctgatgctgctccccgtagcaacaccgcctggaatttcacgtttgtttttaagcatcagtcctaatcttcacttgcacccgaacacaccgcacctgtgacagccacgtgacattaaaaaaatcccttcagtgaggccgggcatggtggctcacgcctgtaatcccagccctttgggaggccaaggcagatggatcatgaggtcaagagattgagaccatcctgaccaacatggtgaaaccccgtctctactaaaaatacaaaaattagccgggcatggggacgcgtgcctgtagtcccagctactccggaggctaaggcaggagaatcgcttgagcccgggaggcagaatttgcagaagccgagatcgtgccgctgcactccagcctggcgacagagggagactctagactctctgaaacaaaaaaatcccttcagtgccttgatccttccagattcagatccaagagagatgacatttgtccctcatctgaacccgcacaccaagataaagatttcttctggccgggcgcggtggttcacgcctgtaatcccagcactttgggagacagaggcgggcggatcacctgcggtcaggaatttgagaccagcctggccaacgtgttaaaaccctgtctccactaaaaatacaaaaatggcccggcatggtggctcacgcctgtaatcccagctactcgggaggctgaggcaggagaatcggttgaacccgggaggtagaggttgcagtgagccgagattgcgccattgcactccagcctgggcaacaagagaacgaaactccgtctcaaaaaaaaaaaaaagaaaaaaagatttcttctgtgctcatggctcagctctgtggtctgctagggtccttcctcaatctgcttgcaatctatggaatcaggaaagactgaaccaacctagatttattaatattttagtataacataatacagtgttacttattacagcattgaccgtatatgcccttttgctccttggaggaaaggcaattaatagctattatgtgagttaataaaataagcccaggatttatgagtgtaactaacctgttcccattggttttccttgtctcctgcaggcagagagctgatcaaaacagcaaaagcaaagcagtgcccctggcccagttctgaagccaaccttccttaagcacccagacccatccctggttaggacttgctgtggattatcaggtgactctatctcaggatacagggactgagagggtgtatgcaatatctcagacccagaaactgttgattctgtctaaaaacacagcaataaccacatcccaccctcttgatttaaatgaaagtgtttgggggaataaaagatgaacctttttttttttctttgtcagatcttgagctcatttggttctggtggggaacaacagctatgcgagaacaagtgtattctattagaattaattcccctcttattctcatagctgagcagggctcaagagcctctcatatgaaagaggtaataagatttaatctgtctcctcatctaccttctgcaagtatactttacaaattagctctcgggactcttccaaatggagttttatgagggatttgctaaggtaaacgttttagactttgaacacagttcagatttcaggggcagtactgaaatctgaactgtgttgctaactgccctgcctttcaactcaagacacaataactttgaactaaattaattatatttttgttgttttccactctgtccccacgtctatatcaccaccacccccaatccctccccgcaggagctaactcctccttcctgtccctgcaagatcaaaactcctcctgcaagccccgctagctctgtctgctcgccttcgtggcagatatcgctattgtacttttatactcatttgtgtgataaatacttcaatgtccacttcttccacgagcccctgagcccctggagggcctggaccacacctagtttttctcaccgttacatctcccttgtcaggtacctggtaggcgcttaataagtatttggtgaacgaatggcttgtttggtgacagtccaaaggctgggggacagagggaaagctccctcctttcggaccccagacgggtggcgctgatggagaggaggcttggataaggcctccaggaccgaagcgcgcacccgtagggcccctgccaaaaagaccttcctgaaggcggaggaactgcgagagtgcctacgttggcccaaggcctgacccgacgatcccagggaccctcgccctaaccggccccgcctcccggtccccaaacccggactcggccccgccctaagctccggatcctggggcccgcccctggccccgcgtcggcagaccgtggcctcgctgctgggcctgcctcaaaccctccacaggtaacgcctcccgaacttgagccacattccgatcccctcctcaaacccctccccgtttcccacgccctggacccctcgctccgtctcggccccgccccaagcccagctaggtctcggcccctgagcccagccccgaccggcctcccagtccctgggtccctcccgacaccggcccctccctaagctccgcctcccagggcccgcctcctgagcgcagcccgcagcccggactcggccccgcctcccggaccctgggcccctccccacgtcggcccgtcctaagctccgcctcccagagtccgagcaccgcctggccatgtgctacgacatagtcaacgccccgccccggccccgcctcctgagctcttctctgggtctggccttagcgccgccctaagacctgtctcctgggctctgctccgagtctcgcctcctgaacccaatggcgtttatccctgccctaatgcccgcctccaggactcttatcctgcccccacgcaaggccccgcctccaggacgccaccaacctggacgcttctgaagcccagcttccaggatcgccctatcctggccccgccccaggacccgccaacctggactctacccaggacctgccccctacccaggacctgccccaacgacgcttatcctggccccaccccaggccccgccctcataacaatcatcctggccccgccctagagtccgcccccacgacgttcctcctgactcccgggggacccccgggccccgccccctctctgcccccgctcactgccctgggcccgccccctcttcagtccaggccgggcttccgcccggtctgccggcaacgctgcggccccgcccacgtcatggcgcccgaggagaacgcggggaccgaactcttgctgcagagtttcgagcgccgcttcctggcggcacgcacactgcgctccttcccctggcaggtgggcggcggggcgagcggagaggcccgcggggctcgcgggagtccaggggcagacgggacgggtctccgtgctgaagcccctggcgctcccgccacgtgagttcctgggctcccgccggtcagggccgcgcgacccggtccccgtccctggggcctggccagagtcgctcgcacccctcctgccccgcgagctggcgggggaagctgggggcgtctccacagccttggggggcagacgcgcgctcggtgtggggtacagttcacgatcattttcacgactttttaaaggcagtaatcgttctggtcactgggacacagctgccctcgcccattctaaaaagtcagcgccgtcaggaccgcaggtaaccacgtcctcctgagcgcggtgaccgggtcacaggctgtccctcgtgcctcagtattctcatctgtatgttgagcactgcacagaatcggctcatgctctgaggctgtcacgcctgtgatggaagagacagagaagggggtggcctctcctcgccctggggacctgccattctcagcacaggcscatggcaggcagcagcctcccttctgccagcagaggggcttaatgcacccggcctcatttgtaattcatgtgcggtgagctcactgggatgagtgagtttggatatatattyctccctgggtctgccccattttatggggtgttgcttaatcatttgcgttattccattgacataaaatattwgcactcagagatcatttctggtcargagaaattygtgcatttttaacccaaaatagaarccttcataaargcatcataggtctccattcartattgactgtaattgttcacatgcccacgctgaatgctaacttgggctcaccctcaacacccacgaggtgggtactattattaccactcacatttgaccagagggattgtttgattagggtgcagtagttgagagttcagacccaggagacagcctgtctgcttcgaatcctggcccagcccctggccctgtgtgaccttgggcaagtgactgcatctctctgtgctgttttcttattaataaaatgggggatataatgatacctacctcttagggttgttgtcagggttgagtacaaaagcctgtggatcagtgcctggctcatggtaaatacatgttggtgttagctagtgtttttattcagtctcaaaatgtttaataaatgccttctgtgagccaggcaccatggatcagcagtacccatgayagatgaggctctgcttgcatgggagagccagagaatwaacaaataaataaacaagaaaagaccagatgasagtggctttaaagccaataaaacagggaaatrgtgaatgsrssaactgggragaaragtcaccaaagtcrgggaatcagggaagccttccccaaagaggtggcwtttraactggggcctgagtgrtgaagcagccagccatgggaagggcttggggaacaggatatgcaaaggccctgtggtggaaacaagccagctgtggttgaggaacaacaccaaggcagccagtgtggctggagtggagtgagcagggtgggccasgggtgagggagaacaggccagagagagggattaggaccaggtcttgtagggccttttatggcatggagggagctctgaagcaatgaagtgccttgccctgtgtcacataccagccgagacagtctgcctaactcgggagccaaggctcgctgctgggcttgaggcccctgtaagaggacaatgtaactcaggctggtatgggcacattctgcacttccacttaaactcagatggcaagcccatcaaaccttggtgccatggctgccctggtaattcctggctgascagtgcaaccagggagctggcccatgacctgggtggccactaagtagccaggactaatgtggccaaragtcagccttcttcctgtgactcatccaggtgcaccctgcgacatctgaatgtcaggctttcagccgctgtggcttccacttccaactggctccacgtccccagggagggatcacacagcgctttgccaacacattctattgcgtgtttaatgttcctgtgaatgcgcccttgagatttctctctttcccctccacacagagcttagaagcaaagttaagagactcatcagattctgagctrctgcgggatattttgcacaaggtaagaatcccagagtccctgggactcatgaccctgcctcctgaatctctccagaagacctgagagaagaactgcaggtgtgcttgtaccctttaaaaacacccctgttcaaaaaacaaaaccattgagtcagcactgcaggtgggtgtcagcacctctgacagctccagcgctttcgttttctatttaagacttagacaaagacttcagaatatacaaaaayctgcaatgagaggggggaatctagggaatgttttttaaaccatccacagcaaaaacagagatgacaggtgcaaaacagcttctagcatttggttgatgttcagagactttcttttttgctttcatgaggcctgtcctgcccactcctgtctcttctagacctaaatgggcccttgctttgcccagggtggggtttggactcaagtgcatctgcatgcaggtgagaggcaggatcaccacccggcccagccacagcctgaccttggccttgagggccaagtgcagatcaccctgcatcctgggtcttcaccttcgaagggccatgagcccttctgaaaagaccaagcaatagactccctcgcagaaagaagtgcaccagaagaatacattttccatacaaactcaggaggcagatatcctccacccccacccacccagcccatcctaggagccccggtgaagaattcctgtgctagaggtgaaccaagattatccatgtggaaaagatacagccacagcagggaaaactttcggggcaataccagggcttcgagcatggagatacctgaagttatctcgcaccctgctctgagtttcaccctgagcctcactctcgtaggtggtgaagcatgaaatgtagggagagctgctttaaaacccagcacaaggctgggtgcactggctcacacctgtaatcccaggactttgggaggctgaggtggacagatcacctaaggtcaggagttccagaccagcctagccaacatggcaaaaacccatctctactaaaaatacaaaaattagctgggcgtggtggtacatgcctatagtcccagctactcaggaggctgaggcaggagaatcgcttgaacccaggaggcagaggctgcagtgagccaagatcgggccactgcactccagcctgggcaacagggcgagactctgtgtcagaataaatgaaaaaccagcaccagcctgaagagcctgtgtattgcgtggggtactttgctgcccttgggcagaatctgcatccctcccagccagcaggcactgtggaccgtctcctccctctccctccaggctcctgttttcccgccgtccccactcctgctgcaccagtccctctgccctcctttccaagtgccaggctgtggccacctcagagcttgcaccagctgttcccactgcctagaacttgctcatcctgcatttggcttctctgggctttagctggagtgtcacccggagcgtcccctcccctccatcctgtccccagggacacacactccaagagagcagttgccgagtgggccttcccgcctcttccatagagccagaccgttggcgactgtccttactgcaaaccctggttcacactggctcccctgggagggaggcggtttgggcccacatgccctgtgttcctgctcagaatgggcrttagaaatgctgccatagcctgtgccactgcagtggaagcatttttaggaaacggcttatatcttaagacaaacttcagatgcrtggggccaaaacgctgtgtccatctacatctttgctgagggatcgggtagcctggagttygccctctgctgtgttggcttgaagctcataggagacttaagaygggctctcgagcaaccaacgttctgtcctttsccgtagactgtgaagcatcctgtgtgtgtgaagcacccgccgtccgtcaaatatgcccggtgctttctctcagaactcatcaaaaaggtcagttatgggcagtgtccgcccagtagccggacagcatagccacctgcgtgctggagcccccgtccttcccaggccctgggcctgctttgcaaaccccagcatggcaggggcctccccaggcaactggctgcagccacatgtgacccatgggagacagtgcagggcgggaagaaggggaggccagcatctctccctcactctgcctcctggggtttccacrgcagctgctcctctggggccccagctcctagcatatggattctcattcctaccaggctggcccagcccacagcactggaaccctcacccgcaccctctgtcctgcccgctgaagggtttggagtttcctgctcttrtccgtctctgggttgccccacaggcccctgttggaagatttagctcttgccataccttcggaactagttcctctggtgaattctctgcattaatcctgctggaatgagctctttcctgactgataaaggatgaattttattttttacttatttatttatttttttgagacagagtctcactgtgttgcccaggctggattaccgtgacacaatctcggctccctgaaacctctgcctcctgggttcaagcaactgtcatgccagcctcctaagaagctgggactacaggcacacgccaccatgcctggctaattttttatttttaatagagacagagtttcaccatgttggccaggctggtctcgaactcctgacctcaggtgatccgcctgcctcggcctcccaaagtgctgggattacaggcatgagccaccgcacctggcctaggatggattttaaagatgcgcccgaacatgcagggtttgacatgaggatgtcgagaggcctcctcagtaggcagtagcagacctgctgagtgaaagagccacacttttagcaaataaacaatcccctgcttctccaatacctgctttctccctagtcctccccagaagcatgcatctgtggtcaccagcaggtctgccctgtgccaccaggagagggcagcagtcacccagtgtactctgctgctgccctgtgaatcataggacggggccagctgtggagaagcggcctgctgacagccacagsctgcagcatgggccgccctcacacttctgcctgggctcacttaaaagcaccttttgttttcctcctctctgtgtttgatccaaacacggctctctatcatggtcacctggcaactctcacggaatccttgtctcctgccctagactacacctaaccctaccctcycaacacctctggttcaaggccctcccatccaggtttccctaccaagtgaatttttttttttagagacaaggtctctgttgcccaggctgtcctcgaactcctgggctcaagcagtcctcccatgtcagcctctagagtagctgggactattcggcacacaccaccaagcccaacgaagtgaatattttatatggcagctggccggtattataccattccatcgcaartctcccctccaaacttggtgaaaatcatctggccatttttacagattagaacgaaagcaaacaagctctcactctgtctgcccccagcacgaggctgtccacacagagcctttggaygagctgtatgaagcgctggcggagaccctgatggccaaggagtccacccagggccaccggagctatttgctggtatgagaagggcaccctcctccccctcacagcccagatacccttcctgcacagacaaagtgaaaacgtgggtgtgggttcaaatcctgactcacccattctacagtcttagacatgaggtccgtcaaccttctttagcctcagtttccctgtctgtaaatcaggcacttcaacaacaacagcatgtctcgtggagttgttgggcacttatccaataggtgacacacactacctgcttcacaaggacctggtgcccagtcctcaaagaatacttgacagggctgggcgtggtggctcacgcctgtaatcccagcgctttgggaggccgaagtggttgcatctgaggtcaggagttcgagaccaacctggccaatatggtgaaaccctgtctctactaaaaatacaaaaatcaggccrggcgtggtggctcatgcctgtaatcccagcattttgggaggctgaggcggggggatcacctgaggtcaggagtttgagaccagcctggccaacatggtgaaactccatctttactaaaaatacaaaaattagcggggtgtggtagtgggcgcctgtaatcccagctactagggaggctgaggcaggagaatctcttcaacccaggaggtggaggttgtagtgagccaagatcacgctattgcactccagcctgggcaacgagagcaaatctctgtctcaaaaaaaagtacaaaaaktagccggacatggtggcacacgcctgtattcgcagctacctgggcggctgaggcaggagaattgcttgaacccaggaggcagaggttgcagtgagccaagatcgtgccactgactccagcctgggtgacagagctcaaaaaaaaataagataaaacatagatacagaaaaccacaaaggaaaaacagcatattgaatcatcacaaggcagccaccccttcatagccacacctgtcccctggccaccactgacatgtgttccatcgccagaattccgttgtctcaggaaggttcgatgaatggaatcctgtgtggcctragatgagtgtctttcacaccgcgtgacacccttgaggcccgtgaaagctgttggcatgccaacagttagctgcttctcattgctgagtggcgattggtcctgtcatggtttattcagccatgtggtggggctacttgtcttctaagccacttgccttctgatcgctggactgactctctcgccttctcttggtgcagccctcrggaggctcggtcacactctccgagagcacggccatcatctcctacggtaccacaggcctggtcacatgggacgccgccctctaccttgcagaatgggccatcgagaacccggcagtcttcactaacaggtgacctcggggcgcagggcagggcaccgaggcaggcttaccctggtgcagtcgcagacacggtcccctttcctcccgccaggactgtcctagagcttggcagtggtgctggcctcacaggcctggccatctgcaagatgtgccgcccccgggcatacatcttcagcgactgtcacagccgggtccttgagcagctccgagggaatgtccttctcaatggcctctcattagaggcagacatcactgccaagttagacagccccagggtgacagtggcccagctggactgggacgtcgcgacggtccatcagctctctgccttccagccagatgttgtcattgcagcaggtaatgcccagccccgggcaccctgtgcaggtggtgtccttgcagctctacccagctcttggctctgggaaaagggaacartggacgctgtcgggcatggacatgatggggcttccagaagagttactctgggcctccagggtgacatcamaggacaggggtgcctcttaaggtgaccttcaasccacagccctcttkttggagacaggcatactcccgttmcagtcgtyaccacatggctctgtcccagagccatgccctgtgtccttcagagaccacaggaggaaaacaaccacttctgggacgargacagggcccttgagagaaggtggtgtttggctgggccaccgaaaacccctcacccctgccagcacactcagtcccctctctggtggaacagagctctgcctgtggtcctaggtcccagccctgaaacccacaggtccagcggtggccagggacacaagcccacccctgcaagccagcagacaaatcagcagatgcctgaaacatgaagttcatggcagggtcaggctttgtgtcattcaaagccctctagataggccaagaaccagagctggttttttaaggaacaccagtgagtctggagatttttttcttttgcttcggtcttttgcagctttctctactaagggttctcctttttcacccaagtaattgcctttccatctaatggcccaaatggtcaaatggcatctactagtctcatatgaccgctgcctctctggcctcgccctgctgctgacgtcagcatgacctggacctgtccactggtccctttcagtaacctgaagctttcaccatagatgtgctgtattgcccagaagccatcatgtcgctggtcggcgtcctgcggaggctggctgcctgccgggaggaccagcgggctcctgaggtctacgtggcctttaccgtccgcaacccagagacgtgccagctgttcaccaccgagctaggtgagcctccacgcccacccgggcctgcatggtccctgagctgtccctgcaggacgccagtggaagtgaaagaactgggtgccggggaaaagctaggttgccccacactcccacaccatggggggaactcaggcagaggccagtgagcagggtgggcttggggcgtggggggcttgcggcaggaggagggcagctcagcacagggagggagggtctgagcccagcagccctactgtgtgcttcagagcagggttccctaagcccttgggcctcggtttcctcatctataaaatggaggtggcgggaggggcagtcggggtcagggctggacacagctgtggcctgcaggacgctggagcacaggatgtacaggcggatccaccacgccactgtcctgagcacccagtcggtggaagacgagcagggtgactgtagagaaggggaactggccccatagtgggccagcaactgtcctcagacctgacatttgtcagcccccagcaactgtgagggtgtgctgtcactgtcccatctcaccaacaaagacactaggacacacggaggccaagagacccccgagctcccgcagactgcaccccrgccacctggctctcacgcctccacactacacccaagccccccagtgccaccagcctttgccccagctccccctgagcacagcccctcctggcagccatgtgcacagatgcacatgcagcagcctctgcctgcacacagagacacagacaacccagtgcctgtccacgtggggcagcccgttaactacagagccaacaaacaagccagcacacgaagacgtactgggttccacgacagagtcccccacmacctcgcacaggaggctggccgggcgcagggctcaggcctgtcatcccagcactttaggaggctaaggcaagaggactacttgaccccaggtgttcaagaccaacctgggccacatagtgggaccccatcttcacaaaacatacagaagctagccagatgtggttgcacacgcctgtagtcccagctactcaggaggctgaggtgggaggatggcttgagcccaggagatggaggctgcagtgagccctgatctcaccactgcactccagcctgggcaacagagcaagaccctgtctcaaaaaagcaaagaaataaaaaawaaaaaaaaaaaaggaagtctttcttcagatacttacgtgaaaaaaaacctgcaatatattttaagtgaaaaaaacagtgccaagcagcacacatagtataagcccccacccacctttttttttttttttttttttgagacagagtctggctttgtattgcccaggctggagtgcagtggtgccatctcggcccactgcaacctcccacctcccaggttcaagctatcctcccatctcagcctcctgagtagctgggactacaggcacgtgctaccacacctggctattttttgtattgtttgtagagttgaggtttcgccatgttggccaggctggtcttgaactcctgacctcaagtgatctgccgcctcagcctcccaaagtgttaggaatacgggcgtgagctactgcgcccaaccccatttttgtttaaaaactaataataatcacccacacatggttatgagtacctatattcccaactcctcaggaggctgacgcrggaggatggcttaagcccaggagtttgtggccaccttgagcaacatagcgagacttcatctcaaaacaaaatttatcacaataatcattttcacataagtatacctataggggaaaacctagaatatacatatagcagtcttgtccaacytgcggcccaacgcaaatctgtaaactttcttcaaacagtacgaggtttttttgtgattttttttcttttagctcatcaggtattgctagtgttagtgtattttatgcgtggcccaaggcgattcttcttcttccagtgtggcacagggaggccaaaagattggacatccctgatatacacattaacaggtgccatccttggatggcaggattatasagatttctacacattcatgtctgtactacttcattyttataaatacrcattttccactcgtaacaaaaaactgtgattgaaaatcrtcccgkgtcacagtgtctcacgcctgtaatcccaacactgtaagaggctgaggctttgggaggctgaggtgagcagatcacskgaggtcgagttcaagaccagcctggcccacatggtgaaaccccatctctactaaaaacacaaaaattagccaggcgtggtggtgcacgcctatagtcaaagctactcgggagactgaggcaggagaatcacttgaacctgggaggcgttgcagtgagctgagattgtgccactgcactccagcctggggaacagagtaaaacttcgtctaaaaacaaataataaaagaggctgaggcaggagcatcacttgaggccatgcgttcaggaccccatctctacaaaataaaaaaattactggcatggtggcacgcacctgtcatcccagctactcaggaagtgggaggattgctagagcccaggagtcgaggctgtagtgagcaatgactgtgccactgcactccagcctgggtgacagaacaagttcatatctcaaaacaaaaaaaaagaatcattttggctaacggctcttcagacatgtgtgcttatgagaacagcagccccttctaagctgtgtgtgtgtgtgggtgtgtgtgtggtgcgtgtggttttttttttttttttttgagacttagtctcactctgtcactcaggctggagtgcagtggcacaatctcagctcactgcaacctccacctcctgggttcaagcaattctcccacctcagcctcccaagtagctgggattacaggcactcgccatcatgcctggctaatttctgtatttttgtagagatgggatttcaccatgttggccaggctggtctcgaactcctgacctcaagtgatccgcccgccttggcctcccaaagtgttgkgattacaggcatgagccactgtgcccggccgctttctaagctttgtgaagagtgggttgactattcagatctctgcttctgtcccgctgtgccaagtgctggggcrgacacaggcagagagtggacagmggcacggtscctgctgctagccatttctatgcaaaaccagctttctggtcccatcctggaggccaattctaggcacctgggtgggcctgggaacctgtgaaccaagtaaactgacttggacacccccctaccccgccaggcctgtcctagcagccccacacaataccctcatgtcctgtccccaaacaccgccatcctcaaacacatgtgctctgtttccaggccgggccgggatcagatgggaagtggaacctcgtcatgagcagaaactgtttccctacgaagagcacttggagatggcaatgctgaatctcaccctgtaggactcayacacgactccaacgggattgtgagaatcaagtcactctcatgggaagaatttttayatgggaaagcggataaaactttcattggactggaatgtttggagaatgttaatttccaaatcaggaaccacaaactgccctctaataagacatcggctatctaagcgtgtgggtgccccctttctgccagcagttctggttcttaagaaaatcaccataaatcagacatgaaaattctggctccaaaaayagcattttctttgtgcaaataaaaacgtgtgtatcaagtatgatgttcccccaacgtggacacactcagttcctcacaaagccaagcccactgcagctgccacatccctgggcttacggtgcagcaggtgcttttttcaagacaggaatcaaaatgttaggaacacggcagaaaggggacacctggagaccaaacgcaggatgaggagttctgcagaggtcacagggaagtcacagaacagtaatacgctagcaggggcatggggcgtgaagaacagaagaagagaggaagcgtttccaagcctccagagaagaaatcaaggccaaccamagcttcccgggtcacagaaccaattcwttyaccaggyrgyacyactgctgtcatttcagcttctggccactgggaggtgctgctcraaaggrtttgccctgagactcyaagaagaagctgcgggaaggacagcaggggtcctggggttttatagcctctggcccaggagttatgtgtccataaccaaagggagcacagtctgcacccagctctmatcccatcggagctgctgcgaytcccgcaggttcttccggaactggtttagcttgcccgcaggatcaggaaagtttgagaaaagcatctgcaaaaaaataaagagcagagcttacctcattgcctgtccccaccccatcccaggtcaccacctggmtgaccccaggtccccgacccaacaacaacccctcccaagtccctaactccctcacttggactygagacycttcacaccccagcagcactccgcctccaacttgacatcacagtttctggaaacttccccgyatgtcccactttcccacacttggtgccctggagcacctcccggcctctacrtgctgcccattcccctgtgagcaccctcctctcggcctctggccaacgcagtcccacccatctgtgggtaacaagggggtgtbggtgttctttkcagccttgctaaactstctgaatcaaggatcacaaactacagcctgcaggccaaatccagcccacagcctgtgtttgtaaataaagttttattggaacaaagccacaccccttaatctacagatgatctgtggctactttcacaccccaacagagtaccatggttctgacagagactggggaacccagtctaaaygacttccgacctggacctttactgaaaatcctgccaatcattctgttggcaagaatgatgtattactttttgcaataagaaacaagtaacctttgcagaattccacccatctttcaaggctggtcccagaagctccctttgcccgcccacctacgtgatcctgatcacttcctcaaccgcagcccggcccacccagctccagcatcatttgtggagtgtcagctccataaatccagagggcaggtgggggtgtgtcttaactttcccgagcctactgtaccgaaacgggacagcagagtgggccagcctctgtgacctctgctccctccctagcttttccgccagaccccacatggtcccaccctggctgtgggaagcagggatcagggagcctggctcggtgccagtctccagaaccctccccaccctggcgtggtggcagacgtggctacctgcagctgagctgccagttcctctgagtcctcaaagaccaggccattttcttcatgtttcaccagctcatgtaaactgcagagagaaccaagggagcctgagagctgcctgtagaagacaccagacccctggggtgcccacctgggctcccccacacaccccatgctcaagccaggctgggggttggaacagggggtgtggtttccgggagctggttcttagatttggcatctgaagggtataaaggcctgggggggtgcacatcaaaatggccacacccatttgaggagggagccttaaggggggtttgtaccttctgtgctggatgctcttcaaggactgaagaattatttttgcatgtttttcttaattccatggccatggaacaagtaaaggcaacgccctggggactggctcagcacataaaagatgacttttctagggcaccaggtttgatcccgacattccctgagctcagctcacacgaggggctcacatccctaaatcccatccaggggccggctcctgagcaggggccaagggctcaacttgtgctggggctactgcttctagaatctcctctaacactgcccttccaaacacccgtctacgctgggtgcagtgaggccacagcatgacactcatttaactgattcaaaccgaccatgtgagcttggccaaaagggacatggtgggagagaaaaacaaagaaaaccatgtaagcctgcaggcaattcccaccaattctaccctaggagcaaaagccccgagtggagttctggtatttaaggtgctttttgttttcatattgggttggtgcaaaagtagttgccatttttaatggcaaaaaccatgattacttttgtaccaacctaaatataacatgagctctaaatggaagcaactacttcagtgaggctcagcccagccacagtaaccgcagggctcctcctcatggcctccagtgtgtgctggactgaccgaggggcagggcctcactgtgggcagctccctctgcactgcttccccctcagcggtggatctgcaaagctatccccagaaggatttgggttctgctcctaccacttgaagttcacagcacacacaggcaaacagcacccgaacatgtccaccaccttcatgggcaggtccaggccactggaggacgtgtgcagacagacacccaggtccgccgaccctgctaggcaagaggggtgggtcagagcactggtctctgccctgggaacacaaatcctcccagcacagtgaggcagcatcccccaaggagagtgaaaatcagataaggcccccaacagccccaaacacaagtggcttaagctggccaagcagccacacagcctggctgggacatctgaaaatgtaagttgacactttttatacgtaaccacaatttggtttttttgttgttgtgttgttttgttttgagacagagtctcattctgtcacccaggctggagtgcagtggcacaatctcagctcactgcaacctccacctcccaggttcacctcctgcctgtaatcccagcattttgggaggccaaggcgggcagatcacctgaggtcaggagttcaagaccagcctggcccacatggtgaaaccccatctctactaaaaaaaatacaaaattagccaagcgtcgtggcaggcgcctgtagtcacagctactcgggaggctgaggcaggagaatcgcttgaacccgggaaggcggaggttgcgtgagccaagatcacaccattgcactccagcctggtctacaagagcgaaactccatctcaaaatgataataataataaaccacagcacacccaccacaaaccagctgtcactgtgaaaataaagccaaatagcttaacatttctaaagactagctggggccaggcgtgatgggtcacacctggaatccaagcacttagggaggccaaggcaggaggatcacttgaggtcaggagttcaagaccagcctggccaacatggtgaaaccctgtctctactaaaaatacaaaaataagccaggtgttgtggtgggctcctgtaatcccgtaatctactcgggaggctgaggtgggaaaatcgcttgaacccaggaggcagaggttgcatgaactgagatcatgcactccagcctaggcaacggagcgagactgtctaaaacaaagactaggtggagagtcctgccaggaaaaggccttcagcctccaactgctctgctcactcgaagctggaagatgcagctctagagacgcatcaggaccaaggcacgactccccacttggagaaatcaacggggaaagagacggaggcaaaggagaaccatctcactgggagaggcgacgctgtttgacacatcgtccccgtacctcccaaagccactgccctcccacacctgggcaacagtggccccaaccccaggcccagccctcctgcaggaaggaagaggactgaatggagggcgtggcaggctgaaaggacgtggcctcctcaaaccccttggtaaacggcccctggggccacctggcagggaggggctggcacaccaggaagtagcctcctcctgggagttcagccagagcccaggtcccgtcccccagtggcctccagagccaccttttcagaaaaagtacatcccgcccaccctgttccccccgcctcctccctgagcctcctgctggcctctcacctagaagcagggggtagtcctcggcctccagccagggggtgcagacctggatgtgctggaagtgcttctggtggatgaggcggctataatactccctcagaggccctttgccttcacagagaagagcagacactgccatggacccatctctgtccctgccacgtggccccaggcccaagacactcccccctaggagggatccctttcccagaagctccacccctcagcagctccagtcaggccccatccgggcccttccagaagcaacccaggagccctgagacctgcaggggtgtgtgcaccctgacccctgacgcatagcctttcacctgcagccagctggcctcgggctgcaaacatggcggggtaagcactggcctggcacccgaccgcccactgggtggacccagccttttgtctgtgttgtgcacaggggacacgaggactcctcctgccctggcacagcccccagagcatatggcgcgggttccaaaccactcctgggagcctagaggccagaggagggaggagagcaggaccagcagctggcccagacccggcctcttcccacaccgcttccgcttttctccctcctcactgagtcaccttgaaagggctcagcagcagtaactgtgggacaggggctcttccgtttgaaaaattaagaggcttggttaaggcaccaatgacatggccgggcacagtgattcgtgcctgtaattccagcatattgggaggccaaggcgggtggatcacctgaggtcaggagttcaagaccagcctggccaacatggtgaaaccctgtctctactaaaaatacaaaaattaggcagttgtggtgggcacctgtagtcccagccactcgggaggctggggcatgagaattgcttgaatgtgggaggcggaggttgcagtgagccgagatcgcaccactgcactccagcctgggcgacagagactctgtctcaaaaaaaaaaaaaaaagacaccaatgacgtaacaacaacaaaaaaaagatgcttggaaactactgaaaaagtagaaagcttggtatctacagattcaaatctgggctccctgccctgcctctgagcctcagtttcccccatgtcaagcagtataagaccctatggcagagctgcagtgaggattaaggagacaagatcgtgggaagcacagggtaaaggctgcgtgcccctccccctccgccatcccccaaccaaacagacacccagggtcccaggcagtacctgttatcacacagacgagagaaggaaggttgtgtccatcaagagtcagttgttcaaactctgtgtttagaaaaagaaacaattctacatggaatttctgatagaatttttttttttttctgacagactctcactctgtcacccaggctggaatgcaatggcgcgatctcagctcactgcaacctctgcctcctgggttcaagtaattctcgtgcatcagcctcccaagtagctgggatgacaggcgcccaccaccatacctagctaatttttgtatttttagtagagacaggtttcgccctgttggccaggttggtctcgaactcctgacctcagatgatctgcctgcctcggcctcccagagttctaggattacaggtttgagccaccatgcccattcagaaaaaaatttttaaataaacaatagccagagtcacctggtcaggtggagaaagagcactgctctggcggggaggccaccagcctgtgtgagatactctcctggagggggcatttcagcctgagggcctggtcactcaatgacccaactggggattcagggcggcccacttccaccacccccgctgtccccaggctgccccacccagtggcctgggacaggaacatgctgcaggccaggcaagcagcttacagctcagtggcccccgacaagcccagagctcctcaccgcagccacacacctactttctaaagctgccagcaggatggagaagtcttcgtcctctatgagaagagaattgaatgtcaggggcctgtttctagacacccctcttccagctcacaggccctcccgttctcattgagaccgtggcagggtgggagcatgcaggactggcaggggtgaggagaacacaggttggccaggtgcccgtcacaccaaccccaagtgccccaggggtcctgcagacctgtccagctcgtgctgctgaccagcagggctggccgctcacggagacgcgtcaccagcccgctcccagcatcccgctccgtgaaggccgaccgctccgtgactgggtcctcaggttctgagctgaaggagcagaaaaaaagcctgtgagaggccatagagcaggcccgggacccaggagaggcatctcctgccgtggcgaggcctgcaggctcccagaggttggggtgcccggccacatcagcagcaccaggccacccctgccatctgaggcctgggcttgctttctctaatattgttgctgggtgctaaggttacaacagcaaacaagactgactcattccttttctccacgggacttactgtcttatcatcccctggactcaagatgagggtgcagggacgccctcccacaccaccccagcttacccagggcacacctcagggtgcgtagacctgcacaaaggtcccctccttagccccatgagacaccccaggggacacacaggtccacagatcctgccacaggcctgggaagccactggcaggagagtaagacagcgcaggggtccacaaacatttcttaaagggccagagagtaaatacttcaggctttgcgggccacaggttctctgttgcaaaacgcgattctgctattgcagctcaaaggcggctgtagacaactcagaaggcaatgagtgtgttgtgtcccagtgaaacttgatttacaaaagcagcagactggcctgtagccttagtttgccaacccct

SEQ ID NO: 94173 - DNA, 26778 bp, Homo sapiens
ctcagctatggctaaaaggggccaaggtagagctcaagccatggcttcagtggggctacccccaagccttggcagattgccagctttgatgtggtgttgagtctgtgggtacagagaagtcaataattgaggcttgcgaacctctgtctagatttcagatttatggaaatgcctgtatgttcaagcagaagtttgctgcagggttgagacaatcatgaagaaactctgttagcacagtgtgagtgcaaaatgtgtagtgtgagcccccccacccccaacacacccacacagagagtcaccaccagagcactacccagtggagccgtgagaagtgggccaccgtcctccagaccacagtatgatacatccacaaacagtttagaccatgcaactggaaaaaccacagacattcaatgccagcccatgaaagcagccaagaggagacctgtaccctgcaaaactaaaggggttgaactgccgaagaccatggaatcccaccgcttatatcagtgtgacctgtatttgaggcatggagtcaaagaagatcattttggcaatgactgtcccctggattttattgccttacctggatttcggacttgcatggagcctgtagcccctttgtcttggccaatttctgccatttagaaggagtgtatttatccaatgcctgtttcttcattgtatctagaaagtaactaacttgcttttgttttttaggctcataggcaaaaaggacttgccttatctcagatgagactctggactgtggacttttgagttaatgctgaaattagttaagactttggggaactgcaggattggttttgaaatgtgaggacctgatatttggaaggggccaagggaagaatgatatgatttggctgttccctcaccgaaatttcatctggaattgtagctcctataattcccagctgttgtgggaggaacttggtgagaggtaattgaatcattgtagcgcatttttcccatgctattcccatgatagtgaataagtgtcttgagatcttatagttttataaaggagagtttccctacacaagtcttcttgcctgcctccatgtattacataacattgcttctcatttgccttttctcatcattgcgaggcctcccaagccatgtgtaactgtgaatctactaaacctctttccttttaaattacccagtctcgggtatgtctttagtaacagcatgagaaaacgctagtacagtatcataaactataaaaccctagaacaaaatcaatagaagagaacataactgaactaaaaagcccctgtgcaacaaaagtaactatcaacagaataaacagatgacttacagaacgggcgaatataattgtaaactatgcatctgataaaggcctaatatcaaaaatctataaggaacttaaacaaattaataaaacatacacaaacaactccattaaaaaatggggcagggacatcaagaaagaattctcaaaagaatatatacacaggaatgtgctcaagatgatcaactagatgcagtcaggaagtgccactgccaccaggggaacaccaggttttttttttcataccaacataatttgaacagatctttggagagaaaatactgagtgtggatggaggaaagaagtagtcactgaggctgaagagaaagaaggctgaggacgctgaatggggtgcctgaatactacagctggttctctaccctgagcggtttctagggaaaggtgagtcaaaggaatagtagacagctccctctcactatagacatctggaattctggctagatggggctccataccttcaaggacatgtggactggcagaggggtctcccagaaattgcacagagatggagctgcagacaaaatccagggacttttgtgaataggtcctttacagagacaactcctatataagaaaaacttgaaacaaaggtgttgcattcaactctttcccttcagaggatgccctactctgtaatgtcatagctttcaatgaactatcttttctcactgcactctgtgactcaccttgaattccttcctgtgtggaatccgagaaccttctctcggtgtctgaatcaaggcccctttatctgggaacacttccaaggagacttttctggctttcatagtttgccttaatttgatggttattagtcctcactcttctattattttatcccaagcattaactctgaagaaaaaaacatttgcctctattgtggtcataatttctacttttcccatattgatacatttgtgatatatcctaataagtaacactttccctttcaaaagattaccatcataatttgccattactgaaagtatgaaaaatttaaattatcacattccagggtctatttgtgttctccctaccaatagtgataggattctccttacaactggtagtgaatgatccaactctaaaatctcattttgttgtctgttctttttttctgacctctcttggtacatattatcaaatgctgggtggctccaagaagtagactctaagctgaatatgcttttgaggaagataatttgggagttttattgaaaataacacctgtgaaaaagtaggaagcaagattggactatggaacaaattaggatataattcaattcaatggtttgaatgtttgagtgctccaaagattaatatgttaaaattcttataaccaaaatgactgtattagcagacagaaccttttaggaggtgtttaggtcacgaaggcagagtcctcattagtggaattaattccattccaaaatttgctcacaagaactcattcatctcttttccccattaagacatggtgacgggctgccatcttggaggaatgcccaataccagcatcttgattgtgaaaatttcagcctcaagaactgtggcaaataaattttttttgtctatatgctaggcaatgtatggtatttttctatatagcaccctgagcatgctgagacatgcagtctcagcataggtttcatctcacccactgggagtttgaagctaagttagcccttcagagttggtccacattgaaatgaggagaattggccttcaaaatcttacatatgaccaggcattggatatgggctgtcttggaaaggtcactttatactagatagctttcagcagtgctgttctgagacagagagcttataggtgaggtatgtcagttgttaatcacttcatcagctggaaagtaatttgtatattcccaaagggaaaatctgggtgacacataatgcatgcactcaaggacattaaaaatattgaacaatattgccactctgcgggcaatatttgctcagaaactgtgttccaacatccttttgagaaagacttatctcatttcaggttaacagattattaatagaataaaaacaaatttgtctgttttgtgacatgcatcttttccttcctaattctactttgatgtaaatttctggtgagactttttaaaagtacaaattacctgaattacaagacaatctgtgaaacaagttcaggagtaggcatttagaagataaatactttctaagagtgagaaacataaggaatgctgcaaatattcagaaaaataaaatattgtaatttagacaaaatatttgcaaatgaagcaaagtaactgtaattgtacttaaaacatatctgtttggataaaaagaaaatgaatttctatggtcagaaaaataatgtcaggaaacatgaaatgatgctaatatcataattgtgaaaatacatagagaaaatgaagacggtctatttgagaatgttaagataaataagaatagatcacacccctgcctcattgttgacacaatgctgctttcttatactagaaactcttcatatacaattaaattatctcttgttctggagacagccatatttacaataagaatgaaatttattattcacacatgcaaacacaaaatcattcatccttttctttattcacttgctttccaaaacctctattgtcaatacttaaatcattgtgacattgattgatattgatatgtaccaagttagagaaagttataaagaaagatagcattttaacaagttgtctaagaaatgggcttttttgtttcttatgctgacagttgtattttagccctgaatcctgcgagaatgtgctggtgtggccgatgaaatacagtctttgtatcaatttaatgttgatacttgatgaacttgctcagaacaccatgaggtaactgtgcttgtcaccttcagcttccatcctcattgattccaacaatctgctgttaaatttgaggtttatcccacatcttttactcagaaggaacttgatttcatatttatgaaattgatcaagatgtggacatataagtttccaaagagtacattgttggcatatgattcaaagatgcaaaaactacatatcatgaatgttctgatactgttcaaaagctcattgagtatgctgttttgaacaagaaaattatgaggaacaacaagattccagaatttatgtcattcttgcagatgtcagttctcagtagtgagctgttatctgaacagcttagtctgttaaacatttgttatacatttggtctactatcatccatttacaactggcagtatgtaccaagaactctgtggaggacttacattacctccttctgatgtaactgttgtcatatcagaacttagtaccaaaacacatttgtagaaaggtgaaaaatctgttgcattttcttcattttgactttgcatttgagatttttaacaaaaagaagtgagattagttttacagtgaagtattaggtaagttattatttaatttattcacttttccctccaatatgtggaaggaaaccttccttttttgggtctgttggagtgtgtttataaattaaaataaaaaataacttttttggttatgtgaaagacaagggtgggcaaggttgtggagacattgaaaccctcatacattgttggtgagaatagaaaattattcactcactctgaaaaagtctagcaattcctcaaaaggttatatttacatttaccacataattcagtaattgcctttctaggcatatccccaagaaaaataaaaacatgtccacagaattcatgcacatcaatgttaatcaatgctattcataatggccaaaagtggaagaaaatcaatatctatcaacttataaatgaataaataaattgtgtttataaatagcatctgatacaatttggcaataaaaatgaagtccttatttacactattctacggatggtcctttaaaaacattaaactaaataaaagaagccagccacaaaagaccacatactatattgttccgtttacttttaaaaagatcctgaataggtgtgtttctagaggcagaaattagattactggttgcctagtgcagggtggatgcagaaatttggtggggagatgagaactaatacacaggagttttttgtttttttagataaaactgattgttacgttggatgcacaagtctgtgaatttactaggaaatacttaattttaaatactaattgatgaatcatatggtatttgaattatactccaacaaagatttacaagatattcattgaaccacgatattcaaaaatgctgtttgcattgtacaatcatttcatctcttattctgtgtcaagggctctgcaggactctctcacttgccactgttcttgacactattataaagtaggttacataaaacagggtacttgcaaggtcattaatcttaggtggatgacagtgaatataaacataaaagaaacataaaacatccttgagtaaatatgaagtaatcgaactttgtttgtctccttgccatccatgtactcaggatgctcctataatatatttactttggattggaggagttatattttaacttgattgatttatctctgtatataagtatgagaaagaaacagtgactggaaaagaatgatcgcattgcaccaggatgactctgaaatggacttcagttcttctgctgatacatctcagttgttactttagctctgggagttgtggaaaagtgctggtgtgggccgcagaatacagccattggatgaatatgaagacaatcctgaaagagcttgttcagagaggtcatgaggtgactgtactggcatcttcagcttccattctttttgatcccaatgatgcatccactcttaaatttgaagtttatcctacatctttaactaaaactgaatttgagaatatcatcatgcaacaggttaagagatggtcagacattcgaaaagatagcttttggttatatttttcacaagaacaagaaatcctgtgggaattatatgacatatttagaaacttctgtaaagatgtagtttcaaataagaaagttatgaaaaaactacaagagtcaagatttgacatcgtttttgcagatgctgtttttccctgtggtgagctgctggctgcgctacttaacatacggtttgtgtacagtctccgctttactcctggctacacaattgaaaggcacagtggaggactgattttccctccttcctacatacctattgttatgtcaaaattgagtgatcaaatgactttcatggagagggtaaaaaatatgatctatgtgctttattttgacttttggttccaaatgtctgatatgaagaagtgggatcagttttacagtgaagttttaggtaagaatttgtttaatcggtaacgtgaagatctaacttatttgtgtctttgaagcagagcttttataaagccataaagtcagggaagtggagtttttggtaagtgaatttatgaaatgaaaatacaagatgatctatcaatctcacaaacattatagaaaagcttaaattataaggtctgttaaaaccctgtggccatcactcaaacagaacaccccaggaaatcataaacctatatattagtacacctaagaatttaagcaattacacatctgttttactatataatgttttagatcttaaaaacagtaaaatccatcaagtaacatcttactgaatgcatagatatagaatgagtaattacacatttttctacaactatctatgtaactgcagaaagttttccttgtaaatctcagttttcttatttagatattgaaagatattcccatgtttccagaaggtttccttcacagtagagagagataatgtctacatctcagatgcaaaagtcaataagggtgatttgaagtttctaatatttctatactccctaactaaagaattggaaatcatgcatttgaagtccaattatcttgttgaagtgtgaaggttgttatatctatatagtttattgaaaccatgtctctttatttaaaaatatgagacagattaaggttgagtacagttctctatttcaataatttctcaaaatttctagctataatttacaaatatatttacttaaatgataatattattaagatcttagctcaaatccaaatgaatagttggtaccaggatttctgccatacactcaaaatagtacagagttcacttgaaccaaagataaaaggattagcttaatgagttgtgtaaactggactgttagaaaattggttttatgggtacagtagaattaattgattatggagctcaaagagttgtttaaatatctatatgcaactattgaagctttaaagagaaaataaattgatgtttaattatctatgacttattttaataattgtgagtatactgacttgacattagagatgtcgcttaacctcataattctcccaccactttgcctttcttataaataaacatggacaaaatatataatacataataatatattattcatatatatttatatatttttcaaagcacataaactttacctacatctttgcttacattgttctaacctttttcagaaaggtatgtaaagtaattatcttacatcatccactttttcttttctttattcctgtcaggaagacccactaccttatttgagacaatgggaaaagctgacatatggcttatgcgaaactcctggagttttcaatttcctcatccattcttaccaaacgttgattttgttggaggattccactgcaaacctgccaaacccctacytaaggtaaacatacttttgttggttttattttgttggcttcgaagtttcagtagaaatgagtctatagttttcattcaaaatgtttgacttacactgaaagaaagatgggaagtaggtggtgtaaagcagatactaattagaaactcatgtatatgttaataccgtcacacgtatgtgagttttatgcatattacaaatagagaggaatagtaaggagactttgaatgtagggttgattaaagtaaaatgttgattatgcaacacctaagaaggtattggtcattcattcaaataatacttataaaaggattagcacaaaacacaagtaagtgcagaaatttcagagaaaaaaaatagacacagtttccgtccccacataccttacattctactttgatatatagaaaagtaattaatgaaaatgttataaaaaactattatctcaaggaaaaacccaatgtcaaaaaagcatcagtggagataatagaaagtatcctggagttactgattagtaagatgagggctaaaaaatatgcaggaataggtaaaagaatgaaggggaggggcagacaaaaagggaaagcagataaagtggtcaggacagttctcaagtcctcaggttttgttttcagggaatgactaagaatgagatgatactaagaggtaaattagagccggatacatattagtagtggaaatatttcttaagagtattgaaaaactactaaaaagagttaagaaataaatatatatgaaacgattctcttttttaagaaaagcctccaagatattcaatggattaaattacagaagggccacactgtaaagagctaaccattcaggaaactttccatggattcaggtaacagatgatggaaaagtggactagaatgttgatagaaatcattaggcccacatttacagaaatagtgccaacttcatattgtgttgtgtggaaaaaatattaaaacagacaaaacacttaaaatgtctctggcatatagtcagtgactcagaaatgttattaattttgtaattatggttattttgtgattattactaatactactaactacttaacatgtgcaagtcacttgagatatcattcctcatttaagagaaccagattattcagcacatcaaggttatattctcttgcaaagtcatagatgacagataccctgtggacttgattaaaattatacataccaattgtgacagtaagatgagctagttgaaattctaaaattctaccataagtaacaaggatcttcaccagtattccagcttaaaactcttcctcaacaatataaatgtgtacctcaaatatgtgcagacaaacccagggttcacttgactttaacaaagtatttaaaatcatttctgcattgagatcccagaattttacattttagagcataaacatacctattagagcagatgatgtctgccttatgacaagcaaatcagtaaagctttctggatgaacttgtctcaacatcataggtgcctgacagagaagcacagagatagtgaacaatgcatgcataataaagacgaaataatttctaccacttgtatctgaatagtgcccttagtttcaatatgaagaaacttctgtcagcatataagattatattctttttgaaggaacacaagaacctcacatattttaaattaatatcacattttaagacatatgtacaaagtaagcattcttcaatgcattattatgcaacctcttaaaagaacgtttttgcttacataaaactgarattttattccattgttaaaactcagtatctctgtttaatgcaaattgtatgggctttatatagtcactttctcaagagagaaaagctgaagtaagactaatgaaaaatctatgtcactctacattactcttgaaagatttccccattcacattaagggaaactgacagtgcaaattggaggaggaagagagtaggaggtgtaaaaggacaagaaaaaaggttgactagtagtacaatagtggtaattactaatactaggtcttgttattaacttgcagaaagctttgaatgcaagtcaacggttgtgaaaccagctatttaactgtttattatgtaaaataattgctaacccaggttgcattcttttcaattatatattacattctcagataatttctatatattttaagagaataagacacttgacaaactgcatcaagtgttttaaaaatgcgtagttattaattttataatatattcacgtgaaatcataaaaaaatcaaggtgcacctattaaaccttatggaaaatattcacaaaattaacattacaagtaatccaacatcttatatgaaagaatgattaaaatgtatgtgcatacaatagcattaaaataattttatcaatgaaatgttcaattacaccatcagccatagtacaaataaagtgagttggaaaatgataaatataacaagatggaagttttcgcaggataaaatgtatatacaataagattaaaattttctaaataagtgtcacatgtatacattgacctatataaataggacaaaatccataataaaaaatacatattttctataaataatatctctaggtagaaattttagaaaaattattttttaaaaaacttttcatacttttatacaatttcttacattaattttgtattatttttataatattatcacaaaaggagaaacaaccagtcaatatcagtgatgaatctctaaacagagattagattccttcaacacctagtagaaaaacaaggctctgatatcaagccagtgagatgaaacactgaaaacgagttacattaaatgtggctacaggtaactgcaatcacacgcaacacctagaagccccaggtattacgtggaatagtagtacaaggactctcacgttaatgtaagattaaaaatcatattttaagaaaacactctgccatatgtgatgcactgtttacatttagacgtttttttctttgttttgttaaaaaccatttggaaaagttttaccccaatgattaaatctgaaaatacttaaatttaaatattggtatacattggggaactcaagtcagaataattctcaatcaatggcagccaagcacatcttcaccagcagtgtaatgtggtgtgtgtgagctactcaaaagagagacaagatctctcctgaagaaaggcctggtggcctctcctattctggtgccagtgctgcctctgagacacaacaaagtgatgatgagagttcctcacatgcagttagaaatagcacatcaatttaacagtgtgatttcagggcaataggtgctccacctaaacaaaaacccaaaaggtacaattattcaacaactaactataaactctacaattccatatgataaatgagactcccaagactgattcataaaaattccaaatcacaatactagactcaggamtgtcagtgattcttaaccaccagcttttattttcattttttattttttgaaaaactactggaaaactctgacaaactttaagtgaagcataaagcattgtagaggaacataaatgtagatataaaattatcccaactgtgaatatcttttcctcagtgctcatatttagggaagtagaccactaatggcttcaaactaaaagaattctacagaaaacatgcctgaaataaacacaagtgatttagtagaacaaaaacataggattaaagccgagtggtgccactattccaagaacttatattagtaattatagtattataagtgaagggtctgggtatattttttaacattatctccctgactacaatgtaatagctccatttctttcctccattacacacatgcagacacatacatacatatacacacatatttacacaaatatccttaacagaggccaactatctcaaacatcttcttgcaaagaaactgaatgattcagttaaaaaatattattaattccaataattcctcaaaatacttgattttctctctttaatatttggtaccaattctttcagtagtgcctgctgtggtgatactcttttgtgatgaaacaatttttttttcacaggaaatggaggagtttgtacagagctctggagaaaatggtgttgtggtgttttctctggggtcagtgataagtaacatgacagcagaaagggccaatgtaattgcaacagcccttgccaagatcccacaaaaggtaagataaagggccttactggtgtggaaaactgctgaaagaggctgttaatgtttgtgatctacatagaaagaatattaagagtagagtgaactctttacatccaaatacatccttaaatatgcttatgttgcttccaccaacacaagtaatagttgtgcctcagacttagtggttacatgtggccctgggggagttactacccttggtattcatgagtggctcctattagtatcagtgggaactcagtactccgtaggtatccacaacagggaacttgagactcatggttatttttaatttctgatattaagagtcatacatactgctgaaattaactgaatatatttcaggtaagtgaaaatggtgcctaatgtagtctttagaatgactttcaagtgttttcaactaaaaatatatatccagaactgcatctttgtagaaatacaaggaagacttatgatcattttcttcaaagctgttttgctaatctcagcagtatccaatgagtgaagaagatttcacttactcttgggccacctctattacttaccgtactctggaagctcttggtgaatgtttacaattaaggaatgtactatttctgtttgtactttaagtcaaatgcttatgtgaaatatgtgacaacaaatagagaacactgcctgaagcaggaagatgaaagagaaaggatggagatggatcctgacctgaaggtggatcctgtacagtataaaatatggtcccacaaggactcagcactaactaccagattaacaactcctcccaatggaggcagcagaaggaaatataggaaggagtcaaacagaaggaagagaggcaggggaacaggttcagatgtcccctccatagaacatagtaggaatatattttcttctgtatagagtaaaccagggacctttgtgtatttgtgaatgactttttaatttcctatctgataaagctttcttgtaatgacctctaactttttgctgaaacctgagttactttaacactgatgtagcaaataaaagttaaacactgtaaattattgttcagtttgtgaggattgctttggagtttcaaaattagtaacttaaaataagaatgtcttggctatagcagaacatattaatcactgttgacaaagctttgtagcacgttatctaagtgttaataatcagttgaccaaatttagcaaartacaattttgagtttattcattagctttatttttattcatgataccaaaaggttcctcatttctaggccaaaaaaaaatccaaaattaacaataatggtaatattctgaatttgtgtcaaaaattgtcgcttgaaatttttctgggaaatagtgcttgataatttgtaattccaatgaagttatacataaaatcttggcagcatttatttagttcttataagtagcttattttatagacttgctattttgtcaatcaaaggacaacaggctccaatataataacctaccgacaagtagatacatttaaactacttctcatattattcaaaaataaacgaatacattacaattaaatttggagatgaaaactaatataaaatacataaaacaaacatacaggtcattactaaatagtaactgttttattacactagaattacaatcactccatataattttttacactttttttgtaatatttttattttttaaattaaattaatttaacttttatttttaacttttaagttcaggagtacatgtgcaggttttttacataggtaaacttgtgtcatgggggtttgttgtactgattgtgtcatcactcaggtattaagactaatattcgtttattatttttcctgatcctctctttcctcccaccctccaccctccaatacatctcagtgtatgttgttgccatctatgtgtccacgtgttctcatcttttagcttccactcataagtgaggacatgtcacatttggatttcaattcctatgttagtttcctaaggctaacggcctccagctccatccttatccctgcaaaatacatatttttgtttttttatgrctgcataatattccgtagtgtatatatgccatattttctttattcattccataattgatggtcatttaggttgactgcatgtccttgctattgtgaatagtactgcaactaacatatatgttcatggatctttataaaagaaccagttatagtcctttggttatatactcagtaatgggattgctgggtttcgtggtatttttgcctctaggtttctgaggaatggccacactgtcttccacaatggttgaactaacttacattccaaccaacagagtataagcattccttttctatacaacctcgccaacatcatgatattttttgaatttttaataatggccattctgattggtgtgagatgctatctcattatggttttgatttgaatttctctaatgatctgtgatgttatttttcttcatatgatggttgactgcaggtaggtcttcttttaaaaagtgtaacaattttttgaatatttgaacttttcattgatagtcttatttttctatggtactgttttggaaaatcatggtttcttatatatctaaatcattataaaagttaagaaaataaaatgtgagtattctttttacatcaatctttgagtagatttatttactaacatcccttgatctcattcctatgctttctacagttctaacattctataatttttgagttccactcatggaataagatattctctttactgtaacaggttctgtggagatttgacgggaataaaccagatgccttaggtctcaatactcggctgtacaagtggataccccagaatgaccttctaggtaacactctggtgaacaaatactggatatattagtaactgcacattagagggttaatgaaacatgcttattgaatatttgttataggaaaacaaaaaagaacttctttgtatttattttccagtcctaggggaaaagaatatggtagaattgttggcattttatgatatataatcacattctttatggtcagaatcagagataatctttatttcaggtgctattatatctcacagaatttttcaatatcttcctgggctgtctctctgtctcctgtttctacaattttacacctgttttctcctctcctgcaggattatttcaaatgccagtaaatataatagctcttctatcaccagtaactctgtattttctggaggactaaattcctaatcttaatcttaaagtaacgacacatttcatgatgaagtgtgacctgtctttcctcaatcctagcaccaccaccaacccactgcctgctgccttgcataccccgcatatcacactctgtgactgtagttaaaataaaactttatttcatgcccatctctttgctgtcctcttttgtgcacatttaaaaaatctagaakgcacttttcattagtccaactgaaaatcttgtattaagttttgcagtctgaagtcacacacaccacatagctttcagttacatctcctaaacaagtacgtgctttttcatctgaagtctgaaaagtaatagcaaattagttcaatgtgttatctagaaaacactgtcactttcagaacctttcattgtgcatctcattttattcctatgaataattttgctaaaattcatccaatcctaggtcatccaaaaaccagagcttttataactcatggtggagccaatggcatctatgaggcaatctaccatgggatccctatggtgggcattccattgttttttgatcaacctgataacattgctcacatgaaggccaagggagcagctgttagattggacttcaacacaatgtcgagtacagacctgctgaatgcactgaagacagtaattaatgatcctttgtgagtagaacaatgtttttcactaggtggtatttgtggacagcttctcttgtcaatagtgagcatgagtttcatcctttttataagagagtaatcttgaaagaatttaaatgatataaccaatctgaaatctgctttgtttttatcatctattatttaaaaattgtgtttgaatcccatacatctaatgagtaaccagttagtgaagcaattttctaaacaaaaataattttaaaatgatatagataatataaaaaatacatttcttaaaattttaacatgaatccatagaagaaaggaagaataaacttgaaataatataataaaatgttttaattaaatatctaaaatgactcagaatataactattttcttgctgaaaaattaatttttatcatcattattttaacagacttgaaaatgagatttaatttcgatagcttaaaatccacctatttatgccataaaatccaaatatttttactatgtttacagtcattaaagtatcaccattatatatataattttagaacatttttatcaacacaaaagaaactgcaatgacaccaaaatcacttctcataactgcttagtcctagtctaacaccaatttgttttctttctctataagttattctctctagatatttcatataaatggaatcatacagtctcaggtgctgtgtaaatgacatttcacatagcctaattttttgttgttttcttatggtttttattttacttcatattgttgtgtgttataatacttcatttcctttccacttgtgtaatattttatagtatggatatgtcataatttagttgttcatttgtcagttcattggccttttgattgtttccaattgtggctactaggaatattgctatacttgtttttgcataaatatgttttactttcttttgagttgatactataagtggaattgctgcctcatgtgagaactgtatgtttatggagaactgctaaactgttttccaaagtacttgttgcattcatcactaccatcagcagtacaacatggttccaattcctccacattgttgccagacctcttattttctttttgttacaaccttcttagagggtttaaaatgatctctcatcctggtcttggattgcattttcattactgctgaagatgttgagaatctttatatgtgattgttgaccattcatatatcttcttagaaaacatgtctattccaatgcttggaacatttttaacttttctatttgtcttattattaagttttaagaactatttatatattatgggacaaatcagatatatactttttaaatattttgtcccaatcttggtgcactaactttttactttttgatgatggtctttgaagcacaaaaaatataattttaagttaaatttttaataattgattttgttcactccccaaagataacaatgtgaaaaattacctgcggagtccagctaccatcaattcagcatttataactactctcaataaagtttttgtgtaaggagggtatcatctaaaggaatactttaaaaatactttatcccaaagaaaatggaaggataacgaatgatcaatgtacctttaaagaagatgggaaataattgaaaagaaacacaaaccaccttggacaaatagaaaagaaacataaaacaatgtggtagatttaaatgtgattatacaaatactttcactcaatctaaacagacttttaataaaggagcaaataatgagtaaggacataaaacatttgaagaacacaattaacaaatggagtcttacaatctaaaatgacatacacacatatatacatatacaatacacatgtatgtattgtatatatcaacttgaagacacattttcctagagtacgtcaaatatttaatctttccttgaagtgatgtgtggtgggcaataaatcaagacttacgaaatataaaagattcaatatcatgaagactatatgatccagccatattggaaataaaggaggttaaaaatactattactaaaatatctttaaattttggaaattaacaaaatacacttcaaaaaaatttacagtcaagaagtaaatcataagtttgcatgcacttttatctcagcaattctactctcaattatatacacaacagatatacataaatatataaatctcatgctgtatagcagagtgttcgtgacagaattatcaacagtgtccaaaaattgttagcaacccaaatatctattcatcataaaatgaagacataatctgtsgtttatcaatcaatggaatactacatagtaatggaattacccaagaactgctacattaaagaaaaagacacttttgagtacgtattatgtaattcaattacataaacaagcaaaactaatgttgttattcgaagtcaggctaatccttagttggaggacaaaagtagtcactaaaaggttcagaaaaagagaattattgtaggcaggttgtgatagcttataccaggacctgaacagtaggtaaattggtatcttcatctcaagataatgttcaagatgatcttccatttttgaactattcacttagtgtatgtatatttatcttttgtgttttatatttaaatgtatattttatgagatatataaatcatttacaaaattctaggaatcaaatagaaaataaggacagaaaatagagaaaatcctggaggctccatcattgtccagtaaaagcctctcttagaggtaacacttagagccacaaaaagggacagacacatgccttgggttgtagcaagaaagaatactccaagagcaggagagaagggtcaaaacgtgtaaagttctaagatgagaacacctttggaagcttaaagaaaattagaaggccaatctagaagacagtgtgcagaggaaaagtgttagaaaaaagcttgccagtgtcttacgatgtagggttctgtagaccaaataacagagttgaattttatgattaaaagaatgagaagccagccaaaaatcttaatcagaagagtgccatagtctgacattaatttcaaaaaatcattctggctacagggtgggaaacagtaggagacaaaagagtaatgtagaagaaaagtgacgagctatgaggtatgtcactcaccttgataaaattcctttttaggaacttacagatgataattctcacatcgcattttcatagtctttcttacagcacttaaaatggctcatgatgctgagcatgtactcatatgcctgtttgagaactaagaatgtaattggatttttcataatacaaagaataaatgcttaaaggatgaatatcccatttttcatgatgtgattatttcacattgtatcaaaacatctcatgtaccctataaatatatacacttaatatggacccacaaaaacttaacattaaacaattaaaagccagttaaaatgccttatattttctctgcttgaaaaaaattaactttctcacctgaccttccatttctgctttaaaaatgtttgtcaatgagaaaagtccaatttaaaagccaaactatctatgataactcaaattaaaatacacaaattctctgtcaattctttgacatttattttgaattatttgatgctttaaaagcctttcatagacttgatatgtacaggcaaattaacttactttcagtgttggtatccttatttttatccttcagatataaagagaatattatgaaattatcaagaattcaacatgatcaaccagtaaagcccctggatcgagcagtcttctggattgaatttgtcatgccccacaaaggagccaaacaccttcgagttgcagcccatgacctcacctggttccagtaccactctttggatgtgattgggtttctgctggcctgtgtggcaactgtgatatttatcatcacaaagttttgtctgttttgtttctggaagtttgctagaaaagggaagaagggaaaaagagattagttatgtctgacatttgaagctggaaaaccagatagataggacaacttcagtttattccagcaagaaagaaaagattgttatgcaagatttctttcttcctgtgacaaaaaaaaaaaaaaaaaaaaattttcaaatctaccttgtcaagtaaaaatttgtttttcagagatttaccacccaggtaatggttagaaatattttgtggcaatgaagaaaatactaggaaaattaaaaaataatataaagccatttgagctcatattgaaatttgttgcacttatattgagatttgttgtttgaattcacaagttacatgaaaaaatttactcagcttaactatatttcacacattttacataaacacaagaacattaagaagtctactgacagtatcagtagtcacatcctcagaataatttggcttcattttgaacaggattctgttgttttaactgttgctaaagaaactattacatagttaaattgtatataaagtctctctcttccttttgatattttgagataagtagtattcctttacttttacactgcatgcagcttcattgtcacattttttgctaaaattgatggccaaatgtttactgttttaagagctcatgtcatttctcagtggaaattatgggggaattagaaatatagccactcttacctgcttcctactgtaaaattgaactgttttgccacatctttggtttcatgagcaaattctattttttccagatatgtaaaaatatttgtctggttgattttattctgatatttttaattacttcaatagttatttgggaacaggtggtgtttgattagatgcgtacgttttttagtggtaatttctgaggttttgttgcacatatcatgtgagaagtgtaccttgcactgaatgtatagtcttgtatctctcaccccctcccggcctcccatctgaatccttagatcccattacatcatccttatgcctttgcatcctaatagcttagatctgacttagaagtgacaattgatgatgttcagttttctattcctgaatttcttcacttagaataatgctctcccacttcatgcaagttgctgttaatgccattagtttgtttctttttacagcttagtagtattccatggtgtatatatatacgtagtatgtatatgcatgtgtatatatatatgtgtgtgtgtgtgtgtgtgtgtatcaggggaacccatgttcaatatttcaatgtaggttctttccattttccataagtgttggccagctgagaaatagagaaagagtataaagagaggaattttacagctgggctaccgggggtgacatcacctattgttaggaccgtgatgcccagcatagcctcaaactagcaagttttctattaagggtttcaaaaggtggggtgagggggtgtaagaacagggagtaggtacaaagatcacatgcttcaaagggcaaaaggcagaacaaagatcacatgcttctgagggaacaggacaaaaggcaaagcagaactactgataagggtctatattcagtggtgcatgtattgataaacatcttaaacaacagaaaacagggttcgagagcagagaactggtctgaccacaaatttaccagggtggagatttkccccaccctaataagcctgagggtactgcaggagaccagggcatacctcagtccttatctcaaccacataagacagacattcccagagtggctggttttagacctccccccaggaatgcattcctttcccagagtactaatattaatatttcttgctaggctaagaatttagcgatatcttccctacttgcaagtccatttataggctctctgaaagcaggaaaatacggctgtttttgtgtgatcccacagggagtcagaccttacggttgttttcccttgttccctcaaaattgctgttattctgttctttttcaaggtgcactgatttcatattgttcaaacacacatgttttacaagcaatttgtacagttaacacaattatcacagtgatcctgaggtgacatacatcctcaggttatgaagataacaggattaagagattaaagtaagacaggcataagaaattagaaaagtattatttgggaactgacaaaggtccatattaaaatgaaatcttcacaatttatgttcctctgccacagctccagccagtccctccattcagggtccctgacttcccacaacatccctccctttctttttatataaatgtgccatggtgcaaagtcttgtttgttctctaggttttgacacgggaatctttgactggtccagcacactaaaaacaagtcgattaaacagagaaatattattccaaaatttactaccgtggagcccccagtagacttaatccaagtcgtggggtttagtccagaaatactttctgccacctgatctaacgcctcagctccagacacaatgggtaaatgagcttgagaggcttcagaaatttgtttctttaatttagttatgtccaagaataaattatcttccctacccagaaggtgtcctttgaccattttccatgaatgatcagtctcattgtaggaatatggtgtgatacagaaatcagaagtattcaaatcacactgcatttgcatgtgatgttcgagactcatcagctgatttccaagccaaataacagactgtcttaaatcattaatttgattagctaatttttgatcaatgtcttgttgagaattccacatttgggtggaattgacttgctaatcattgacaaaatgagctgtttgaatagattggtataatgccactccagcagtggttgccagtgcagtgactctgattaggcccatgatcacagcgaatgaagtgaaaacaaatctcttagatcttttgagaattcattgtaacacttcattaattaaatgtactgagggggaagattcccaaggtctgggtaaagttaccagtatccagattccttctcgagctcaaactaacattttacttttcctggagtcaaaacacaagttaacacaagtgtataaatgacaattagtgcattggacagtttgattgtttgtccaaattttgatatttcccattaacagcatgtaaggaagcttaacacaacactgtatagaaaaatacaacttggaggtaaaaaaagcagaatgtttgaatctacactgatactgagggaaaggagtggctgtggccacgcccaatgttctctgccataaagaaggaatccaaggtgcctggggatgctgaagaggtagaggagcatacctgggttgagaagaatcatcataatgccaattggagtcccataaagggggatcggcatcaaacagaggaaaagggttcaaacgggatttatcatggggttcataatcacggatgtgaggggcagtaattgggacaacagacagaaaattttctccttcccatactcgcagtctggacatggcaatatccagtttccaaatttctgagtgttctgggctcagaaaggggaatatcatatgaggcctcaggtgagtaatgcctttatcttcccattttaagggaaagaatgagctgaacctcctatgcaaagtaggatgatgatcctcttccttccaataagaaataaaataagtagcctccaggcattcccttccatcagaggagcaattgttttttaaatagccctttggtgcccactctattactaaaccatgagtcattttttaataatactgtatgtgagtgaacacaatcttcccaatttaaagttttagatgggcactcaaaatttttaggacattgttttcctacaggtttatattgatggtatggggtatctcctattactccccttttcatttgtcttaaagaagaaagggaggtgccggagaccaaatgtccccattcccctgtagctaatatctccagaagataagcagcccagacttgagtttctaaatggatactaccaggtgcatgtgtgaggcacaggggagggtacttataacccatagtaacattaaacgcagtgctttcttctcctggttgagtgggacaacagtcatctgtagctatggggcatcacagtcctactgatatgtgatgtcaccccccatgacccagctgtaaaattcctctctttttactctttctctttatttctcagccggccaacacttatggaaaataaaaagaacttacattgaaatattgcaggtgggttcccccgatacatgcacacacacacatatatacacacatatatcattactttagatttccacaggagcatccatttaggtgagaggttgaataagtggaggaaaaggcacttaagcccagtaggaataattctgtgaagcagatcattcaggggggaaactggtgacacagaaagtataaagaagagaattattaaatgaaacctattggaagtgagatccagtgctgaaggaggaagagaagaacagagggacgttattttcaggctaatagaaatggtgagatttttaggttcataaggagaaaaagaaagggaattaggagaagtgggattggttagagggatctccgttgccattagggaggattgaaccagacccattttgatttggcatgccagtttttgagaagtcagcacagatctcaccaggtaggagggtggtctccgacgcggacgtctcttccctgtggttttgtcagtattcacacgaagtcttctagtgggcaatcagaacggtgactgatgatctcctggtgaaacaaaagcatatcctcttccccatgttataattgttccagattcccaggtattgatctgggagtttttccataacactggcttgctttcatttagggagaattttttgcctgtataatggtgttcagctatagtcagggtattgactttaggaacatttagaaagtttaaagtaaacaatgctcaatgtaattgagcatgaggagtggttgaattatgatttaaaaccagccttgtctttttttatagtgacttgaagaggtttagtaattccttcatgttttggaccgagaccgattccaggaacaaacgtcatgttttccattatatatagactgggaacactataagagctatgtggaatattaattgcagccccccattgttccagctaatctctgcctcaaagattaatggggattggtgtgatataaggctgaattgtaccttttgaccatcagggccagtgcaaggcaagataaatgtgctctggtgaacttcatcagcttttccaacccctacttatcccatgttagtgggatgtttaagccagaaggaaggccatacattagaggaaataatagaaacatcagccccagcatccactatgccctcaaacctttttccttgaatgtgtatggtgcaggtgggccattgtttagaaattactttaatccaataagcggctttttcactgttggagcctatcccagagccccctgtcttatctcctttgtttaaaacaatattaggtaataaaagtaattgagcaattgactcaccaactggaatggaaacaggaaccttggcagacaccataagtttaatctcatcagaggaatcagaattaatgagaccagtaggaactatgatacctttagcagaggtggatgtcctacctaacaccaggcccatggaaccttgaggtaaagggccagtgacccctgtggggacaattaaaagacaagaattaggtagtaaatttagaggaatggtactatggagatcaaccaccctgccccctactgtggaggtagacaagcagtgtactgtgacagaagaagaggctgggacccatctgggtttgctgtaggtaaatttgtttgtactgggggctgcgttaggaccgcttcaattggaaatgcaacattggtctgagtctgaggtgtgccatttgatattggggcctgggactagccctgcttcccatttccctgattctgtggcaagggatttccatctgtatcagacttagagtggcaagtacttgcccaatgtttacctttatgacaatgagggcaaacagtagcaggagcttttggccatgtttgttgagctggcatggtagcttttaagttttaaacactgcaaattttttgagtatgaacaagttgaccacgattatagcaggctccaagaaaagaatcagtcaagccagtttagttgccgtccttcatggcccatgcccacagaatagctttgtgggtctctgatccaatgccttcacaagctttaatatatgcaggcaacacctcatgatcaggtaaattttctcattggatggaacgcatggccattatacactcacggttcacattctcaaaagctaacatttgaaggagaatacctcgaacgtgctcatcagagacagatttttgaacagcgtcttgttatttagccaaaaaatcaggatgaaattcattgtga

SEQ ID NO: 94174 - DNA, 37551 bp, Homo sapiens
  misc_feature (1)...(37551): n = A,T,C or G
gtttctctcttgttgcccaggttggagtgcagtggtgcaatcttagataactgcaacctctgcctcccaggttcaagcaattcttctgcctcagcaggaggcaaacattggagaagatttttactgtatacttacctgcatttttaattgtgtgaaaatattatgtattaaaaattatatttagagaaatatatacaaagattttatatgaatcttgcatcagaaaaaacaagttttaaggccccccctaaatgccagtttggcaaaggtgacattgaagtgggattttttggtgcctctgatttgggattttatcactattgttatattactcaggtcaaatcataagtaaagactaggaattaaaaggaaagaaaggcattagctatctttttggaaagaaaatctgcaagtattaattgattcaaaattgctacttaaatataaatacatgtgtttatccgttataaagatgttataaagttgttcaagttattctcttatattcccaaatctctattgtgtctttagccattccatttcatttttaataattgtcatttgtagttttctttctttcccctttaaacagtacagttagaggttcatctttattttttgtcagtcttttcaaagaaacatatatcagttttattcccctattgtttcattgctttctgtttcactaatttctactttttttttttttttttttttgagatggagtctcgctctgtcatccaggctagactgcagtggcgcaatctcggctcactgcaacctccacctcccgagttcaagtgattctcccacctcagcctcccaagtagctgggattacaggcacttgccatcatgcccggctaatttttgtatttttctcgagacagggtttcaccatgttggctgggctggtcttgaactcctgacctcaggtgatccaccagccttggcctcccaaagtgttgggattacaggcgtgagctactgtgcctggtcaatttctgcccttgtattatctccttctgtctgctgtttaaaaagattttatctgatgttctttttccaattcctcaaataggatgggaaacttactgtttttaatttacttatttggatgtgattttttatgatctttattttgataccatttaaaacacaggcaagttccaaacatagtacatataacttttccatagactttacccaaatgcaccaattatttacctttgtcctgtttgttttatcatttgcagtccccctctgtccatatgtatgcacatattgatgtgtgtgtgcttgtgtgtgtgtgtacttaactagtttttggtcaacttgatctatcagtttttgagacagatgtgttaaaatctcccactattgtggttttattcattttattcttataattctaatggttttgctgagtagtatattattaggtgcatagaatttctgcatttatatgctctttatgaatgttgccttaaatcctattttgaattataataatatcatttcactagcttttttttggtgaatatttaactattatgtcttgtttttgtccctttatattcaactttcctgtgttgtttgttttaggatgtctgttataagcagcatatagctggactttgttttttaaatccagttttgtagtgtctctcttttatagatgaactgaaccctttatttgaccaagaagatatcatcatatgttataaactgtaccataaatctggtgactgatgaagaaggagaaacaaatgtgactattcaattctgggattctgaaggtaggcaagaaagactcattaaagaaatcaagaatgtgaaagtcaaagtactcagacaaaaagacagtcttctccaggcaccaatgcatattgacagaaatatcctaatgcttattttactactaatactgttgaataaatgcacatttagttgcaatattgaattacaggtgtttcaaacagcattgaagagacctttgccagtaattcttggggcagttacacagtttttttttgatgccattttgtggatttcttttgtctcagattgtggcattgcctgaggcacaagcttttggatttgtaatgacctgcacgtgcccaggaagggtgggggctgtctcttttctctgcttctagacggaaatttcacattggccattttgatgacttgcacattaacattattgccccgatcacgatgcctgtcaattttacacatacagtaagatattagggttgtcaggtacatttcatattcctatttctaaaattgtgtcaacactccttttcatactttatcagtatctgttgaaatagtcatcaagcgtagaatacctgaaagagcaaacttcttagagagaataattagacctctgagttttattttaatgttcatagggatttatttgactttcagagtgggattaatgtttctaaaaacagataacctagaggtgcttttgttgggtctcttagttcctgcttcacatttctcatttgggcacttttttgctaaagtttgtatgctgtgtcttcttgtttataaaactgttgctattgaaagttggttgttaaatagtttcttagtcctggccattattcagctgtcttttccaagtccaaggcaaacttagcctctgtggctccttttacaggagccatgtgttctggatgtgaaatgttactgttccttttggtcttacaaggctaagaaaagctgtacccttatcttagaagataagagaaaaagaaattgcctagcttaacaattaaagcattgccgaattcctactcaggcactgtggagagtcaaagagtaactaaaatgatgtccattcataagccacttatgagctgataaaaaagttgacatggggtgaggaagaatacatgtgtatatatacccaacaccataaatgttaagcatccaaagagtgcttccaacagtagaatgctacacaggagttcagaggaaggcggtaacttttcagttgtgttggtttgagaatgttttatggagtacaaggtgaatatgatactttattatggtagcaaaacgtaagatcttattagctatcctggacactccacccctgaccagctgccatggtgtatatataattatattaggtcagagtccacttaaatcattaactattaactgagaatatcatggcatgtagaagctaaaactttttttttaatgaagagagaggtcatttaaaagaagtcaactccaaagactaagtgcagttgacaagatgcctatgatttctggggagggaaattgcccactcattcctgtggcggcctctctttattatgcaaatacagggcaagtaagcactgtcatccttgcctttgggaaaggataacagaccttcttgtggcttcacagggccacccttccctagaactctcttctgtatgctcagctgtctggggaggtgtcaggggcattggatctcacctctctttcattctgaggttcagcgtaattacaacctctctcacagatgggagtcagctgacaggaaaggataccaaaggcctccaagagggagcttcccttagggaaggttgaaagagtgaggagctggacatcatgccaggaagcagagtttgtgctgctgtcccctgcccccgacaacacctgggcacggcagacgttcttaggattaggaacagtggctgcagatgggaccagagttttagatactgcccctttgggaactcagaggtagtgcatcctgtactgaggtctctgcaactttctgaactactttcacaatattggaccaaagatcctttggatttgtgagaccagtttgcagctttaccacaatcaaatctgaacactaagacttccctgtgtaccgacagattttgcatttcactttcagtaggcatttggaagcagaacggcctctttggactgaaaaaatctaggttacctgacaacaattgtgaggcagatgctaaggtctctagaaaaatactaggcttcttgctcacctgacacaggtaatttgaaatgttatcatttgaaggaataagataggtgatattgaatctctcttgcttcaaattgattatactgattttagcagctttgccaaatcactgggaccacattcatttaaaaaggttaaaagatgatggatgacatttctgcaaaagcctggaaatttttatttagttatgaattaacacttgtcatcatgcagttggcaagatttttaagatgattgacaatgaagaatgaaatagctagtttctgaaagcttgtctttaaaacaaaacaaaaaatcatttaataggcaaatagagatatccaaaccagatacctaggcatcattctttagacaattaaagacaagtttcttgctctttgtggggtgtgggaattgggtccacagttcatatcattaatctctgggaagtgtttcattggcaacatgattgtgacaacatcttgtccttagattaaatgaagagaaacaatcacttcctaagcaaggagccaaatagctcacttttctgttcctgctgtggctgggacatcttatatctgtgcaacagtttttgcatgatgatgatgtatgtaccacgatgctgccccttcaagaagaggaaacattttaaggaccataaactagtccttgtacctcgtataatgcaacctccttgtgccgtacattctctgcgtgaggacttttgtaggaccaaaaggaaaatttccctttgttctctgaatgcttgctgaaaatcaactgacaaaagacagattaataggagagaagggtacaaatttatttgatcatagttttaagtgacatgggagccttcagaatgaagacccaagatacaggggaacagtccatttttatgtttaggttcaaacaaagtataaccagctgtgtagaaataggattggaccaaaagtgtatagtgtaatgcaaatagactgagtggggaaacccagcaaagcctgtctgtttagattttatttggcctctctgtggtgcattccttccttctgtgcattgggcaagaccctctgtggaatgggggtcttgagacctacagtcagaaaaagtgggttggataatttctttatggtctgtttttacgcgaaaaattggggagattagaataatatttttgggtttctaggacctgccttggggaagaagaattccagtttctaaggcaagccttgagggagaatgtggggccagagacaggaaggcaagaggcttcaaataactttttttctgtgaggctgcttctgaggacttcattttggggtgtcgttttctgagccccaacactttggagtcagtgtgtttcactgctctgctcttgctgtgtgacctgtgacctgtgtgaggacaaatcatttaccttctctgagcctcagtttcttcatctgtgtgatgaagctaattatacgtacctcaggcaacgtttaacaaaaataatgcatataaaaacacaattgctgaaagcatagtaagtcctcgataggtggtatctaaatatatcactgagaaaaagggcagttagttctggctactgactattaaaaaaaattaatataagtttaccaggtaatgctttggcaaataaaagctgctcaaccgaagtcatatctccaatttgtgttttgtcaaaatggtactacggaaaaatgagagaaagggtaaagaaagagaaatgggaaaaggcgagtgaatggaagaataaagaagaaaagagaaaaataaagaggaattgaattttaaaaagatttagagaagaaggggcaagcaggagaaaagaagttagaagaaccagaactgggaaagaagaggccagatctgaggctcctgcgccggtgaagacccgggccgggcctagcagagcctctcagggcgcagctcggggcggggcccagcaaagcaaccacgccccctcattgatgggcttaagaagcggcgaccttttggtcccgggcagcccctctgcctcccaaagcactgaggctggatagcaccaggcacccagctagcaggacaactcgaggtgaggcccctgttttccccgccccgctcgccgactcgaggtgaggctcctgttttccccgcccccctcgccaccctctccgggttcggcgcttctctctgctggggtgggggcgagggcggtctgcggtgtgcggtcagcccctggggcgaaggccgcatctgggtgactcttgcctgccacgttatctggagctgccctggggtgaccaggaacactcccgatgttggagtagcggttcgcggacgccactgcacttaacccctgtggcagcttctgtggaatcattgccgcttttcattttccctactccgaaaagcttagagaaacttggcgcatcccaggctcagttagtcaccgtaagtgatggggcagcgcccggatgactggcagcgccagtcgcgctgctagggacaggtggccgacagatggcagagagatcacttacaggtagtcaccgtaagagatggcgcagcgccagtcgcactgctggggacaggtagccgagaggaagatggcctggctcccacgctgggaagggtgtgaccaggacagaaacagcaggaaacagttcaggtgtttatggatttgggaaaatgaaagtgagtaaatacggcccctttccattaagaaatgtacttgtgatatgatacatatgtgtatatcagaataaatgtattacatatatatgttttcatccaccattactggctcataactcccataagcccttgttacagtcttttgttataatgtcggggcactgcagcccccagaaaaatggaatttctctctttgaccttctgtcctcctttcatctgctgctttttctccccaaggtaaggatcttcccctacctttgtgtcttgtagctggttataaataaattctctggcctatctttgtctgattgtagttcataagactcccatttcggaagaggccccgctccatacccaggaggaaggaatgctgcaaaggggaaccaagaagaatctgaacagacagacctcactgggtttccctggtctattactattagatcatacagattttgtgggatgatattcctacacaattatctatcaatcatgcctatccgatgaagtccagactcaggccctcagttgctatctactcaagtaacttacatgtttatatctgcaggccaaacctctcttctgagctcaggatctatctattcagctgaataattgacagcttcttttgatttcagggaggcctcatatctctgctaattgaactcttaattttccaacctcttacccacatcccaaacttgactcttttttttgttactccccattcagtagatgtgaccgttatggattcggttgccagactggaaaatctggtcatccttgaactcttcctctccctcatactccatagccaatctgttactgagtctccccaattttatttcccaaaacagattatctcttgactcccttagcttctccaccagaaaacttccctccccaggtttcagccaatcatcaggtctcckccgctctactgcatcctgaatgtaaatcatctaaccgtctacccacacccactttctgccagtctgttcagtagccacaatgcagtgattcctcaagtgtctcccatcaaagtcttatccctgaagtcctgtaagggacctcattacctgtaaggtccagtaaggtcctacaaggacctgtaagggacctaccctgtaagggaccccacttcctccccagctttatccctcctaattcccttgacgtctgagctgtcacacttaggcccttcagttagtcttcatgtaccaggcatcctgcagttgagtgagttcatgcctgttcacttgttcttctcatcttggcttaatcttgtcttcagggaaacctgatctgatgccaaagtccaggtgaaagctcccctgttagatgcttctcactgcacttctcctacttagcctttattattacagttatgattttgcatgtggtctgtgcatttttgattaatatctgagtcccctcctagagagtaagtgtgaatgggacctggttttcctccccatggtgcagtgtatagggtataataagtattcagcaaacatctatttaaaggtgaaacacatagtgacttctgggtgaagaatccctagaagagagggtagcttttgaaataggccctgaagaattggtcgaagtgacattagtgctgtgagtggcttgagccatttctggcaggaaagcaggtgcagcttgaaaatgtctagttctgttaagactagtggagcagaatgagtgtcagaatgaaaaaaaagcttggtaacaattcttgaagatctctaaggagttacttatatgactcagagactggcctccttaaaaaaatttttttaatgcctttatcaggaagaaaaagcaacaggcagaaactcactgtattagtcctttgccctcctttcctcttctgtctcttttcctataatgtaagccccaacatagggatttctgagtatcttcaagatgcaactctatgttagctattctccattgtaaagaagacaaaactagggttgctttatactgaggccacatttttggaatctgacagcttaaaaagcttcattgtgctaggtacagtctttagagtgtgatcaagccactgatgagttattctagtcttcagaagtcagtggaaagctggacacttcagaacacaaataaatgttgttgttttttctcctctctaatctcagagtaatacatctcattttttttctttttttattattcttttggtcctggaattttcttttctcagattgccataatagaaagaacaatggaatttaaaatcagttcaaattcttactgtgttatttctttctatcatcttgggtacagaagttctcatctctaagccttaagttcttgatctttataatcttattaaaaaatccatctcctgtgtagagcacctgcctgcctggcatttagttagtacatgtgccttttgctccttcctttcaaaacttcttttatttcagtattcccagtgttctttcttttatcttcactttatccctcacccaaacgtttacctatctattaaaatgttttcttgkgtcctttttctctatttcctaaaccagttattgattttttttttcctaaactccctttatttcacccagctatgcaaattgcgaggccagggatatgaccacaaacaattaaggtttaatttacatgaataagctttctttctgatgaaaatactatgtgtaacttctcacttgctctaacgcccacaaaatccccaccctatctggcacagatacactcaacatgcaatattaagcacaatttttattttatttttctccatagaatagtccgtcttcagtctttgactcagctccttacatgggctttggtgggggtcgtggggcagcacctgcaggtctaaatcagggtaggggtgttcaatccttgcgggcttcacaggatcggttcctgactactttgctgtgaattgcacaactcacacagtaatgtagcttcacatacagttcgggaagcaactaggcttcgaagatgcttgcttcagaaatgtccctgactgctgtggcctccactatgttcyraatgtcaaatttcttaatggccttgtccttgggcatgcattggttacagtttgtgctgagaataggctgcacgtggctgcascccttttttggtacaaccgttgttccctcttttctttgtcatcttggaggcgtgcaccagagagtgtgttttgttttttaatgtgttttggtatggacacatttggagataatttaatagaattttttttttgtatatttctgyattagtagtgaagtaatccaggtagaaaatgttctttaattggtctaggagtaaatcttggraaaaaaaattgaactctggaatagggcagggggtaaattcaaaatgaaagtctgttgctaattaagatttttttgtggaaaaaactattctataattaagacttttagagaattctaaccactttgtkctgacatgtgttaaatattttcagaagatggctgatccttggcaggaatgcatggattatgcagtaamcctagcaagacaagctggagaggtatgaattaaaattttgtcagccataatgtgatgggtgtgaagtgtgtggttgccttattaaataaaatatgtattttgttcagtctgcatttgttttccttttactaaacactttatagtgagcacttcaattttatatcattaaacgtcttgtgatcacagttgtgaagctaaaataggatgttagaatatataattctgtacctaaaaggtcataattattgaaggcttatgttataaacatttttataagaaattcttaagaatatctttttttttttagacggagtttcgctcttgttgcccaggctggagtgcaatggcatgacctcggctcaccacaacctctgcctgccgggttcaagcgattctcctgcctcagcctcctgagtagctgggattacaggcatgcgccaccatgcctggctagttttgtatttttagtagagatggggtttctccatgttggtcatgctggccttaaactcccgacctcaggtgatccgcctgcctcggcctcccaaagtgctgggattacaggtgtgagccaccgtgcccagccaagaatatctttaaggaatgttatttaaagtcagattgaatgttgtaaaccatttttgtgttttatctttttgtttgattgaaaattacttatgtttttctatttgcctaccaaaaaccctttttaggtggttcatgatgctcttaaaaatgaagtgaatgttatcctgaaaggttctccagttgatttggtaactgctactgaccaaaaagttgaaaaaatgcttatctcttccataaaggaaaagtatccatctcataggtatttttttatttccatttcaaatgataaaatgaaatctaagttggagttacttataccaggcaagcattttgattttagacacagaaattgactttagttagcttaagctgaaaagggatttatgttgtgggtgtgggctccttgggccagaaccatgggagggaggaggagtatctgagggaacacaggagctatggctgaggaggccactggtagcctcactcctgactctgatggtttgaatactttctaactaaccttttatctttacctcattagtttaagattacaaattctggacagggatatgcagtttctgagtttaggtgctttgcatatgctcaagctgacagggagtaggaaagaggaatatttggattccttcatagtaaaaggaatggttgggtgctgggaagctaacgtgacaaacgtctgccgttggcatgatttaaaagttcaatttcattctgtgtatcgtaaacttctttatatggtagagtggcagtagctctagaaagtctgagagaaaatcctgaaattagagctcttttacaggcacagaaatttaacagaaacattatcattctaaactgttagcactgtgattctggacttcttcctagtcatgtcattggccattcctggtgtttttagccattgagaagaaaaaatgtttaaagccgtggctaagtgtatttcttccgaataaaaatatttatagctaagagaaaaagagataaataaagatgatgatagtggttattaagacagttcggttttaaatgaaagaaaataaatagaaaagaaaacaggaaagaagaaaaccagtgaagtctagcaccatttatgggatttccataagatttagttagaaacaagttaccaagtgtagcttacactcaaggcaaggggtattaggctctgcctcttgatgggagtattagagagtgtctggacccatttttaaaatcatggcatttccttaatgatttmtcatctccaaaaactgctcttgtctggtgtgtgtgtgtgtgtgygcgcgcatgccatgcatatgccattacttattctggtattacattttataatttttttttttttgagacagagtcttgctctgtcactcaggctagagtgcagtggtgcgatctcagctcactgcaacctccacctcacgggttcaagcaattctcctgtctcagcctcctgagtagctgggactacaggtgcacgctacsacgcccagctaatttttgtatttttagtagagaggggtttcaccatattggtcaggctggtcttgaactcccgacctcaggggatccacccgctttggcctcctgaagtgctgggattacaggcatgagccaccatgcccagccacattttaaaattttgaattctgtaatttttcacatgactttactttcagtgaaataaaataaatcttccctctcactgttatcagtctttctagggacaaagaagcaacaatagaaaagtagggtgcagacttttatattttatacaagactgtgtagctaaggaaatgtcatggtttggaaattgttaataggagtgtgtccttcttgcttttagtttcactggtgaggaatctggcagctggggaaaaaggtgtcttaactgacaaccctacgtggatcattgaccctattgatggaacaactaagtttgtccataggtatgttttaaacattttagtacaattgctcttcgtatattacctggatagccctttagagtgctctgtgygggaacatacacattttagagaattgtgcactttgtttatgcatctttattctaagaaagkgtatctaaagtgaacagagcaaattgtactatgcagacttctcatcggatatggaggtaaagaaatattaatggtgtgatctttttatgtggagtagcatgccctgttcaccattcttttcttactcttggagccayataaaaatggaagcaaacaaccttgcttctttgagatcgagaaagaaactaatgaggtcactattggaatgctgtcaatacagaatgagttcagtccagaagagaaaacagggttaaaaattggaggagtgttaggttcaacaggcttaggcttgaattctggtgtttttaaattgactttgtgactttgggcaagttaatctttttaagcctcagttttaaaaaagaccatattaatgtcacctgtctaatagaattgtttattgatgggactctatgagtggtacatttatgtaagaacttagtatagtgcctggcacagagtttaagtatatgatatcactagaagaaagcctgatggaattgtgcatgtgagttaaaatgagtagccaactgtggtgggattccacatagatgttacttattttttttttaagacaaggtcacactctgtcacccaggctggagtacagtggcaagatcatggctcactgcagccttgaactcctgggctcaaagtatgctcccacctcagcctcccaagcagctgggactatgggtgcaagccaccacaccaagctagtttatttatttttgtagagatagggtctcactatgttgcccaggctggtctcaaatgcctggcctcaagcggtcctcccaccttggcctccgaaaatgctaggattacaggcttgggccaccacacccggcccatcagtgttacttttgaagttgccatgtagttgtacacatctgtactatgtacagaatagttaaaatctataaagttttgtagactttatatacatgatagtgttgtatcttttaaatgtggaaagatgcttatgatctaatgtaaaaggagaagattatatgatacagtgtgtatagtttgatcctatttttgttaaaataaaaactcatatttagaggtttttatttgtagtagttatgttgaccctattttgccttgatcttgactctcttgtgggtcagaaatttcaacctatgtgtttaaactgtcatgcaaccataaaaataatggtgaactgtctactattcagatgtgaagttacatgtttggtgttggaatagagacaagtaacagcaatcctgaacaacgcagtacctgtgtctaccaaggctccaggctgcaggaaaaatgatgaaaatagactcttctttttaagaattcactttaattttcttaaaatttacttttattttttgaaaagatattttcacagtcattagattatggcatttgatattcaaaagataggaaatggcatacagtagaaggtacccttgccacttctgtccccagtttctcaggacccatctctcaggtgaccattgttatccatttcttatgaatcctttccgagaggtttcatgcctgtaggagcatcttgtgtgaatgcatgtatgtgtgtataatatgtccccttycctatttacacaaggagttgtatacaatacacactgttctgcatcttagatattgcggggaggagggataagactgtttataggaaaaattttatgagaacttatattacaaaaagatgaattttagtaactatattaacaataagttctatcttggtaaacttgtgttttgtctttttttaagatttccttttgtagctgtttcgattggccttgttgtaaataagaaggtatgttgttttaaatgtatagttgattaaatgccttgctttcgttttctgggaaagagtaaatgtatcttcataataaatttagatgtctttattttcaattcatataactgcattattttgaatataagctacaggactgttaaaatgttcatgacacatttccagtgaagaaaatgtaatgctttctgagaagcagkggttgtaaggagaaaatgcacacaagtaactgaaagttcagtatttagccaccattgtatgtgtcagagagtgaaatgggataggagtttatgtgtgatctaaaatgcttcatggaaaacgtgggatttaagctgggaatgcttcaataggtatcagcgaaaagagccctttaaagaccaagaattagcaagggccaatgcatggtttgaaaatagcaagtgtattgtgggatcgacacattattgaatacttgtgtagaaagcccagcagagtaaaatccatagctattgcatttccttgctgtttggctgtttgtttggttaaacagtgaagatgtttgctactatcttacatccctgtcttcggggaatttttgatatgttygatcaacctgtacacaaaaacactaaagaaatttctgaaaataaaacacaaattaatacaaatggaggcttagccctagggttgtattaatcatgagaacgtccaaaaggagctaagtgagcattcagtctataatcagccctgtgctgtgtgctggtcctgccattgaactcacagctcagcacagagttggatgtgtgaacaggtaaagatgatatgtggtggaactattacaaaaaaatactgtgggaacacaggatgtcaccaatctgccaaaagtgggttgggaaaatctttataacagaagggggtcttagaagttggtcatgtgagttgatccttagaaaactagggctttgccagatggggggaaaaaaggaaaagaaaaaagaaaagcgttttaatccaaagaagagcttggagaagtcgaagaccatgatgtgtgcatggaacagtgagatggtcatggagagggaagcactggaagtggccggggcagaggttagtttggccttactgtaaggcacagtggccaatctatgtgagaaaatttagtttttgtttctaggtagttgggaaacagaagaggttttggagtggaaagtgacagataattctaacaatgtasagattatactggggtttgggtaattctgaactaagtagaggcagtgagaatagccaaggaaatgccagaattgggaagtgtttttaagattaaatttgaatgatgagatttatggggaagcaatgggaggtaattaggcaatgagtgattttgacctccttgatagagattctgcaagactaggttccaaagtatatgtttttatctatgattacggggttgatgggagccaaattattcataagttgaatttgtggactggaaaggccaacccgtatgaatatggagagctacaagggaaatggaagtaatggaagaaggaagaaaagcctgaagtacctaacttttaaggctgaggcagagaaggagtttctaaaatagtgactctgaaatggattggtgagtgaggtagaactgaaagagtaattctggaaacatggaggtacagaattaagtattaaataagggttgatgatggccagcagtctccaattcttcagacaatacatttggtcaggaaagttcactgatattctctgaggggctttcagaagaataagtgatcagggcagaagccaaattgtaatgtattaagaggagcacaggagatgcaattgtagactactcattggcagtaaagggaaaaggagggaataacattttgaaggttttgtaagggagggagaaacttggtgagaaggtatgagaagaaaaatccaagagaagaggtagcagttgatggagcagtttttcagagaatataagagagggtagaaatcctaacacaggaggtgtgttcaccttagaaaatggaaaaactctgtcttcttctggagcaggagggagagaggtaaggtgaatactattaactctggacatagatgaggtgagagtggaggattccagatctgttgaactctttctctgattaggctggaaagcatcctacagtatagccatttcaatctattattagtagtatatgatattttcttgtcatgatcttagaacaattcattgatttaatgttgaaaaatactcaggtttggtaaaggaaacttgtttttcttctgcagatagaatttggagttgtgtacagttgtgtggaagacaagaggtacactgtcaggaaaggaaaaggtgccttttataatggtcaaaaactacaggtttcacaagaaggtaggtttattctccaatttttagtgcaattgatattgtgtactcatattttattgttcttttaatatttacctatggaattccccagttgttaagtgattcataaactgtttattttctctttgttctgttatttcaacttcagttttgaatgtggagtggaaatagggaaagcaaatgtaattgagcaaacacttcaggctcagcattggatttggcgatggagataggaagatgattaagactggcttcctaccctcgtttgagttcatggtttatgtattagccattgtagctaaaattccttatagaattcctctgatctgatgccattgtgacaaattactggaaagtaatttggggaaaaaagtcaattaaagatggaatcacttataatgatacacatacattttacatgaactggatgattggcatttraagtcttcttcctctgtgacagctgtcgacctaaaagaagaaagctcaggcaaaattaatatagagagtttatttgggccaaggttgaggtctgcagcccaggacgcacttctaggttgtcttagagagtgctccagagaactaaggagaggctcaagtttttaaagaaaaaaggataaatcagaagaagaggtcatttctaatgcttttcaggaattttctttggtttaccagtatcacattaattagtgattggctatacattgttgaactatagagcatatggcattttatggctacttggcatcagttagtctagagcctgcatagcaagtggcttcaagaaacaattatttagctcaagggggagtgagactgactgctagtatactttaaatgcctctctgggcctgataatttaaaggggctgacattccacagaaaaaaagtctttttttttccttctttctcacagccgattgaagttttgagctacgtttcttccacaaactacatccaacattttccagtttgcactttgagattcttttaaatgcagcaagaatttaaagatgcttgcaaagcaatttgagttcagaatcttcctagacttttatttaatttttctcctcaatcacttaatttgagagcagatttttaggtcattttctttttattgaattctaaggccccaaagattggttgaggcgtcctagttttcgagatgttaacgtgaaaaaacgtgcatcttagaactgaaggaagcggggcttcttggcgcttctgaagggagaaagctgcacaaggatgccgccaggaatgctcgcacctcctaccgggatggcctgcgtaagacggggcggtctctgtgcgggtgtgsgggtgtgagccacggtrcccagggccagatcgcagaagtgaagctgggaggctggcctgcagactggggtgaggtcgccactccttcctttcaggctggagctactctgctagggtttaaaaacttgaaatgagaataaagggtagtatttacgagaaaatgagagagagtaaatcatatctaacctcctccagcctttttttttttttttttcataagagaccaaataaaacttacgcactctcctagctgtgattgcccttcagttacagagactgagagcrgagggagaccaggtctgagataacaaagcaactcattccttgaaggacattcacactgatgtcctattttcaaactatttgaaaattgcatcattctgcctccagtactggcagtttctctgttctgtgatcaatgtgattcacaggaacattttgttaaatgagccgagggtgtggaaaatatgacttttatattggtctgggattagctatgagctccagcattttcactggaggtagtttcatttggggaggggaaaaaaaaaggctttctgcgacttgccagaaaaggtcctctgagagcaggtcaaggtggccacgcatatcctaaagaatggttgtggtgggctagactgctgtcaatggcagctggcgaggtggccaactcagctgcatatgggtttgcaccggccacactggtgactccactaggaactctcagcgtcctagtaagtgctattctttcttcatactttctaaatgaaagatttaatccttacgggaaatttggatgtttgctaagtatttgaggatctacagttacgatcactcatcctccaaaagaagaggatattgagactaaataaaatatctcacaagctaggtgatccaggttttgtggactttgcaacacttgtggtcattatggccatgatattaatcttcctggtgggtccccaccagggacaacgatcttgtgtatgtagcaatttgcacatttgtgtatgtaacaaattggcacattttcagtctcctgggttaagagcytaggcagtgctatcagagagctgtttgctggaaagcctgcactgccacatcccctggcctrtgttctgctgctaagcctcattgtctgtgtgaacacatagattaattacctaaattgcgccctggatatatttaacacttccatcatgactccaatacattacatattctttacgacatcagtttttaaacttgttcagctattatttttaaggagtggcaagatatgcccattgatgatgtcactggtacttttgactggctttacaataatcgtggggatattcttgttgcatgcttttaagagtgtcagctttagtctagcaagtctgcctgtgtctcttcgaaaagacaaaaaagcaatgaatggcaatctctctaatatgtaagaagttcttaataataatgaagaaagcaaaagcttaatctgtggaatcaaactacacactggtgaaaatatctcctgaagaaatggaattctgacagctttttaagaaagatataattaaaaggttaatctgtaattctgttataaagtgaatgtgaatatcagaatatgtctgaaaaagcactgttctcaaataatgatctttaaagacaatccttttaaaggtttcactaatttgaactaagaaatcacttttctggtttttttgtttttttttttttggagacggagtctcactctgtcacccaggctggagtgcagtggaatgatctgggctcatggcaacttcygcctcccaagttcaagcgattctcctgctcagcctcctgagtagctgggactacaggcacgccggctaattttttgtatttttagtagagatggggtttcaccatgttagccaggatggtctcaatcccctgaccttgtgatccaccctccttggcctcccaaaatgttgggttcacaggcrtgagccaccgtgcccggctctacttttctgaaatttaaacaatggtagctcaccaaaatgaactcagtgcatgactaatttctattaacattgtattactgtagagatttttttacattttgaatccttatccaaaatctaacactgcttaaaatgacagttttaagtgtataaaaatgctttattttttcattggtgatgaaagtctgaaatgtacatttatttgtcatccccacttcattaatccctaatcatataggctttttgattttaataaagaacaaaattatcccaaaattatcctgtgatttaccttacctattataacaaaatataatacatatattttatagaaaagttaaaatataatatatattatatttatataaaaattataattatataaatataatatatataaaataggtaaggtaaatcagaggataatctatataaaataggtaaagtaaatcataggataatagaaatatgtatgaaccaaagaaatgtggtagctttcataraaacaactcttttcctttgcataattattcttcactttacaaagtattaaattatttaactattaaaagtartacagcaaaaagaataaaatgcctaggaatacagcygtcaagggaagtgaaggacctcctcaaggagaactacaaaccactgctcaaggaaatcagagaggacacaaacaaatggaaaaacattccatactcatggataggaagaatcaatatcattaaaatggccatactgatcaaagtaatttatagattcaatgctattcccattaaactaccattaacattcttcacagatttagaagaagctattttaaaattcacatggaaccaaaaaagaactcatatagccaagaaaatcctaagcaaaaataacaaagctagaggcatcatgctaccagacttcaaactacaaggcacaataactgaaacagtatggtactggtacaaaaagagacacatagaccaatggaacagaatagagaactcagaaataacactgcacatctacaatcatcaatcttcaacaaatctgtcaaaaacaagcaatggggaaaggattccctatttaataaaagctgctgggagaactggctagccatatgcagaaaattgaaactggacccttacaccttatacaaaaattaactccagatgggttaaaccaaaaactatgaaaaacctagaagaaagtctaggcaatactattcaggacataggcacgggcaaagatttcatgacraaatcgccaaaagcaattgcaacaaaagcaaaaattgacaaatggaatctaattaagctaaagagctgctgcacagcaaaagaaactatcatcaaagagaacaggcaacctacagagtgggagaaactttttgcaatctatccatctgacaaagttctaatattcagcatctacaaggagcttaaacaaatttacaagaaaaacacaaccccgtgaaaaagtgggcaaaggacatgaacagacacttctcaagagaagacattcatgaggccaaaaaacgtgaaagcaatctcaacatcactaatcattaaacaaatgtaaatcaaaacgacaatgagataccatctcacaccagtcagaatggcaattactgaaaagtcaaataacagatgctggcaaggttgtggagaaataggaacacttttacattgttggtgggaatgtaaattagttcaaccattgtagaagacagtgtggcaattcctcaaagatctagaaccagaaatactatttgacctagcaatcccattactgggtatagacccaaaggaatataaattattcagttacaaagatacatgcacacatatgttcattgcaacactattcacaatagtaaagacatggaatcaacccaaatgcctatcaaagatagaatggataaagaaaatatggtacatatatactatggaatactatgcagccataaaaaggaatgagatcatgtcctttgcagggacatggatgcagttggaagccattaccctcagcaaactaacgcaggaacagaaaaccaaacatttcatgttctcacttgtacatgggagctgaacaatgagaacacacagacacagggaggggaacaatacacacagggacctgtcggtcgggggtgagttgggggacaggagagcatcaggaaaagtagctaatgcatgctgggcttaatacctaggtgataggttgataggtgcagcaaaccactatggcacacatttacctatgtaacaaaccttcacatcctgcacatgtactctggaacttaaaattaattttaaaaagcagtacaacagttacaaaaatgctgacaaacacacctggtgaacatatatcttgtctgatgggaagaggtgaagtgtggggtgtcaagtgtgtcctgagctgcagtcaggatgtttcagaggaaaatggaaagccttggataatttgccagctttgtaaatggaagtgagagaagagctaccatgtaattttcatttttgttttctttcaaatctatatataagttcgctattgaatttagtttctaacatctacctttttgtgtttaagatatttgctcatttttcactacacgtatcatgcctgcaggcaaattggttatattctgtacatttggggaatggtctaaggagctggactctttttgatgcttataaaaagctgacttggaaataataagtttatcagttttaatattttaaaacttagaaatgaatttgataaaactaggaagagggataaacatgttatattttcttctgaataaaagtgtctttttttagaattctagttattaaaatctagtgattatttaaaacatttcctttttagatattaccaaatcactcttggtgaccgagctgggctattgcagaacatcagaaattgtaagaactattctttccaatatggaaaagctttcttgcattcctattcacggtgagctcttttcattttacacctaaagttctagatcatttaacatcttaaaataatatattttcctttagaaatgaaatattaatagaaatgggattggtaccataattctaattttgtaatgtagctttgaaatkttttctttgaaaataatttcaaacataacgaaaagttgtagaaataaaatagtgcaaagaacaattgccttttttaatagatttgcctgttgtgaatattttactccatttgctttatcatttaattattctttctcatcttctctctctctctgtrtgtgtgtgtgtgtgtgtgtgtgtgtgtacacacacatttttttctccctcattattttagagtatataatactgtgtttttttctgtaaccacagtacaattgacttcaaaaatatactttttgtctaatctaccatccatattcagtcttgtcagttttgtcagtagatctaataatatcctttataacatttgccttccactggtacaggattcagtttagggtgagcattacatttagatgtcatgtctctttagcctcctttgatctggaacatttccatagcctaagaaattactcatttcctttaagttttcaaattatttgcatagaggtctgcaaggtagaattttataaacaatttctggcttctccatatcaataattatttcccccttctcacttattttgtgtatttgtrctttttttctttgttcatgtttttagtcttgttacctagtggtttatcaaagacccagaattttgatttatttactgtttttctcttttccaccctattattttcatccttgtgctttytttttgtccactttgttttcttttttcccttttgagtagaaaattttaattctttgatatttattgataaaagtttttaggctatgaatttttatctgatcactgctttcagtatcttccatacattctatttattgttttcattataataagtatatttcataagttctgtaatttgtttgtagttcctttttcacccaagagtttaattcttaaattttcacaaggacagatagtcttagcctgttttctgttgcttataacagaatacctgaaactgagtaacgtataaagaaaaggaatttatttctttcagttatggaggctgagaagtccaaggtcgaggggctgcattaggtgagtgccttcttgctggtggggattctttgtagagtcctgaggtagcacagggcatcacatggtgagggagcagagcgtgctcrctcaggtctctcttcctgttcttataaagccatattcccatgataactcaataygtcttattcccatgagaactcaataaactactaatccatgaatggattaatccattcacaaaggcagagcccatacaacccaatcttctcttaaaggccccacctctcaatactgctactggagattaagtttcaacatgaactttgaaggagacaaacactcaaaccacagcattcacccctgacccccagaactcatgtctttctcacatacaaattcatacatttcattaccattatcctaaagtcttaactaacagttttacaagaatatcttagaattgcttattctgcataaattttctatttaatatgtagatacatatcttctttacttatggaaaatttccttgagatataattttaaatattattgcacttcggttatcattttcttcttcagagacaccaatatgaatattccatctccttgtgtcttccatttcagctgctttctctcagtctctttttcttttattgcttttcctgattttctttaagttttcttttgcatctgtgcccttttgggcaccttgtaatttattcttcattttgtccccatttctttcctgagttcacttatcctgtttttttttaaaaaaattttgtttcatttctgctttcagtctctatttcagatttaacaattttttttcatattcacaaccacaagtatttgaggccatttaactcagattgtattgatgtttcagttttcttctgcttcattattgttttttattttaaaagacagaatgttgttattttcttttgttgtgttacagcagcaatttaaaaaaaatttaagttacgggatacatttgctgaatgttcaggtttgttaacataggtatacatgtgccatggtgatttsctgcacctgtcatctaggttttaagccccgcatgcattaggtgtttgtcctaatgctctccctccccttatcccccactccctgacaggccccagtgtgtgatattcccctcccttgtccatgtgttctcactgttcacaatgttggttttctggagagacttcaaacaaaaagaaacccatttttattagcaatgtctgatgttttgcaggcttgtggggatgtgctctacttttttctattttgattcattttgttatcagggctccttggttcagagctctgtattttgtcagttctgcccttctgtgtagtttcctttatgatatcttttgagtggttgtggtaggcagggttggcttgtcttgcttatcattgatttctgcaggatccttaatttttcaatcttagtcccaacttttcyttgaatacttggtctccaagaggtaccacctcttctgtcttatctgattctcctccaaaatcacagtttccccgaggtagctggactgtgaattaccaagggctgatctgtgctcagtgtctttgcatttattgtctcacttatactcgtttctgagggtggttttttctgtgttccctgtgggtccttggctcctccctgctctccctcacaaagtcttttctgcctcttctcctccactccgtgtatccacaggctaggaatgctgtgttagaattagtttgtttgctctttcttctgcttacaggtagtttgagatttgtattttccgattcctagaaatgctgaaggaataggtcttgtgtgttttatttgtcctcctttttgattttatttaattttatttttcaggtgggtaatggggagtttcaaaatcagcatgccactattcctttctaaacctcagagtccttctgtaatcagtttcataaatgaagaaattaaaagcaaatatctatccttacttttatgtttacattttcaagaaaagctagagttttgargtctttaatatagttatgctatattaaatagaatttctgacctttattgtagttgtttgcattaaaaatcataaattttgttattcaacaaaatctgttaagttttgaataacagatattttactgcctactgtttctaccttttttccttttgaaaatatcatcactgagttataagagtcttaaacctgatcaaagatcatctaataatccagcctttttttgtaggtgagtcgactgaggctcagagaggtgatgtggttgccttagatcgaacagctgggtggaaatatgactagaatcctggctcccagatcatttatctttctccaatattggacttctcttaggagtcgggaccttaaaaatatagtttggccatgtacaaactaattttatactatacatctttgttctatatagtaatgagtaaagcaaaagagagagagcctctgtcaaatagctacagaacctcccagaatgatgtccttgagggaagggcaataaacttattgctacagtgtgctgtcttgaagcaaggactgtaaccatgggctataaaatggttatgttagtcataaaagagctgcaagaggtttacaattttaacctttaattttgctgttggataaagtaaaaactaatttttacttcaggattttttcagaagtrtaaccagggaaatattaccaaggagaagttctgacattgatttaagatcttttgcattcagctgcttctttagtttagcaatgtgatttcagagttacttatacaaaacaatgaaactaaagggagtcataatctgaatgaatgctttaaacaagcagaaacagtctaataggttcctgactaggaacaaatatttttaagacaacaattattgtggctcaatttcctttaatttttcaaaatttaattagatgaaatgtacctggtatatattttctggcatcatcttttgagaataattttgtcataaacatagctactttttattatgtatcttttatatggcaggcactcttttggtgctttacaaatattatttgtagttattgtaacagtgatctaaggcaaattggtatccctatttgatgacaagaaagctaaaactcaaagaagaaacttggtccagatttgtttttttgttttttgtgatggagtttcactcttgttgctcaggctggagtgcagtggtgtgatctcggctcactgcaacctccacctcctgggttcaagcaattctcctgcctcagcctcccaagtagctgggattacaggcatgtgccaccacactaggctaattttgtatttttagtagagacagggtttcaccatgttggccaggctgatctcaaacacctgacctcaggtgatccactctccttggcctcccaaagtgctgggattacaggcataagccaccatgcctggcccagattagggtttttaagcagctgagcatggaacaaactcaactctttgtgaccccaaacataggcttttttatgatataccctattagctgtataggaggatcagattaagataggattcagaaggcacattgtagaatctataccatagccttaattacctggtaatataagtaatctctttggtaatatttgctcacaaaatatatgctctagctgactacaagactccttgcctgagatcccatgatgtgcattagaagtgatggaagcaccactagttgctatcactgttgttctgctagcctaggattctctgaatagaatactaagggattacttgtagaagatcttggtctttgctttctataatatgagatatcagctatcacatatctcatatgaaaaggggagaaacacatctttctttataactgaaaaaatgccacaaaagctaatttgatttcatgcatttgggaaacaaacatcttggaaatttattgcacctcctagttctttcttaaattagatgtgcagcaaaaacataggcaggaaaaaattccaaatcaaagacattatatcattctaatcctttttttaaaaagtccctttgagatgaaggatgtacttaggtgcaatattttttacaatacaatacaaaataaataccacatttgtaatcaatttatcattactttttwaaaaaataaactgggaaagatcttggtaaatagaacccactgctttatttccagagctttaaacagtcacaaaaggagtttgaatagaaaccatttgcaattaacttgcagacataatgatctttttcttctaaaaacacatttcagtgtgtatttctttaataaaaaggaacattgtctaacacagccacagcacaattataaaagtcaggaaattaacattgatacataatctaatataaagactttattcaaattttgaaaaaaattttaacccaatgtccaatccagactcatacattgattgcatttagttctcatttctcttcagtttcctttaatttataacttgcttggtctttctttatcttttatgaccttgacatttttcaaaagtataggccaattatttcgtggtctatctcttgatttgaatttgtctagtttatttatgattacatttggattatgaatttttggcaggaatgtcacagaagtaatgttctgtacttctcagtgcatcatatcaggaggcacatggtatctttttgtcctattatgggtgatattaactttgattacttggtaatggtagatagatcattgtaaaaatgctattttttcctcactgtacttattatatatcttgtggagagatactttgataccaaaaatatcaaacttttacccattaattttaacatttattgatgatttttttttttgagatggagtcttgctctgttgcccaggctggagtgtagtggctcgatcttggctcactgcaagctctgcctcccaggttcacgccattcttctgcctcagcctcctgagtagctgggactacaggygcccgcaacaacgcctggctaattctttttaatatatatttttagtagagatggggtttcaccgtgttagccaggatggtctcggtctcctgaccttgtgatctgcccaccttggcctcccaaagtgctgggattacaggtgtgagccaccacgcccggctgatgattctttactgaataagttattactataattgctatcaagtagtatcttacttattcttacttatatcttacacattcatcttaccttgctgtattttcaaggaagaggtgctatgagaggaaaaacctgtagtaatctttcaagagaggcctaggtttgtgcagaacccaggtgggttgcaatccctttaggtctagatatgatgcacatccagttgggaatgatcaatatcatgatactttatgctccctagagattattgtgcattgtgtatgtgtgcatgtgtgtgtgtatctgtgtaaaataagctgtggttgccttgggtttaaaaaaatatgaatatatttgcatgctgttatagtagaattatagcattatttttagggctttttttctgcaaaattattgctttcatgtttatcttattaaattattgctttgtgaggattagttttgggatttatatagtatatcacgataactggattttatatatttttattttaagattaaataccatctttttttacatttattctctagattggttcaacttatctcaatcaacattcaaactgaagttaggaggaataccttacttgaaaggttattttttcaatctgccatttttgaatactatttttgaggatccagagtgttggaacagcagctactaatatgtgcattgcggcaagtggaggagcagaggcattttatgaaatgggaattcactgctgggatattgcagtarctgccattattgttactgaagctggtggcgtgctaatggatgttactggtaaaattatgagatagtgaatcatttttccctttacatctcttggactttcctctgtatatggagtttaaaaaaagtttgatacatatgatagcttggattttaagacaaacaggctatataattttgtgcaaaatcaaaataaacattakgagatagaggcaaggatgagaactaatggcaatatgggactgatagtgataaatggctaagccttttcaaatgtgagtaataggaactcctgaaaggctgttgagaaagcctagagagtcactgactctgaggcttgtattnagagttctttgaatgctgaccattgtgatagttgatgattgacttcagtcctccaccatcaccttctgtgttgggactagagaagttaaatatttgctttgagctgatggtgaaatttttgaagtgaagagtgaacctgggttcaaagaattcaccagtgatctgagagaaaggcaacaaagaaataaggaaatgggaaggatagtggtatgaaaattaattggagtcacattttctgtccatagattcttaaacagtaaagaggtaataacagtgtatatacacacacacacacacaaacaaagaaatagagaatagatgacattttcagactagcatgacttgagactccctctctcccccaccaaccttgccagtaaataccaaaaaactggtattttaaaaaacatatacttagaaactcagctatggattgccaaagcttaaacattgtagttatgtgacagtagatttttaaaagaaaactgaaagtattaaaatgtcgtgattgaccatagtgcacattgctgtacttgtttgatataaattatttttgtaccagatataactatttaccatacttgatttgttttaggtggaccattccatttaatgtcacggagaataattgctgcaaattgtacagcattagcagaaaggatagccaaagaaattcaggtagcaccttttcaatgagatgatgaagattaattacagcagcctcatagtcaatcacagttgcttttccccagatttgctgactcactgtggatacgtgtttcagatgtattatatgcttagtttaaattgtctttgtccagattaagaattttgaacttgtttcatattttactatggctaggtttgcaagaatagacatgatgtttacttcattgtttaaaaaaattgcatgtaagagctttaggaaaaatacacaaaaagtatagttgatgaaataagtataacatcaactgaaatagttagcaattttgcatttctgagtatcaatggtctgaaattttgacttgctatatatatgtatgcctagacactcgcttagaaagttacctatttggaaaaaaaaattgtttggtttcaaaagccatatttaaatttgtaaggatatattgagtacttcctagaccaaggtttttttctttgcagagaaacttttttgttttattcagtgctcatataacacctagcaccgtgcttgtcagttagcaatcaaaattaaacattgtaagaatgaatattttgaagtcatcaattcctagttattatatagagtagatacataatgagctcaccattctgtacttttgctgtatttttcatgatgatgtgaattttgaagtaaaaacagtctagttatattttgtatatttcacattaacatactgccagatagagttgcttattgtaggcatttctgcgataaatatattttccaaagcacttagttaaggtatgtattttaatttgctttaaactccctaagagagaagaaactgttcccaaaaagcactctcatcagatatctgatatatttagatacagtgtaacattttactcatttcaatagtcacatttcaaagatgttgatgctgatttatgttggcaaattatgcattattattaatattcaactatttggtttcctcccaaatccttatataatttcattgtaactggattccattcagcctttaagtaagagaatagatgacatttttcagacaagtatgacttgcaatttcctctgtctcacaccaacctggccagtaaataccaataaatatcttttttcttttttttttttttttgagacagggtctcactctgttgcccaggctggagtgcagtggcgcaatttcagctcaccacaacctctgcctcctgggttcaagtgattctcctgcctcagcctcctgagtaactgggactacaggtgtgcgccaccatgcccagctaatttttgtatttttagtagaggtggggtttcactatgttggccaggctgatctcaaactcctgacctcgtgatccacctgcctcggcctcccaaggtgctgggattacatgcatgagccaccacgcccagccaccaataaatatcttaatcatccttggccaacagaatggattttttttaaaaaatgtggtctaatcacatgaagaatgttctgtagcaatgaaaaaatagactccagttacacgcaataatgtggatgattgcaatctggctgaagctctaacttccaatggttctgcacattttgatatcaccaacgatatcctaataatttacagaagccaaattgtttctgctttgaacttaacctctcttcagtccttcccccttgcttgttttgttttaaaaaaaaatcccatgttgaaatgttctttgttcctttctttgtttcttttgctgacttttcttctctggtgataatacagttctgtagagtgctctccttggtggtttaccttctgactgtcaagtcactctgaggagacccatgcaagccccatgatttcaaccatcacatcctttctactgactccccagtcttgacctacagcccatatttcccatctgaattctccccctgcatctcctgcccatacttgatctgttcaatatatttctattttttgctcatgcttttctactactatactgcagcattcacctcggccctttcaaattagcacctaatatatttgagttttctctttccctagtcttcatatccaatttgtcataagtcatgtttcaattgtccaaccaaactggaacactagctcttcactggcctcctctgagccttttcagatgaccgtcattctgcccagaatagtctacactaataatagattacttttttatgattgtgaagtttactataagttacagtgattctcctttctctgggagttgaccccaacaaacaggactgtgctgactgtcaccacatctgtagatggtgtggctctgttccttgtttaattcaggaaaggatatctgacccaaaaggacaaattaaatttgctagggcatttgatattttgaacccaaagacagagattaggaaaaattgggaataattcaatgtgttataaagcactttaggtaagtaagcactggaaaagaagtaacaagcttctcagatggagctgggtatcagcattcaaccccagcaggctgcctgtttaagaagaatggaaatatgccataggtaatatgttcttacttccagtatgtcctatataataccttcatatcccttaggtagtttaagtaattcatgaaatattttccttgataaaatgttattaatgatatttagcatttgctgagcacaatgtaccatgcattatgctaaacacttgatactcatgatcatacttaaacctcacaataaccccaggaaacatcattatcctccttgtactgaggcaaatagatgttaattagcccaatttccctgctcagggtgacatagctaagcaatgacacttctgcagagacaccgctgaggtgcacagtcttaaccccctgcctagtggtcctcctgctggctgtacgttagaaccacctggggagcttatagataagccactgctggcatcccacctgagtgagtctgaccaggtctggagggtcacctggccatctgtattttttaagtttcccaggtgataccaagcagccagaattgagaaccattttgtttcctggatgtaacttttttttgtctttcagacaggatctcgctctgtctcccaggctggagtgcagcggcccaatcatggctcactgcagccttgacctcccaggcttaagcaatcctcccatctcagcttcctgagtagctgggactacaggcgtgagccaccacacctggcttttttgtttttatttactttttatagagatgtagtctctgtgttgcccaggctggtctcaaacttctgagcccaagcaatcctcgtgccttagcctcccaaagtgctgggattacaggcaaggaccactgtgtctggcttgatttcttaaaagtagccaattcacatacccacctactcatccacctccaggaaccttagagggtcttaggacacaacttgataccttaaaattaaaatgttgctttgctacctgatgagcctccttggatattattgtacctgccttttttaattcccacaaattaacactagatgacaaactacacataaggaatcatcttgtattaagtatttccatttctgaaacactatttttttcttcaaataacctcattagccaatatttgagtttagtaaaatagtattaaaaccaagggaatccttcataaattgaattactctgggtcgtgagttaactcacattcccttcagcagagccataggtgccctgtacacactatggcctggatttcagttgccttccaggttcagctgttaaaagatgttcattaatcacaaacatatagaaaataaaatacttgtcttttgttatcacatctgagaacacttttccacaaataatttcaatatccctgttaaakaattgaytcactaataaaaacatttgggagcttgtatctccaggggtacaaggcagggggcgcttagacactactatatgtccactttccttttcttttttcttagaaattgtgtttgcttgcatgatggagtaatggaggtggggtttgtgaggaacaatataagagaagtatacaattactatttatgttatgttgaggaaaaatgtaataacattatcattgatttagtttctcataactggcaacgtaccttcatatccctgacytcaaagtggcagcaacttgtctggtcacttcagagttggcagactcagggcagtgaggacctgtgcacctgtgcatggtgcttgagtttttcctaccacagcgttctccattctgaatttattttactaccttagagtttcaagtgttaaccccttaacatcattcatctgactttacacatgatgaaaggtgaggtgtgagggctgtagatgttcgaatactctttctaaatgcaaatcagtgatcaccagcttaatggctcctcagttttgggatgaagtctaaattccttaatatggattataaggtcatcaggcttgatcccccgctcctcatctcagggttttcacctccagcttcacgcactgacataaagttcagactggatttctttcagctgcagcagcattccttcctctgctgtgaaccttcacaacaagctgagattttttttttcgtttttgaggggtaagaggtaatacagtcctcccttggtgtctttgggggttagtcccaggacctctggttgatagcaaaatttgcagatgctcaaatgcccaatataaaatggtgtagtattgttatacccagacaagttagagaaaacgccacactttgagatgaattaagagtccgttatttaagccagcggccaaagagatggctaacgctcaaaattctctcggccttgaggaaggggcttgattaacttttataccttggtttaggaaggggaggggaactcaaatgcaataattctgcagaagtaaaaacatgcaagaatcaaagaaacaaatggttacagagagataaacaatttaaaagacaaatggttacaaaaaaacagtggaaccaggtgtggggctctaagtcctttattagagttagatatagatgctatgccggacacagtctcaaggctttatgttgttacctctttgagtaaaatcctgggaacttcttacattgtttgtttcagtacctcatcagtcaattgggctcctttgaaatgctgatctgcttacacaggttaactccttgaggaagggggttgggtaaggagcccttaatgtcttgtaaacatcaagaagccaaatggagtttgtccggctttcccagccaagagaaagtcttactcgtatgggaaaaacaaggctgggtaactaaggagacaagcagggaaaacttaaaagtaacgagttagagtaaaaacaaggttaggcattaccgtatttgcatatagtctataggtatcctcctttatactttaagtcatctctagattatttataatacccgtattagtccattctcacactgctatgaagaaatacccaagactgggtaatttataaaggaaagagctttaattgactcacagttctgcattgctagggaggcctcaggaaacttataatcatggcggaaggcaaaggagaagccggcaccttcttcacagggtggcaggatggagcgagtgcaagcaggggaaatgccagatgcatataaaaccatcagatctcatgagaactcactatcacgagaacagcataggggaaactgcccccgtgatccaattacctccacctggtcctacccttgacacgtgaggattatggagattacaattcaaggtgagatttgggtgggtacacagagctaaaccatatcaatacctaatactgaaactgcgtttgcaaaattatgactgagatagtgataaagatccatccaacttaaatgactccatcttgcctctaacctccaagctgtccttgttcattcctgggtataggcggaacttactttgggaggaaattagtttatagtttaaaacaaagacga

SEQ ID NO: 94175 - DNA, 18557 bp, Homo sapiens
tttcattgatcttttgtgctactttatttcaaaatctttaattctgctctgatttttattatcttttcttctactaattctgggtttggtttgctcttgcttttctagttctttaagatgcattgttaggtaatttgtttgaagtttttttttctttttcgatgtagatgcttttagttataaacttccctcttagtacttcttttgttgtatcccataggttttggcatgttgtgtttccattaacatttgtttcagaaaacttttcaatttcccccttaacctcttcattgacccactggtcattcaggagcatattaatttccatgtatttgtatagtttctaaaatttctccttttattgatttctacttttatttcattgtagtcagagaagatgcttgatattatttcaattttttgaatgttttaacacttgctttgtgacctaacatatgatctatccttgagaataattcatgtgctgaggaaaagaatgtgtattctgcagctgttggatgaaatgttctgtaaatatttatgaggtccatttggtctatagtgcacattaggtgtgatatttctttattgattctctgtctggaagatctctccagtgccaaaagtggggtgttggcgtctccagctattattggtctgtctctttagctctggtaatctttcctttatatatctgcgtgttccagtgttggatgcatatacatttgtaattgttatcctcttgctgagtcgatccccttatcattatataatgaccttctttgtctcttcttatagtttttgtcttgaaatctattttgtctgatgtaagtgtagctacttctgctcctttttagtttccattggtatggaatatctttttacatcatttttagtctgtatgtgtcttccataaatgaagtgtgtttcttctaagcgacagatcactgaatcttcattttatgtcttttgattggagagtttagtacatttacatccaatgttattactgataagtaatattcatgccattttattatttgttttctgattgttttgtggtcttctcttcgtcctttcttcttgtcttccttttagtaaaggtgattttctctggtggtatgatttaatttcttgctttttacttttgtgtctatttgttgtatgtttgtgatttgagttaccatgagattttccagcactattttataagccattattttaagcttatcactgttatcacaacctaatagtgcttgcataaacaagcaaaaagaaaactaataataactctatgccttaacttcatcccccacattttaactttttgttgtttctatttatatcttaatgtactatgcatcccttgaaaatttcttttagttattattttcaattggttgatcttttggtctatttagtataagactagtttacaaggctgggcgcggtggctcacgcctgtaatcccagcactttgggaagccgaggtgggtggatcacgaggtcaagagatcaagaccatcctgccaagagatcaagaccatcctggccaacatggtgaaaccccgtctctactaaaaatacaaaaattagctgggcgtggtggcgcatgcctgtagtcccagctacttgggaggctgaggcaggagaatcacttgaacctggaaaaaaaaaaaaaaaagagtagtttacaaatcacagttacagtgttttcatattctgtgtttttctgtgtacttactattaccaatgagttttggaccttcagatgatttcttattgctcattaatgtccttttctttcaaattgaagaactcgttagcatttcttgtagatcaggtcttgtgttgatgaaatcattcagcttttgtctgtctggggaagtctttatttcttcttcacatttgaaggatattttcacgatatgtattattctagagtaaatgttttcttttccttcagcactttacatatgtcatgccgctctctcctggcctgtaaggtttccattgaaaagtctgctgtgagacctattggagctccattttatgttatttgcttcttttctcttgctgctgttggaatctttcctttatgcttgacccttggtagtttgattattaaaagccttgaggtagttttctttgggttaaatctgcttggtgttctataaccttcttgtattaggattttgatatctttctctaggtttgggaagtttactgttattatccctttaaactttttactcctatctctttctctacctcctctttaaggccaataactcttagatttgcccctttggggctgttttctagatctcatagatgtgcttcattcttttttattattttttcttttgtcccttctgattgtgtattttcattttttatttctttatttttttatttgactattttcaaatagcctgtcttcaagctaattctttcttctgcttagtctattcttccgttaagagactctgatgcactcttcagtatatcaattacatttttcaccctgagaatttcttgattcttttaaattatttcaatccctttgttaaatgtatctgataggattctgaattccttctctgtgttatcttgaatttgagtttcctcaacacagctacttggtctctttaaatctattttctatctttatgctttcttctttcttccctggaaggatactattatgagctttcatacccttcggctagttacttctctctttcctctttcctttgggcccagggatggtgccagctacactgctgccagcctcaggctcctgcactatccctttttggttccatcacaccctatccaccataagttgttcctttgtaaataaaccctcctctaattattctaatttaagtgttccaactgttttatattgagtccttgactgatatgggaaaattggcagaatatgaatctcctagtaccatcactgaggtgtagaatactgaaagttattatggaagagttctgagatcttagcagtatagagcattgcacagtcttattcctccattatggagaagaaggggctatttggcatgtattttctgaatttgggagcatattttaatatagcaactcatgtttgctactgtttgaatgaagaaatttcactgagcattttttaatgagacactggtcaagagtgccaagcctgaaataatcataatgtattgtgccttagaagaagatgcaggccattttcaactcattttacttctctgcagcccttaaagggtaaacaagagcatgtcagggattcctgtggctccatatgaagggtcgtggagactagcagaagggcagaaaccatcagactgcagtttctccaggctaaacaatggaacatccaacctgaaaatgacgttgggatagtgtcccgatgaaatacggatttcattctagaaggagttcttttggtagcaaagataggcatgaagctgaacattgctccaagaaaaccaaacattgcttataagaaccatataatgttcacacaggtagccagtagcagatggcagagatacatttgactacttactaagtggtttcttcattctctctttgcttccttcataggagatgtatgagaatatgagactcaaagagagagaaaaaagggaaagttcatttttaaaaaaaaagataaaaagataagccctctcctttactgtaagcctctaggttcaaaaacaggtttagcttgagttaggacaggtggagaggaacatagtttaggaaaggaggctggaggcaaggagatgagtctagaatggactttgatatggaagctataaaagaagcaatcttgaatattgaaacaagagtatactattaaacaagaatgattggaaaattgtggagttggccacgaaactgttaagcaaaccgctactcaggagaaaggaagagttattagaaaaggaacacaagttcatgtttatacttcaactcttgagactcactgcaattcccttctgacaggaatttttttttgtcttatatatggtagagttaattgttctagaagcctacttcaagctaacttaagcaacaaagtgggatttattggaaagccgcttgggtgtctcacagaacccaaggaagagaattgagctggatttcacaggacctggaaaaccctcagaaactcaattgttctctctctttcttctctctccagtcagaaccttcaggaaggggagagtggctcatgggctgagtggataaaccacaaaatgggtaatatactataggtgagttttaagtgacaaatgaagtctaagctgttattgcactggtcggtgactgaaactgaaaatgggaattagaggttaagtggagggaatatgttgccaaaatgttagaaggatcttcttcaaagagaagttgaggctctagaggataatggtagggcacagagtggaggtgaagcttgtgaggggtgggggtcaatggggaggataggagagcattcctgattttgaggaggaaggatagagggttttactggtgaatgacgtgagtaagtgtcatgaccgctcgtattctcaggattcttcagtattgggagatgtgactgcagtggacagggcagtgtcagagagactagattttataatagaagcttttaaattacctacccatcaccaacttatcaggagactgacactgtccatctcctccaaaaaaaaaaactgacctgcccggcactttgatgtccaccagttgagctttatgtttatcaagaatagttgtgtaaacttccaaaactgtttatggcaggcacagtggctcacgcctgtaatcccagcactttgggagggtgatgtgggtagatgacttgaggtcaggagtttgagaccagcctggccaacgtggtgaaaccccatctctactaaaaatacaaaaaagaaattagccaggcgtggtagcgggcgcctgtaatcccagctactcaggaggctgaggcatgagaatcgcttgaacccaggaggcggaggtggcagtgagccgagatcatgccactgcactccagcctgggtaacagagcaagactgtctcaaaagaaaaaaaaactgtttatatcagttatatttgttattgtaatgatgaaatttatagacaaactaatgaaataggagtataaacataccagtattttttaaaaataagttgaatattttatgactacataaacaataatcttttaaaagtcactgtcaatttgatgactaggagtcagccatacaactataaaaggttttgagaaaactgtaaagatctaaatagaggctgcatttagtttttttccccacaagaacctttaggttctagacatttatttcaaataaatgtcaactcatctggatgtagcttatgcaagaaagacctagaagagctcttattatggacccccattcaatgaaaacacaatggccctttatttctctttcaacatgaggaggtggaagggctgttcaagcccttctgttcacgatagcccaggaggtccaggagagaggcgagccgtgggtgagcaggagtgtctggggagtgtcaactttccattgaaaaatacccctatgatcaagccatttcacttccgtggcaatcttatttatgtattcaccaaaattgggtgggagctagtgtttagctgtcatcgtccgtaggctgctgtgtttggctcatggcagggtgtgaaactggcatcagggagtgtttgccaagtgaataagggtgaggctgccctttccagagccgccgggagaaactctggatacagagaccctagcctggcgccagtcccagcgttcctcctagtcggggaggaatctgtgggtgggaggtggggagcctgaaacccaaatacaacagccactctgggctgggcgtggttccctgggagctgggtctcagatccttttaaagctgatttctccccggatctccgggcaagatgggcaagtacacggtccgcgtagccaccggggatttgctcctggcgggctctcccaacctgstgcagctatggctggtgggcgagcacggggaggcagacctagggaagcagctgccaccggtgtggggaaaggtgagcgcggactgcggtgagagctggggccctgggactcagaggtgtcactgggggccggggccattcggagggtgctgctgccccacccatgagaaacctgggaagcggggtaggggctgaggtcgggtgcacttggtgcgcctgataggaaaagcgagaggaacaggagagatgagaggcattttcctgcccgagcggaaggacagagacgcccgctggggtgggcacggcaggcccggggggaggctggcgccccgcagtaccagctgctcctcctcacctccacctctccccggctgtgctgtggaggggaaacggagccaggattctctgaaggttcaccgaccccgccgtcctccctraagaccccaaaacctgagctgtgtactgtcgcgcaggaggcagagtttgagatcgacgtccccctgcacctggggcgcctcctgatggtgaagctgcgcaaacacaacgtgctgttgagtctcgactggttctgcaagtggatctcagtgcagggcccggggacccaaggcgmggcctttttcccctgctaccgctgggtgcagggccacggaaytatctgcctgcctgagggtactggtgagctcggtggagaaggggcacagcccctggcaggctggaggaagaagcgggtggggggaggctactgtaaaagagggaaaatgagagatgagggagatggggagaagtgaagggggagggtggctgatggggagacccgagcgcggaggggtgaccagggagggcatgtgctcttgtccctctcccccagcccggaccgtgagtgatgacccccagaacctgtttaagaaatatcgggaacaggagctcgaggaaagaaggaaggtgtaccgttgagccccaggaagtctttgatcccctaccagatcccaagaaacctgccacctgcctccttacccctacctgtgtgttcttcctccaggtggggctcctggaaagatgggttaatcctgcctatagcagggaataggcaaccggaccttcctagggacgagcgattcctcgaggataaggatttagactttaatgtctccctagcaaaagggtgagtaccaggtagaggctgggcacttgcttcctagggcacaaggtgggatkcttccttgatcttcttgcactccattctttccacaggttgaaggrcttggccattaaggggacactggatttcataaattgtgtgaaaaggctggaagatttcaaaaaaatattcccacatggaaagactgtcctggctggtcagttttcacaacctcccaaaaccaatatacagacttccaacccagggatttgaaaaaggagggggatggaggattagatcagtgggattaggagttcggagctcagarctcacagggtgctccccaattgatgttcctagagcgggtttatgattcttggaagaatgatgccttctttgggtaccagtttctcaatggtgcaaaccccatgctcctgaggtgttyttcaaggctcccagcctgcctggtgctgcctccagggatggaagacttgaagacccagctggagaaagaactccaggtgctgctgggctttytgcccatccaccatcccagccattacccccacctcccttytcctcccatytccagccccttctctcatctcctccatctacacccaaggtttytcaacgttggcactattaacattytgcaccacataattytytgttggctggcggggggggggggggggggctttcctgtggatcgtagggkgtttagtagcattcctggcctctacccattgatgccagcagcatccccccggttgtgacaaccaaaaatgtgtctagatagtgctgaatgtcctggggttggggaraggaggaattgcccctgattgaraacattgatctacaacatctcctcctgtatcttcttttctttctccacattcctctcttcyttcttcattgaacatatatcagccttagggaaaagcgcaagcttctggagagaaatagcaagaaaaactaaacaaagccttggaragctaaaagctgaatctgtttttggggggagatgggtagctaaaggaaatatttttgctacattggctaaagctggcagaagaggggatacgtgaagaatgcagtggccttatgtggtggaaaaccagaaacttcgctgcagggagctccaagtctgaaggaaracatcastcatgaaaactttgcattcagttttttggttctgcagaaagtgattggtgtttaaagtaaaaaagacttgggtgggtagaggaaggatccaccctggaaaatgagagaagggcagctccagaaacaactccaaccctgttttctattcctgcccctggccctgtaggctggatctctgtttgaagtggatttctccttgctggatggagtcaagcctaatgtcatcatttttaagcagcaatgcgtggcagcccctttggtcatgctgaagcttcagcctgatggaggactcttacccatggtcatccaggtgagagggcccaggtatttttctaccagacactgatctcctttagggacttagatacacaagttctcagcccccactctctctcctgctctagctccagccaccttgacacggatgtcccccacctctgctctttctgccctcgcatccccccatggcctggctcctggccaagacctgggtccggagctctgatttccagctgcagcagttacagtcacatctgctgaggggacacttgattgctgaggttattgctgtggctacaatgagaagcttgcctagcctccatcctatctacaaggtacttcagcatctctgtcattctgtatctgactgtccttcatatttcagactcctacaaagagtctaaccttgtacatttcagtctagcagcaatcaatttatatgtggagacacatacacagatacatacacacacgcrtacacatacacagtaatatggaaacacccaggacacacacttactatgagttggggggagaagtgagaataggttttgcaaaggagttgaaattttggctgaggaggtttccaggtgggcaagtgaggggtggaacattacagccacaaagatctaaagaggcgaggaaagaagggaacatggataatggctgagattgggtgagattaaagtgtagggcatgagttgggatgaggaggaagaagaagtgggaggagatgagagaagaagccatgttacttagcggggagaagaatcaagagttattttctgaccatgtggggcttccaatgcctataaagacccatttgcacatgtcaggagggcaactggatatgtgagtctggagttcctagaagaggtgtaggttgaaaatacagattttagagtcattagaaaacaaaagtatcaaagtcattgtactggatgaagttctctagggtttgtagagaatttgaccgagatataactctagggtgaaccaacatttacagactgagagaagggagcagagtgagaaaagaaacaagaraaggaacctcattgaggtaggaggaaaatcaaaaagtgcaatccatggcagccaggaaaagaaagcgtttcaagagggacgcgtgattatctgtctcaagtgctgctgagagatcaagaaagttacagagaagtgacatttggatttctcaatatggaagtcattggttaataaatggacatgcgccatctcagggaagtggaggaagcctgattcatgggggtgagcagcaaatgtgaggtgggtaagcaaagacaacactgagtgaagatttgctgtgaaagggaaagcaagaaacagggagatggcaagacaaggatgtgggggtcaagcacaggttttctttagggtatccaatattgcacatgtttgtatgacagagagaggagaaggaatataattataggagggtgaaggcaaaaagggatgggctcatatgtgggtacctgcgaggatatgggatttttagaattcttccaaggacatgaaactgtggaaataagtgaactcctaaaactttcaccacgggatgctctgagaagacattttcccatctctatattcccaaatgttaccctgacccactccaatttaacgagaagtctctccatttcataaagacccatcctctcccttcttttctgtcacttcctttaacatcctcttccctcatggatgctgggaactctcttatttgaccatgtcccatttctttcttccataatcagctcctgatcccccacttccgctacaccatggcgatcaacacgctggcccagagtagtcttgtctccgaatggggaatttttgacctggtatggaaatggatgggtgaaggggaggatggttcaatattggaagaatcctaggggttgtttccctttcccattcctcccccaagctctccttcctccatggaaggcctctcccaaacctgcctcatgcctgaagagcttcctgcttaaaagggctagagtaggatcataggcctggagtttcctgatactcatctccctccctctgcaacttggcatggctgtgggttatcctcaggtggtgagcactggtagtggaagccacgtggacattcttcagagagccatggcttgtttgacctatcattccctctgtcctcctgatgacctggctgaccgtgggctcctggatgtgaaatcttctttttatggctaagatgccatcaggctgtggggaatcatcagccggtaggtgaaggtggcacagagaggcaatgaacggaggggcgggggactgtaggtccagaaggtcctgcattggcccctgagactgagtgtcttcttcccagggaataggtacrtggaggggatggttgggcttttctacaatagtgaccaagccatgaaggatgatctagagctgcagrcctggtgcagagagatgactgagactggactgcagagrgcccaagaccaggggtgagacatggatccytccccactgaaccctgtcaacaccyactccyctgcaaacaatctgcttcttctcacatcatcatgagacaccccacctgcccaaggaagctgagaattctccagagtgtgtccagaaatgctaacaagcactcctgatctccccagccctgttcctacacagtgttctctctcctctgcactaagagcttcctctggaactagatacaaaacttctcttaggtattttccctcactcttccctcccctctccccatagctcaaggttcatcccamgtgcattaacctttgagcacacacaaggtgggagtcctagggtgtgcaggccagaaccacagaaaagttcttttctgtatctccacatagctttccctgcstgagacctatttcgtgttctggtttcgagatctctgattctcatttcaccaggattctcatttcaccaggttcctcatctccttagagtcccgggctcagctctgccactttgtcaccatgtgcatcttcacatgcacaggtcagcatgcttctaaccacctgggccaggtaaccyatgtgatcatcccacaasggctcctgggatggagaagtgggggatcaaatgcccaggtcatcagcctgcatttctctgggctctcctccctgcagctggactggtacycctggatccctaatggcccatgcaccatgcagaagcccccrcccrtctctaaggatgtgacagagaaggatmtagtggacttactgcccaatctccaccaggcacgtatgcaaaagaccttcacaaagttccttggcagacgccagcctgtcatggtgagaagcaaatgcctgggtcctgggaaggaggcagctcaaaggaggggaagtattcygggctgagagtcccaaggggctgagccaacttgtcttctgcctctcagcatgaggagaaatatttctctggtcctgagccccaagctgtgctgagacaattccaggaggaactggcttccatggacaaggagattgaggtccggaatgcagtcctggacctgccctgtgagtacctttgacccagcatggtagagaacagcgtgaccatctgagaggccttgcccgcctcagctccaaagctccaccatccstgagtgcctttgagtattccgtcctcctcacatcctctggtgaacaaattgtccccaaagctttgtggtcagggtatccagagctgctcaccacacaactatggggaatacacagtgatggtccccattgcatttggaagtggcatcccccaaagctgccctaccttaaatgtccatccagtcctgcacttcctcaccccgatccctgcacacctcctcattgccaaaggacctggcttagatacaagtaaaaatatatgattaaataacaaaacggattatatgtgtggtggtggaaggtgggaggagagaccttgctttgtttcctgcccctttattcagattccaaagaaggaaagaaaagttttcctggaatgaaaattttttctagcaatcaatgctttttccaagggtatcttggaacctctctaagttaaatgacaagtgttctggatgactgagtccactggggctaagaaacctggctcttgacaagggtttttggcttgaggcctctctgaatcctcaataagccatcccttaggctacctgcagcaacgcctctggtgcaactcccagcacagccctcctgcatgatccctccccagctgcatcccagccttcctctcagtcctgtcccaggactcttgataaaccctcttctcatcatgctctatccttgcatccttaaaacataccatctagcccacagtcctagatactggagataaatggataaagaaggaactagtaggccagactctatgttagaaattttaaatatataatctcaatttatcacaccgggcacagtggctcatgcccgtaatcccagcactttgggaggcccaggggggcagatcatctgaggttgggagttcgagaccagcctgaccgacttggtgaaaccccttctctactaaaaatacaaaactagccaggtgtggtggcaggtgcctgtaatcccagctacttgggaggctgaggcaggagaatcacttgaacccaggaggcagaggttgcagtgagccgagattgcaccattgcactccagcctatacagcaaagagtgaaactcggtctcaaaaaaaaaaaaatttatcctcacaacttctctgtgaggttggtatcactatcaccatcttataacaggaaaatgaaggttggagagataagggcagaaatgacctgggaccaaaatgcagcagagtcagattccatttgctagaaggaagcaaagcccaggattgtggtcatagcaataacagttaaaagactgatcataaaatctagaggccaatgaaagcctcggatggatctgatgtaatgggaaaaaaaggagagataaagattctttgagtcttttaaagaatcttatgcattcaaattacttatgtcccatatatttttaaaaggaacatatacaatacggttaatacggtagaaatagacatgtgtgagccatccagattcacctactgatgccctcaaccttctaatgtcccgtcctgttctgtgtattgcttccgtccatcatatgacttttttcagtagatgacgaaagaattttaagatagccacagaccatagactcacagaatctgacttggttgctagaagtttttgtggttgcatggaatggtagcaaggagagtcagaagagagggaggggatgaggaagaggcagaggtcacgctgaggttttcagttgcggcacaactggcgagaaatacaaagattcagaaggaaggttgtttaagtttgatgtaatactgtggttcttatgggaagaaattaaacaggtaattggagaggctgaactgaaaaaagaaaggaggtgagttctggctgggcgcggtggctcacgcctgtaatcccagcactttggaaggccaaggtgggcggatcacgaggtcaggagatggagaccatcctggctaacatggtgaaaccccgtctctacttaaaaaaaatacaaaaaattagccgggcgtggtggcgggaggctgaggcatgagaatggcgtgaaccgggaggcggagcttgcagtgagccgagatcgagccactgcactccagcctgggcgacagagagaaactccgtctcaagagaaaaaaaaaaaaatggaggtgagttctacagtttggatgacttaggagctgaatttatgaacaagggaaaaagaagaggcagagggccaaggtgtccttggccctaacaagaattagggatataaaaaagaacatgaggccaggaacggtggctcatgcctgtaatcccagcactttgggaggccgacttaggtggatcacctgaggtcaggagttcaagaccagcctgaccaacaaggtgaaaccccatctctactaaaagtacaaaaattagctgggcgtggtggcacgtgcctgtagtcccagctactcgggaggctgagacaggagaattgcttgaacccaggagttggaggttgcagtgagccgagatcgcaccactgcactccagcctgggcgatggagcgaaacttgtctcaaaaaaagaaaaaagaaaatgaagccaggaagtgagaatgatcctagtttgaaaggtaagaagaaaagctggatgatgcaggtcacggaagccctgtcatcacttcctatgactgggttgtctccctgagctctctcattttcttttttcttttttctttttttctgaaatggagtttcactcttgttgcccaggctggagtgcagcggcacgatcttggcttaccgcaacctccgcctcccaggttcaagcaattctcctgccttagcctcccaaatagctgagattacaggcatgtgccaccaagcctggctaatttttgtatttttagtagggatgaggtttcatcatattggtcaggctggtctcaaactcctgacctcaggtgacccacccgcctcggcctcccacagtgctgggattacatacaggtgtgagccaccrcacccagcggctctcccattttctagatgtgtcacctcactcccattttcctccccaatctactccccatcctcgtgtgtttcctcagcaagtgtccccatctctgcacagcacagtcatatcctcagtccagctttcaaattctcccacctcatctctcaggagggtctgatataacgactcttttactcagataatctgttcaggcacctgtgcctatgagaggcttactgtgatctctgaatctatgtttgtggtaatcctacgtggactgctcacctctagatgtcttatgaaatcacctccccttatttctacaacaggctcaaattgccttcgggaatcattaaagctcagtgttctggctttgattggtccttcgctccctagtccgcctgcactcatgtagggtcatgctattacaaaactccacagggtaccatttatgttgtattccatgtggaaggtgtcctctggagtttggcaatatagcagctgtctgtaaaaatgatattgaaagcatcctgagttctggagctgcgccgattctattaggctgagaaccccagtttcaagttcatctcttcatttttctctcattccatttcacagcggcttaacagcaggtcctttgtattcgtttctggcccatagagggatctttattcaaaatcacagggttgtctctaaatttctgctaagctaatgaatggtgttagtatgttctcttctccagggcagaggcagagttttttttttttttaattagccaaaagcaacattacacaataaatcacatatcattgtagaagagaagagttaactattataactaaaagataaaatgccatggcattcaggcaacggtggattagaagtacttcgaacctatcagttctgtaaagcctagcttaagtctgttggtctaactttctaactagacttaccttcctttagaaaatatttgatgtgcagagagctagactgaggatctagcagtcacagatcaccttaattcaatcaggaactaagattatttgatgctgggttttaacccctttaaggcctgaatttccaccccacctttactgctagggtgcagctctttgaggtcccaacccaaagtgggtgagaaagagacagagagagagatacagggatggtcgagaatccttcaaagacaacatcagccacagattaaagagaaatcttcaatgtggagaaaaatctcattactttcacatgggcatcaataatacaggtagcattttctcaaatgaaacattagctgccagagacaatgaataatcttggaagtgttgaaagaaaatacctgccagactagaataaagactttctacaaatcagtaagaagaaataggcagttcaataaaaaatggacaaaaggcctggcacagtggctcatgcctgtaatcccagcactttgggaggccgaggcaggcagatcatgaggtcaggagatcgagatcatcctggccaacatggtaaaaccccgtccctaccaaaaaaaaaawaataataattagctgggcatggtgatgtgtgcctataatcccagctgctcgggaggctgaggcaggaaaatcgcttgaacccaggaagcagaggttgcagtgagccgagatcgcgccactgcactccggcctggtgacagagcgagactccatctcaaaaaagaaaaaaatatactcaagacttaaacatacatttctcatggggacatccaaatgtcagtaaatatacggaaaggattatatttgatgattctatttgtcagtttaatatcacatcaacttttatggtatctggaggaattgatcccattctgggtaagtctgatgcccgtatggctcaattcgttgcttgtatctctggctttggttactgctccagagaattgcctgattccatactgcatgaagttttaagatatttgaatactagagaaatttccaaacctagcaaaagggtcctgtattatacaaatcttacagaaatctccaaggcctctcatcacatctccaggagatctacatctgtgtctcttatatgtggccaaagaggctatccttgactaactctgggtcactgggatgcctattttccccataccaccttattatttggatactttaccagaacgggtaggaagtctgctggtcagatatagatcatagttatcacagtcaacagcagtctatgtggattcttggtggcatttgacacagccactttcactttgcttaaatacttttatctcttactttctatgacatcatagtctcctggttgtccactttccttaatggttctctgccatgcaggtacccattccagggagtccctggttcccaaagtcatcctgattttcactcacaagctacccttaatatttaaacaaataggctggaaactctgtctctaggcttttgggaagggcccataggagaatgactgggtttctcattaattgattagaaggtacattgttaaggtaacagctgctgtaacaaatcagcccaaataaataatggttcaaagacaatagttgttcttttgtttcactcctgataaatttaaaacaatggttcctaattggtgcgtagtcctccttcactaagttagggactcaggctcccttcatcttgtggctctgcatatttaacatgtggtcaccatacttaagaacatttaggtagcaaaataagagagaacataaaagatgacatgtgtgatatttttatgggacacacacatagcaatcagaatccctggcaggaaacagttggcataatcaaagtcagtgtttgtttgtaaatctcttttattttctctaccataaaaattgctattgttattttatattgatatggattattgttatatttttattgtgaattattccctctagccttcaaaaggctgggcgtggtggctcatgcctgtgatcccagcactatgggaggccgaggcgggcagatcacgaggttaagagatcgagaccatcctggccaacacggtgaaaccccgtctctactaaaaatacaaaaattagcttggcatggtggcacgtgcctgtagtcccagttactcgggaggctgaggcaggagaattgcttcaaacccgagaggcggaggttgcagtgagctgagatcacgccactatactccagcctgggcgacagagcgagattccatctcaaaaaaaaaaaaaaaaaaaaacacgtagccttgctttctgctctgaattctataatgtctaattttttttt

SEQ ID NO: 94176 - DNA, 13298 bp, Homo sapiens
  misc_feature (1)...(13298): n = A,T,C or G
gagctcaaagtctttgtaacactgtatacaaggaattcaccccaaacatattacctgcacagactttgattttttttaacccaatctataggctttccttgctcaacccattccagaaaccataagaaatactatttaaatattacataaaactgtaacttacataactttcaaacacacttttgaaaaaataaaataaaaataaaaactttaaaaaccacttttttactatttggagacagtgtgttgctctgtcacccaggctggagtgcagtggcacaatcaccgctcactgcagcctcgacctcccagactcaaacgattctcctgcctcagcctccccaagtgctgcaattaccgatgtgagccaccacgcctgcctctagtcttagaaacaactgttcaaattctcgttacattcatttttggtagaaaattttacctttttattaaaatcaaaagcgagaaattttaaaagaaaaacactaaaaacgggaaacaaacttaaaagttttaaaaataaaacattcaaagccagtatatattttttgtctttactgtctgtgtccatttattctttagataaattatcttacacatctgatacagttaagtctcaaagtattcttttttttttttgagatggagtctcgctctgtcgccaggctgcagtgcagtggtgccatctcgctcactgcaacctccacctccccggttcaagcaattctcctgcctcagcctcccaagtagctgggactacaggcactcaccaccatgcccggctaatttttgtatttttagtagagacggggtttcatcatgttggccaggatggtctcgatctcctgacctcgtgatccacctgcctaggcctcccaaagtgctgggattacaggcgtgagccaccacgcctggctgtgttcttcttatatagttaataaatagccaggaatcattttcttttttcatttatgagacagggtctcgctgatgcccaggctaaagtgcggtcacatgatcacaattcactgcagccttgacctcatgggctcaagcatcctccagcctcggcctcccgagtagctgccactataggcacataccaccaggcctggctgattttttttaaatgttagtagtaacaaactctcactatgttgcccaggctggtcttgaactcctggcctcaatcgagtctcagcctcctaaaatgctagattacaggcataagccaccccacctggccataaacactcttttaaagagttttgtcaggccagcctggccaacatggtgaaacccccgtctctactaaaaataaaaacattaaccgggcatggtagtaggcgcctgtaatccaagctactcgggaggctgaggcagaatggcttgcaaccaggaggtggaggttgcagtgagctgagatcgtgccactgcactccagcctgggtgactgagcaagactctgtatcaaaaaaaaaagttttgtctacatagttctcaacatatggcagtctggggacatttttagttgatgcatccagcaagaagagatagtggggacatgcgctggggctctgcagtgctacctgcatatactggtagaggtcagggatgttgctaaacatcccacaatgcacaggagagccactcaacaaagaactatctgcccaaaatgtcagtagtgccaaggttaaaaaatccatggtctacagaaatcaaaagacttacttttagagatttacaactacttctattacagaataatctagatcaagctagatcaagtacattaaaattttaaaggaaaatagacacaaaaatctatttaaatgatgagggaaaacttaatgtactatatagtaattttcacgaaaccaatttgtttatgccatagatttaaacatgccctatgagactagaaaatgttggccaggtgcagtagctcactcctgtaatcccagcaatttgggaagtcgaggcgggtggatcacctgaggtcgggagttcaagaccagcctgaccaacatggagaaacctcgcctctacttaaaatacaaaattagccagccatggtggtgcatgcctataatcccagctactcaggaggccgaggcaggagaattgcttgaatccaggaggcggaggttggggtgagccaagatcgcgccattgcactccagcctgggcaacaaaagcaaaactccgtctcaaaaaaaaaaaaagaaaagaaaagaaaagaaaatgttaccaaagtgcaattacaacatgaaaaaccaacaggtgccatatagcataagaccaacaagagagtgcactgatttaagggtgttttatttcattaagtttcaaattttaaaatatttggtatattgaaattcaagtaaatctggctgggtgtggtggctcatgcctgtaaccccagcactttgggaggttgaggcaggcggatcacttgaagttaggagttcaagaccagcctggccaacatggtgaaacgtcgtctctactaaaaatacaaaaattagctgggcgtggtggcgggcacctgtaatcccagctactcaggaggctaaggcggcagaatctctagaacctgggaggcagaggttgtggtgagctgagatcgcaccactgcactccagtctgggcgagacagcgagattccttcttaaaagaaaaaaaaaaaaacatgaaagaaagaaattcaagtacatcttaaagttaattataggtaacacttatttcaatgagtttaaactagcaaattaaactgtgtttaaatcctttaaccagtaatacaaaccaggctcgattttttaaattaattaaaagcatgcctatccttagcaagtcatgacagcgtgggacaatatgaacacaagcagacctagatccaaatcccaggctctgtgattgcagacaaataatttaacttctctaaatctctattttctcatctaggaaataggacatctaaagaactgtgcttaagaattagcaataacgtaaaaacaaatgatactaagaacaactagccattctacaaatggcagctagttattaacagcagcaataactaatagtaaataataaaacttatgaataaaacattgattatgggtttatatcctcacaattaataatttacttatgtaatcctactcataaaataactaattataaaatgtactttacatcaatattccatgcctaacaactttggaatattatttaaaactacttaaaattcacactcatatttaaaaacaaacatctaaaacaaagaaaataaatattaattaataaaaagaaacatctgacaaatttccaaacactgtcttaagggaaagaggccaaatgatgcctttaagtaaatcacatttgtatgacacaaaattcaaaaaatatctataccccagacacccaactctctacacagaaagcaatcaattttaccaatttctcatgaaaccttttacccatacaggcaaatacacacatgcccttctttttgacacaaatggtggcctcttccacactattctgcaccttgctttttcacatttatcttgttggctgtattttaacacactctaagaacggccacttataatctctcataaccagaatccagtaagcgtcagctatctttacaaaggctcttataaggccaccccaaaaagtccttaaatcaaccagtgttcttagtaaacacaagcatacaaacacatgaaataaacttcggtaaagtgctgatttaccaaaaaagtgacatgatgaaacatttatttgatcagccattcaaaagactgtatttacacccttaaaaaggaaacacatggactatactacaagtcttcaatgagttgaaaataacaatacacttatagaactggggctactaaaatatcaaaaaatactggtgaaaataagctatttattggttatatttattccaagattaaatgatgtgaccctttcctaaatgttctttccaacttattttcccagaagtttccttccatatttatacaggtactgttctaaacaaaacaaaacaaaacaaacaaacaacaaaaacaacaaaaaacctgtctgtttgcatttcctgttttcttcttctgaaacacttttgatgcttatctgaagtaaggcttcaacatcccttacgtataaagagcagtgtttttttaatatgcattactagagagcaatacaagtatttctggtaatcttcaacttagtactaagaataccacggtgaaaagtcagctcataaaaagcaaagagaccacattaattaccagagcagtaacttactgtttctgttaccgtaagtaacagaaaataaagcattaaaagtctattaagtttcaggcttgtacaaccttattaaacaagaaatgttttcagttgttggcaacaacaactgctttcattaggagtatatatgtcaactaacctggaatacattttcatattaaataagttaaaattgctgtttcattgtatcagtacagacacttatgactctatttctgcattgtaccacaaaatacaaagtcatccttccattcagagttttggcatatgaacaaacatagaggtcagagttcatacacatgctctgtaaaaccgaccatgacttatatactactttcaataagtctgttgtcatttttgaattttaaataattttttctccatgtatactcatcacatacttagaatgctgaatttcacaaattattattgacactattaaagtactaactgtaaaagaaaaacacaaatagcaatgatatattcaataatggtatgtgaatcttgaaaataatcattttctgtattactttttgtttaattcatgtggggaagacaatctggcattcttgttgatcttggtatgagaaactgtactaatacttgcataattttgagtcaaattactagagcactgtgaatatcttacataaataaacgtagtacaaatgtatctaaattctgcaggacttaagagcaacgggaggcaacttttttgaaaatctgttaagtcgtgataaatctcaataaggagatgaaacaatgtattaatctggtgaaatttcacatttttaataggtctgcttttcaaaagtaagaatcaagttaactatgagggacatcataatgaagtttcgtggcacaacacgagtcacagaggcactgtcttaagacagtctctctgatctgtaacttgtaaacaatattttgaaataagctactcatacattccattatttgtttcctaactaaaaatatttacatgtctttaatacaccaaacaccttgcctttgcccactcaaaagattgagatgtcaataaagatgaggcctaggaatttgggggttaagtggaaaagagataattatcttatttggaattaacttgctaactcaggtgaaaattcccttacccctgccaccaaataagacagtattctattatgtctccctttgactcctaacacccaactaagaaggactaactctgaatgtccttcctttttaatcaatacctaaggactcactgctccttccccaagaaaagaacagtgaaggcctgacaggcaataaccccgaataccctcaaaagtgtgggccttcgagcagcactgctcttgggatccagttaccacctttccccttcccccaacccacttcccgggttttctcaggctcggcctgctccctccccaccccacagccacatttccagctgcggccaccgcctcgggttctcttgtgagcttccatccctccgaggagttgccccctgtccatcacctccccaaaccatgttccaccccagaccacccgcccgcgagaccgtccatcctagcgctctgggaggggaggggaaggcggcggaaggaggaggggaacactgctgcttcctcacaggcagaagggcggccgcaaggaggaccacccagggactaccggggatatcggggtcgcagctgggaggaccctcccgccccaggcagaggtgggggatatccgggagttcatttctgacctcctcgctcttcagcacctccttgaactcccgcttgattcgctgcaccgcgatgttggccatgtctccgcccgcagctgattcgtacccgcctcctccgccaccgctacgaccaccgccaccgccgccacctcttcctccaccgcctcctccctcggcgattcagacctgagcacacgaacactgccrctmccaccccggccgccgcgctcgcctcagtgtggaatcacctccgcgcccggccaccaaaatggcgccgggtcggcgcatgcgcacgacgttgacccggccgggcggcgcagccgctcccgttggagcccccatacgcccgagccacgagctcgcgtctcggctggggctgcggccgcgtggctccgccctgccggcgtctggggccgcgagggtgcggcttccaagctggccggccctagccggcccccccggcccttcccggcgcctccgctcctgtttaaacccgggtgctgtggtctgggcttccagcgctggcctctgaccgaaggttcgggcgcaaccgaacgggtttccgacgccgcactcggctggaacgccgccctgactcagctagacccggaacccggaggctgaacgccgtgtctagcgcaggaaaacgctctcccggatctcggtccggcccattttcagttggtgtagccccagaaaatctactgcagtcgtttttgttctgcaacatttatagtaccacgattattcccatcatctcaggtagcacagattattgaattaaggctggttattgttggatcagattgggtttgagacaggtactcggtggagaggcctgagggtgggtttagaagccagatgttgctctttgacctatttaataccgagcttgacacacacacacaatctctctctctctctctcwcwwacacwcacacacacacacacacacamwcactcctatgcccatccctagagtgtagggtgggcctaagactgcgcttctaacaagtctcccagttgctgctgctgttggtgctggttccgggaccacawgagaaccactgaactgaatgaagcatgtgaaaattcacatatattaaagtgaaaattggagaaatggaaacaattacagtacccttcaggggactcggggtgggggagggggagccttatttctgtaaacctaggcntcaaaggtgcctggtgatagtaggcactcaataaatattgaatgagtaaatgagtacagataagactaaaacgtttttgctggcgcggcggatcgcttgaggtcaggagtccgagaccagtctggccaacatggtgaaaccccatctctactaaaaatacaaaaatcagccaggtgtggtggcaggcacctgtaatcccagctattctggaggctgaggcaggaaaatcgcttgaacctgggggtcggaggttgcagtgagcgagatcgcgccactgcactccagcctgggccacagtgcaagattctgtctcaaacaaaacaaaacaaaacaaaaagtataaaatattttaagtggaaagtaagtttgaaagtggtttctgggccaggtgcggtggctcacgcctgcaatcccagcactttgggaggcggaggcgggcggatcacgaggtcaggagatcaagaccatcctggctaacacggtgaaaccccgtctctactaaaaaaatataaaaaaaatagctgggcgtggtggcgggcgcctgtagtcccagctactcgggaggctgaggcaggagaatggcgtgaacccgggaggcggagcttgcagcgagcgagattgcgccactgcactccagtctgggcaacggagcgagactccgtctcaaaaaaaaacaaaaaacaaacaaacaaaagaaagtggtttctggtcgggcgcggtggctcacgcctgtaatcccagcactttggaaggccgagggggagcagatcacttgagcccaggagtttgagaccaacctgggccctatggtgaaatcctgtctctaaagataataatttttaaaaaagaaagtggtttctaaggtgcatagtaataatggtttggtactgagaagcattttgaatagaacattttggaataagtaataagggtgtcatttcagaagtttatacttcatgcactttcttcacctagccaatcagtaaaatatctattataaaaatatcacaaatacatggttttaccaaaagtaattaaaattgtggtggcaaacatggaaatagccaatggaggcgaatcagtgggggcacaaggcaaaagagaatttcttaaactcccgccccaggaaccaagaggagattttaaaattccagttctctcccatggcagttctcttgccagcttttatttcctcatctacgaaacgagaaaactggattagattatctctctcaagttttaagagttcagaattcgaaaatatcatctcaaaacatttcccctaagtgggctgacataaattatataaacccttctagcagagccccctagtggtcctaagaggactcaaccatatacgtaggtcatggtacaaggaattattggtgtaatgtaaatcacgcaatgctatatgtatttgtgccagtagacttaaaaaaattattttgaagagtgcaaaaactttttgagcactttacattatcactgtccaatcctaatcttggaatgtgaagaaacttggaatactcaaagggggaccagttagaagggtccaggccgggcgccctgatttatgtctgtaatcccagcactttgggaggccgaggcgggcggatcgcttgagctcaggaattcgagaccagcctgggcaacatggtgagacccccgactctactaaaatacaaaaacttagctgggtgtggtggcgtgcgctgtagtcccaactacttgggaggttgaggcaggagaatcgcttgaacccaggaggcggaggttgcagtgagcggagatcacaccactgcactccagcctgggtgacagagggtgactctgtctcaagagaaaaaccacaaaaagacaattccccctctccaaaaaaaggtctggtaatttctttcttttttttttttttttttttttgtcttttttcccccctttctgtggagaacggggtctcgctatactgcccaggcaggtctcaaactcctgggctcaaggtatcctcgcgcctctgcctccctgagagctgggattaaaggtgtgagccactgcaccgggcaagggtctggtaatttcttcaagggagagggtttggtaatctttaaatgcacataatcactgctcctgcaatttcacttctaggaattcattctgtagtccttctaatgagacaactgcatattaactgatatgaaacaatctccaggatatattttaagtgaataagaagcgccatgcgaggccagtcacggtggctcacacctgtaatcccagcactttgggaggctgaggtgggccgatcacttgaggtcaggagttggagaccagcctggccaacatggtgaaaccctgtctctactaaaaatacaaaacattaactgggcatagtggcgggcacctgtaatctcagctactcgggagactgaggcaggagaattgctcaaacccaggaggcgaagtttgcagtgacccaagattgcaccactgcactccagcctgggcaacagagccagactctgtctcaaaaaaaaaaaaaaaaaaaaaaaagaagcaccacgctaaatgcaatgtggtatcctgaattggatcctagaaccaaaagggcatacctagtgaaatataaataaattctgtaatttagttaatggtattataacaatgctaatttctcagttttgacatagccatatggtaatgtatgatgttaacattagtggaagttgagtaaagagtatacaagaatctctgtacagggccgggtgcgattgctcaaacctgtaatcccagcactttgggaggccaaggcaggcagctcacctgaggtcaggagttcgagaccagcctgaccaacatggagaaccccgtctctaccaaaaatacaaaattagccaggcatggtggtgcatgcctgtaatcccgcctactcaggaggctgaggcagaagaatagcttgaacccaggaggcgaaggttgcagtgagccaagatcacaccattgcactccagcctgggcaacaaggagcgaaactccgtctcaaaaaaaaaaaaaaaaaaaaagaatctctgtactatcttttcaactttcttgtaatctaaaattattccaaggccaattgtgatggctcatgcttgtgatctcagcaacttgggtggtggaggtgggaggatcacctgaggccaggaattctagaccagccttggcatcacagaaagaccccatctctagccaagtgcggtggctcatgcctgtaatcccagcactttgggacgccaaggtgggcagattacggggtcaggagttcgagaccagcctggccagcatggtgaaaccacgtctccactaaaaatacaaaaaattagccaggtgtggtggtgcacgcctgtaatcccagctactcgggaggctgaggcaggagaatcacttgaactcaggaggcagagtctgcagtgagccgagatcgtgccactgcactnnnnnnnnnnnnnnnnnnnntgccactgcactcccagcctgggcaatagtacactcagtctcaaaaaaaaaaaaagcacccccatctctctctttttttttttttttttttgagacggcatcttgctctgtcgcccaggctggagtgcaatggcgtgatcacggctcactgcaacctctgcctcccgggttcaggagattctcccacctcagcctcccgagtagctgggactacaggtgcccgccaccacgcccagctaattttttaaaatatatttttaatagagacgaggtttcaccatgttggccaggatggtcttggtctcttgaccttgtgatccgcatgccttggcctcccaaagtgctaggattacaggcgtgagccaccacacccagccaaaaagacccccatctctacaaaaaaagtaaaaaactagccaggggtggtggcatgtgcctgtagtcttagctgcttgggaggctgaagtgggaggcaggtttgagcccaggagtttcaggctgcagtgagctatagttgcaccactgcattctaacctggtgtcaaagtgagatcctgcctctaaaaaagataaataaaataaaattataaaataaaattattccaaaagaaaaagtttacttattaaagggtatgtcacagcccatatgtatatagtatgccaccatatttgtaaggagagaaaggaatatgcccgtatatgtaatgtttgtgaaccataaaatatcactggaaaaatgtggaagaaactgataacagtggttacctctcaggaaggaacttaagtactttgggggaagcaaagtgggagaattttcaccatgtctcctgttgtattttttatccatccaaaaacaaatttttaaaaatgtgtttccaataatggagaacatagctcttccgtaatatgatctaattctgattaacttcgttaactaaataattaaataagtatttattgaatgcctactatgcgctaggccctggaggcatatcagtgaacaagagattaaaatccctgcaatcgtgaaatttacattttagcagggatgaagaaaattaacctcaaactatagtctacagacacctgggcaatccctgagatgttttcaggcagtcaatctaccatccttaaagtatggcttttttttttttttttttttgagatggagccttgctgtatcgcccaggctagagtgcagtggcgtgatctctgctcaccgcaacctttgccttcagggttcaagagattctcctgcctcagcctcccgagtagctgggattaaaggcacgtgccacaatgccctgctaattttttatatttttagtagagacagggtttcgccgtgttagccaggatggtctcgatctcctgacctcatgatctgcctgcctcggcctcccaaagtgttgggattacaggcatgagccaccgagcccagcccatgcttgaactattattatgatactaagatattatctgccttttttccactttgacatttgcaccaatactgtaaagcaatagtactgtacaattactgtactagtaacaattaatgtaacacattcactgtttaaaaaactgccagtttcactttggaatgtcttgatggaacagtaggaattattaattttattaaacctagtggagactaaagcagctccatcttggatactaatctgccacattaacttccaattgaccccagttccagaaatgcctctaagatttatattttatcctttttaaaaatttttttcaattttgaaacagagtctcactctgtcacccaggctggagtacagtggtgcaatcatagcttattgcagactcaagctcttgggctcaagcaatcctcccaccttcgcctcccaaagcactgggaatacaggtaaaagacatcacactgggcctctaatccagtgttagttaatttttttttttcctttttagagacagggtcttactctgtcatccaggctggagcacagtggcatgatcatagctcactgtagcctcaacctcctgggctcaagtgatcttccttcctcagcctcccaagttgctagggcaacaggtgcacaccactatgtctggctatttttaaaaatttcttgtagagtcagggtctgattatgttgcccaggctggtcttgaattcctgggctcaagagatcctcctgcctcagcctcccgaagtgctgagattacaggtgccctgccactttaattttttttttttttttgagacagagtctccctctgtcacccaggctggagtgcagtggcatgatctcggctcactgcaacctccacctcccgggttcaagtgattctcctgcctcagcctcccaagtagctgggactacaggtgcacgccaccacgcccggctaatttttctatttttagtagagacggggtttccccatgttggccaggctggtctcaaactcctgacctcaggtgatccacccgcctcggcttcccaaagtgctgggattacaggtgtgagccactgcgcccagccccatcccaagcttttaatacagaaagttattgta

SEQ ID NO: 94177 - DNA, 58309 bp, Homo sapiens
agagttttcctggaaataacatctgtgaaaaagtaggaagcaggattggacagtggaacaaattaggacataattcagtgcaatggtctgaatgtctgaatgcccccaaaattcataagttataattataataaccaaaattactgtattagctgatagaaccatttaggaggtgtttaggtcatgaaggcagagtcctcattaatggaattaattcttttgaaaaatatgctcacaataactcattcatctctttcccccattaagacatggtgacgagttgccatcttggaggaatgcccaataccagcatcttgatggtgaatctttcagcctcaagaactgtgacaaataaatgtttgttgtctgtaagctagccaatgtatggtatttttctatatagcaccctgagcatgctaagacatgcagtctcagcatagcttttgtctcacccactgggagctctgaagctgttaggccttcagagttggtccaaactgaaaaggggagaatgggcctttagagtcctacatgtgaccaggcattggatatgggctgtcttggaaaggtcactatatgctagatagctttcagcagggttgtactgagagagagagcttataggtgaggtatgtcagttgttcatcacttcatcagctggaaagtaatttctatattcccaaaaggggaatctgggtgacacgtaatgcatgcactcaacgacaataaaaacattgaacaatattgacactctgcaggcaatattttctcagaaactgggtttgaatatccttttaagaaagatttacctcattgcaggttaacagaccattaatagaataaaaacatgtttgtctattttgtcacatgcatcttttccttcttaattctactttgatggaaatttctggtgagatttttttcaaaatacaacttgcctgaattacaaggcaatctgcaaaacaagttcaggagtaggcacttagaagataaatactttctaaaagtgagaaatataaggaatgttgcaaatattcaggaagggataagattttgatttagggaaaatattttcaaataaagcaaagtaactgaaattgtactttgtcagatgcataactgggaaaaatattctctccttctatatgttgtctgttcactctgatgatagtttattttgctgtgcaggagacctttaattagatcccatttgtccatttttcttttgttgtaattgcttttggtgttttcatcataaaatctttgcttgttcctaagacttgaatggtattacctagattttcttttagggtttttaaagtttttgttgttacatttaattctttaatccaccttgagttagttttcatataaagtattaggaagtggtccagttttaattttctgcatacaactagccagttctcccagagctatgtattaaatagtaaacccttttctgattgtttttacaaggtttgtcaaagatcagatggttgtagatgtgtggtgtaatttctgaggtctctgttctactccattggactacctgtctgtttttgtacaagtattatgctgttttggttactatagctttgtagtatagtttgaagtcaggtagcatgatacctccagctttattctatttgcttaggattgtcttggctctactgactttttagttccttatacattttaaaatagtttttttttttctaattctgtaaagaatgtcaatggtagttcaatgagaacagcattgaatctataaattactttgggcagtgtggccatttttatgatattgattcttcctacccatgatcaaggaatgtttttccatttgttggtgtcctctctgatttccttgagcagtggtttgtagttcttgaagaagtccttcacttcccttgctagtagaattcttagatattttattttcatggtagctattgtgaatggaagtttatttactatttggctctttgcttgcctgttgttggtgtacaggaaagctaccaatttttgaacattgattttgtattctgagattaatgaagttgcttctcagtttaagaagcttttggactgaaacaatgggatttctagataaagaatcatgttatctgcaaacaaagataattttacttccactcttctgattgaataacttttatttatttctcacaactgattgacctgaccaaaactttcaataaaatgttgaataggagtggtgagagatggcactgtggttttgggctgtttttcaagggaaatgcttccagcttttgcccattcagtatgatattggttgtgtatttatcataaatggctcttattattttgaggtatgttcctttaatgcctagttaatttagagtttttaatgtgaagaaatgctgaattttatgaaaggccttttctgcatctattgagataatcatgtgttttttgtctttagatctgtttatgtgatgaataacatttattgatttttgtacattgaaccaaacttgtattctgaggatgaagtcatcttgattgtgatagataaacttattgatgtgttgctggatttggtttgtcagtattttagaggatttttgctttgatattcatcagggatattggcctgaagttttgtcgttgttgttgttgttgatgttggagtccctcctttacgatcatttggaatagtttcagaagaaatagtatctctgttagaattcagctgtaagtctatctgatcctgggatttttgttgttggtggtggtggtaggctatttattactgcctcaatttttgaacttattattggtttattcagggatttaatgtttccctggttcagacttgggagggtgtgtgcatccaggaatgtatccatttcttctagattttctagtttatgtgctaaagatttttaaagtattctctgatggttgtttgtatatttgtggggtcattggtgatatcccccttatcatttctgactgtgtctatttaattcttttaagttttcttctttattagtgcagatgcggtctattttgttaacttttattcaaaaaaaaaaaaaatacagctcctgaatcccttgagttttttgaaggattttgtgtgtctctatctcattcagttctgctctgatcttggttatttcttgtcttctgctagctttgggaagttttcctcttggtcctctagttcttttacttgtgatgttaggtcattgacttgagatatttgtagctttttgatatggggcatttagtgctctaacttttcctcttaccactgcttaagctgcatccgagagattctggtatgttgtctcattgttctcattagtttcagagaacttcctaatttctgccgtaattttattatttacccaggagtcattcaggagcatgttgtacaagttccacatagtcttgtgattttgattgagtttcttaatgttgagttataatttatttgcattgtggtctgggagactgtttgttatgatttcagttcttttgcatttgatgaggagtgttttatttccaataatgtgatcaattttagagtaagtgccgtgcagccatgagaagaatgtatattctgttgttttcagttggagagttctctagatatctattaggtctacttgatccagagctgagttcaggtcctgaaaatctttgttaattttctgtctcaatgatctgtctaatattgtcagtggagtgttaaaatcttccactattattgtgtgggagtctaagtcattttggaggtctctaagaactggctttatgaatctggatgcttctttattgggtacacatatatttagaataattagcttttttgttgaattgaaaactcatcatcatgtaatgtcttttttttaatatttgttggtttaaaatctgttttgtcaggaacaaaaattgtaactactgctttttttctgttttcctctgcttggtaaattttcctccatccctttattttgagcctatgtgtgtcttttcatgtgaaataggtctcttgaagacaacatactgatggagcttgactctttatccagcttgccattctgtgtttttaattgaggcgttaagtccatttacatttatggttaatattgtgtcaatttcatcctgtcatcatgatggctattttgcagacttgtttacatggttgttttatagtgttactagtctgtgtaccttggtgtgttttttgtagtcactggtaacggtatttcctttcaatagttagtagttccctcaggagttcttgaaaggcaagcttggtggtgatgaatttcctcagcatttgcttgtctgaaaggaatatgatttccctttcacttatacagcttagtgtgtctggttatgaaattctgggttacaaattctcttctttaagaatgttgaatattggtcccaaatatcttgtggtttgtagggtttccaatgacaggttgttagtctgatgggctttcctttgtaggtgacctggcctttctctctggctgctcttaacacttttctttcattgtgaccttggagaatctgatgattatgtgtcttgaggttgattttctcatggagcatcctgctggggttctctggattttctgaattcaaatgttgccctgtattgctaagttggggacattctcctggattatatctcaaagtatgctttcaaacttggttccactatccctatctctttcaggtaccccaatcaatcataggtatttttatatagagccatagttctcagaggttttgttgattccttttcattcttttctcctctatttttgtctgcctgtcttatttcagaaaaatagtctgcacactctgagattcgttcctctgcttggtttatttggctatcaatacttgttattgtgtcgtgaagttctcatgttgtgtttctcagcttcatcgggtcatttatgttcctctttaaatgagcaattctgggtttgagctcctgtaaatttttcttgagatggagtcttgctctgtcaccaggctggagtgtagtggcatgatctcagctcactgcaatgtccacctcatgggttcaagtgattcccctgcttcagccttctgagtagctgagactacaggtgtgcaccaccacacctggttaattttttgtgttttagtagagacagcctttcaccatgttggccaggatcatctcaatctcctgacctcaggatctggctgcctcagcctcccaaggtgcttggattgcaggtgttagccactgtgtccagccctgtattgttttattatgattctcagcttctttgtcttgttttataacatgctcctttagctcagtgtagtttgttattaccaaccttctgaagctgacttttgtaaattcagccatctcagacttggctaagttaggtgcccttgctggagagttgtttcaatcatttcaagaagaggcactctggctttttaaattttcaacgtttttgcattgattctttctcaactttgttgaggttgctgacctttgaacgggttttttatgggcgttttttttttttttgttcatgttgttgctgtagctttctatttgtttgtttttcttttaacagtcaagccctccttctatagggctactgctgtttgctacggttcaatccagactctaataccctctgttacaggctgaaagaatgagggtcctgaccaactcagtataccactggagcaaacagaaaactgttctcatgaaagcaggatttggaaaactgatgactgtgtctgcccccagaaagagtgctgagggcagtcacaccccaagcacagtgttccttgtgattacctatagaagtatctgaagcctgttgtacaaagaaagcaattaagtgtacctgtgataaatcaagcagctgaccaaccattacctctccctccctcctatttctaccttataaatacgaagggctgtagaagcttagatcccttgttcactagaaacaaggagccccctgtcaccttcttttaaaacagatctttctgtctctgtcttcatttctcyattcatcccccttcattcaatcctgtagcaactggcagtgacaagtggtgcccaggacagggacatgagcaaagaaggtctgctggagcagagaaagtgaaactgaccagatgagcaagaaaccttgggacaagtctrctggcagctaatataaggttagtgccctaaagaggtactgggaatgggaagttttctgaatcagggtaacatggggcagaatctatctattcaggagcaayattatgtgcagttgcttaaagttttacttaaacaatctggtgctcaggttagttctcaaacattaactaagatgctgaagaaggtcactgtacataacccatggtttccacagatgggcactctcgatgtggaaatttggaacagaataggagaaggattaaaacgagctcatcaaaaaggtcttaaagttgaccyttctgatttctccacttggagtttgtttcttactgtctgtctgccattatctccttattctgctggacagcaggagtcatgttctgagtctaaaaatttaaaagaatctgttgtcccacccatgcctctatgaatcaatggcccctatcacaggagaaactaactcaactctatcagctagtaaaagagcaattggatgcagaacatatcgaagagtcagttagtccctggaattcaccagtatttgcaattccaaaagagtcattaatgcacaaattaaaccaatgggcrcattacagcaaggtctggcatccgcggcagccattttaatggactggcctctcttagtaatagatcttaaagattatttctktactatacccttccacgagaaggatragcctcgatttgccttctctgtgctttctatccatcaaagacaacctggttctcattatcaatggaaagttttaccacaargcatgcttaacagtcctgtgctatgtcagcattttgtaggacaggcattaaaggagcctcggaatatgtttcctactgcttacatcgttcattatatggaggatattcttttggccactcctacagatcaaattttacatcagttattcagagaaacaaaacaggctttgattaaatggaatctcaaaatagctccagaaaaggtgcaaacaacctccccacatcggtacttaagcactattgttactgaaagaagtgttcgacttcagaaagtaactctccgtagggacagattacaaacactgaaagatttccaacaattgttaggggatattaattggctgcrcctgatgataggtattgctacttatcgactcaaacacctttatcagaccctccaaggagattcttcattagactctccttggcaacttactaaggaggcagaagctgaattacagcttgtagaacaaatgcttcagtgaagacatgcctcctggctacagccacaaaagcctttgyttctgtttattcttccaaccccctactctccaataggamttttgggcccatttatagacaagtttgtaayggtaatagaatggctttttctatccaatcaaacagtaaaatctttacaagtttatctttctttaattactcaacttataactatggataggcatmgatcaaaaatgtttacaggatatgacccagacaaaattattgttcccttggatttccaacaacaggctgcagcatgggaaatgttgactgcttggcaaattgctcttgtggattttgtagtaataatagacaaccactatccatcaggcaagttttgcaattttgtaaagttcacccttttatcctccctgtgattacttatcacaagcctattccaggtggccagacttatttcactgatggctcttccaaaggctgagcagctatttatggacctaagcatactcaaacaataaaaacctctggagtttcagctcaacactcagaattaatggcagttattgaggttttacagctcactgcttcaactcctattaacgttgtctgtgattcagcctatgttgtaaatgtagccagtcacattgagactgccactattaaaagcaccctagaaccagagctgtttaacttgtttctaagacttcagcaagttattcattcttatgctgctcctttacatatttctcatattcactctcacrcacaacttcctggaccactatctgtaggcaatgacaaagcagataaattgattgactctgtgtttcagcaagctcaagcctttcatacattattgcatcaaaacacctcacccttacttgtatgtttcatctgcctcgtagccaggctygagctatkgtgcaagcctgtcccacttgccagtatgtccctggtgatatacccataaaaggatgtaacccacgaggcttagctccaaatgaaatctggcaaatgggtattacacatatagcagcctttggcaagcttagctgtgttcatgtgactgtagacacttactctcatatgttacatgctacgtgtcaaacagaaagagctggccatgtacagcggcwttgtttattgtcattcrcccatatgggtgttccyaaaccaataaaatctgacaatggacctgcttatgttagtcatgcttttcaaawttttttatagttatgggaaattactcataagacaggaattccttacaatccctgaggacaaggcattatagagctggcacatcaaacatrcattacatttattaatgtaattgatgtaactaacatacagtgtatgttgaaaaaaacaaaaagggggagtaggagaccagctaccacctcaaataaaattacatttagccttatttactttaaattttttagctcctgttacagataataagactccggcrgaatgacagtggcaaatgttaaagggaaaaaartttacctaaaggtattatagaagtccccagaagaagggcaatggaaaggcccagtagatttactaacgtggggatgagggtatgcttatgtttttacaggacatggacaaactgtgtgggttcccccaccatgtatgtgaccatggaatgggagactggagggacccatggatcccaaccatgggcccagctcctccaatatgagccatgagccagttgaatctgaatgcaaagacatggggacagatcaagaaaaccacacaaaaagctgagaaactgctagagcrtcagggtgaggcaaaaacccctwactccaagtttatggccatgtcagctgtaatatcctgtgcagtatgttttccctgtgcagaggcaaaaacatattgggcatatgttcttaacctcccagtagtatgaccggtactctggactggcaatcctcctgagttatatcatgatcaaggagtatgggcaccaggacccttaactccccctgacacagagcaattagactctcaggacaatggtatcaattatactgctccattggagggacttcctttatgcatcacccaggatacatcactcaactgcagtttccttgcaatttaatcccaggcatgattgagttaccatagaaaatatatgtgccacgcarccatgtatacaaatgtaacaaacctgcacattgtgcacatgtaccctagaatttaaagtataatttaaaaaattgtctttcctgacacctggcttttcaaattaggaaaaagctgaagtttcaaacaagtggtagaaaaattctgaaaattaatcttgcagaataggttatctatgtgaatatattaactaaattcaaaagagttataaaaggtttttgcttctttaacgtttctgagtcatcattttggcaaaataaatgacttatagtaatttggaattctgttttacaatatcaaatgctttaaatatactaaaaaggctttccaaaatcaaactttggtttcaaaattgtctttcctcacatgcacacgtatgtttattgcaacactattcacgatagcaaagacttggaaccaccccaaatgtccatcaatgatagactggattaagaaaatgtggcacatatacaccatggaatactatgcagccataaaaagggatgagttcatgtcttttataaggacatggatgaggctggaaaccatcattctcagcaaactgtcgcaaggacaaaaaaccagacacctcatgttctcactcataggtgggaattgaacaatgagaacacttggacacaggaaggggaacatcacacactggggcctgtcatggggtggggggaggggggaaggaaagcattaggagatatacctaatgtaaatgaygagttaatgggtgcagctcaccaacatggcacatgtatacatatgtaacaaacctgcacgttrtgcaaatgtaccctagaacgtaaagtataatartaaaaaaaagaaaatatttgtgcctattgggcctcagctctattaatatttctrgtgcagttactaatcactcctggtctcatcgcccaaattgtattaattatacagaatgggttccctttgataattctaactcccctccttggacccagtgtcttggctccctagctagacaacagtccatgctgatgggagacattattgactggggtccccatggtcacttggttgggagagatgagcatcagacctcatggcatgaacttcactgccactggtggcaaaactttaacatctctttgccacgtcacattgggattcaatccgaatctgctgcgcaaattacttggcatggcgcaggccttagcccacctttgcctcaatggcattctcaaggaaagagaggtccaatccagaattcgatatgcaaaacagcaytcccatttattaatggcagcatttgagttgggacattattcaataataataacagtgctaaatgcagttttaatatgatcatggtagaaaatattaccactcaatttataatttgtgctttaattcttacgttttcttagtagcaaaaaaggaccaactccaggtggatgatgcccagtcgacttgtgattcctgtcaactttatcattgccttaatcaaagcacaatacagacacatgatatatccaccctaataattctagrttgcattcccagattatggattcctgtaaatctgtctgaaccttgggtggccacccccattttacatcttataaaactcttttttactcagcttactcatcgtgctcgtagagccttaggcatgataattgttgctatagtctccttagttacattgataacctctgttgtgatgtcctcagtagcaatgcatcgctctattcaaacagctcaatatgtagaaaattggacaygcacasctggccaggcatggatgcttcaaaataaaattaacgctgaaatatraacagaggtggcaatgttaaaggctactgttctttggctaggagaacaaataacaaagtttgcagttgcatcagcaattgcattgtcattttaatcatactcatatttgtgtgaccaatttggaatataaccaaagtgaatattcctggagccttgtaaaggcccatttacagggagctttcacatccaatgttacttttgatattaatgatttacaaagtaaaatccttaacttcgataagcaaactcaagtgtttcagccctgtttaaaagcttgggcagaattcsaacaaggtttagagagccttaacccttggacctaccgcaaacagcaactcaatgtctttgttgttactattggattaatgttattatgtttytgttttttgttcatagtcttcaaaatcaggtggaccaccaaatggcaattgagagctgcagaacctgcaattacctttattcaattaatgaaaaaacaaaaagagggagatgttacaggccaaaagaatgagggtygtgaccaactcagcataccactggaggctatatgagcaaacagaaaactgttctcatgaaagcaggatgttggaaaactgatgactatgtctgcccccagaaggagtgctgagggcaatcacaccccaagcacagtgttccttgtgattatctgtaggaatatctgaagcctgttgtacaaagaaagaaattatgtgtacctgtgataaatcaagcagctgaccaaccattacctcttcctccctgcycttttyacctaataaatatgaagggytgtagaagcycaaagcctttgttcactagaagcaaggagcccctgacaccttcttttaaaacagatctttttgtctttgtcttcatttctccattcatcccccttcacccaatcccatagcaactgacagcaacagcctcggtctctcacacacctggaggtatcaccagtagagatacctcctttggctgggggtagggactcccctggcttgtggcactctggggtgggctgtcatcccactccgctttttctcactctctgagttgtgccaactgctaagtcagtcccaatttgagaaycttaattcctcagttgaagttgcagaatttattcactgttttcattcttctccatgagagccatggaccactgctgcttctaatcagccatcttggcccaccccctctatttcactcttaaaartacacaaaaatttwaaaaaagatcaacaaggaaatagaatactagaagaacactataaatcttctagctctaacacacawctataacacactccaaaaagcagctacatatttaatattatcaagtgcatattaatatttccaaaacaaatcatcacttgaccggaaaagcctcaataartttaagaggattgaaatagtatgtgttattttctgaaaatacaaaggaataaccttcaatrtcagcagttttaaaaaattgagaaattcacaaatgattacacattaaacaacataattcaaaataacaaagataaaatcaaaagaaaacagaacaaagtttaagaatattaaaaacaaatacrccaaaatttattaaaaagcaatatttagaggacaatttatgaccttaaaatgcctacattaatwagacaaaaatttttaattaatatgcaattttatactttaaggaactagaaaaaatgaacaaaccccccaaagcagaagaaaagaaatagtgattattgctaaaataagcaaatgaaagaataaaaacaacaaaggaaataaaaccaaaatttggtacattcaaaagattaacaaaattaaataaaacaaagagtatttatgtagacttacctctcataaaagagaagactcccattattaaaatcagatatgaaagactacacattactacacactatacagaaatacaaaatattacagtacattgctaggagcaaatgcataccaacaaatcatataactcaataaaatgagcaaatctctcaaaagacactaactatgatatgcaatygacagaaactgaaaatagaaatagacttawaataaaaaataaaaatattcaataaaaccagaatgatgttaaatgtcatgaaactgataaaagacagctatgaaaagtctaaaactattattatgtgtatcagtgaaatactacctaagataaaaaacaagatgaagagatctatttatcattttaggacaatattccattgtatatttaagctaaggcaattagacaatgacagaaaataagaaacatgcatattgaaaaagaagttaatacaattacatatgtcagtacatgatayaactttacatagagaatatcttaataaatctagtataaaatattagatcaaaaacaaataaataaccttgtcaggataaaagattgatatataaaaatcaatatatttacataattctaattatccaatataaaataatacaattgcactgaaaatgccataaaatatattgcacaatataaatgccacaaaaaataattgcacaactatgatggttaattttatgtgtcaacttgactggtttaagagattaccaaatagctaaaaaaaaaaaaaattatttctggatttatctgtgagagcatttcatttttcctcctctaaattttactttaggttcagaaggttaaagtgtcaacttcttcatgagtaaatttcatgtcacagggtttttgtgtaaaaattatttcatcaccaagatagttaatacagtacctggtaggtagttttttgattctcatagatctctcattctacactttcacatatttcccattgcctattattcctttctctttgtccataggtactcaatgtttagttcccacttacaactgagaatatgtggtatttggttttcctttctggtggtaatttgcctagggtaatgaattccagctgcatctgtgttgctcaagagacatgattttgtttttttttcattgctgcatagtattccatcatttatatgtgtaccatattttctttatccaggccaccattgttgggcatatagattgattccatgtttttgctattatgaatagtactgtgatgctgttgataaacgtaggtgtgcatgtrtctttctggtagaacaacttacagtcctttgggtatatacccagtaatgsgattgatgggtaaaatggtaattctrttttaggttatttgaaaaatcttcaaactgctttctacagtggctgaactaatttacattcccacgaacagtgtatgagcatcctcttttctccctaatcttgccaacacctgtcattttgtgctttttaatratattcattctgactaggggrgatggtatcttatagtggtttttatgattttcwtttctctgatgattagtaatgttgagtattttttcatatgcttgttggccatgtgtacttattcttgagaagtgtctgttctcttttggccactctttagtgggatttttcttttttgcttgttaatttgtttaagttccttctagattctaaacattagtcctttgttggatgcatagtattgaaatgttttctcctattctgtaggttatctgtttatgttattgaatgtttttctgtgcacaagttctttagtttaattaggtctcacttgtcaattttttttttgttacaatttccttttggggtaattgtcataaaactttggccagggcttgtatccaggatggtatttctgaggttttcttctcatatttatatagtcttagattttacatttaagtatttaatacaccttgagttgatatctgtatgtggtgaaaggaagaggtcaaatttcagtcttctgcatatgactatacaattaycacagcatcatttattgaatagagggttmtttcttcattgcttgttattcctgacttcattaaaaatcaggtggcagtaggtgtgtggctttattatttggttctctattctgttccattgctctatgtytctgtttttgtaytactaccatgctgttttagttactacaggcttttaatatcctttgaaattaggtaatttgatgcctctggctttcttcttttagtttatgatttatttggctattttggggtttgtatgaattttaggatagatatttttatgattctgtgacaaacgttacaatactttaaaaagagattagtatttaaatcagtagactgactaaagatatctctcatgattgtgggcaggtatcatccaatcygttaagaacccaaatagagcaaaaggcagaagaagacaaatatttctcttttctttggctgggacattaatattattctgccttctttatttgaggcttctggatattgggccattggacactagggtttgcactagtaaaccccacttgtagctccttaagttctaaggccatcatcctcagacaaataattacacaactatttctcctagtkctaaggccttcagtctcagattgaattacagcatcagctttcctaaatataaagtgtgtaagtgtatatcataatatttctcagcctaagcaaattcctacaataaaatcctccctcataggtgtgtactaatgtgtgtgtatwcatacatggctctttttgtctggagacacctattatgaagattaactcatttttttctaaaataaggaaaagactagacattcattcttattacttctattcaacattatattggagattccagccaaagcaaataggaagtaacacraaacaaaaataatccttattagaaggtaagaaataagtacactctctttgttgacaaaaggcatgaccttatgtaaagaatatcttagactttcctagaaaatattagatcaacaacaaaataagcacatttttaggactaacggtcaaccttcaaatattaattgtattgttacataattgaacaatacagaagaaaataacatgttcaaaaatcctacataaaatataatcaaaaattattttaaaaaaacaggaaaaacattaaaagaattgcaaaacttaggccaggtgcagtggctcatgcctgtagtcccagcactttgggaggccgaggcgggcagaccatgaggtcagaagttcgagaccagcctggccaacatggtgaagccccagctctactaaagatataaaaaattagccaggcgtggtggcgtgagcctgtaatcccagctacttgggaggctgaagcaggagaatcacttgaacctgggaggtggaggttgtagtgagctgagatggcaccattatactccaacctgggtgacagaatgagactccatctcaaaaaaataaaataaattgcgaaacttaaaacttaaattgtaaaagttactaaatattgaggaataaaattcttaatgaatamataaaatctcatattcctcaattgaaaatcttaattaataaacaaattaaccaaaatccatattaaattcccagctgggttctttacagaaataaacatgctcattctaaattaatatagatatacaggagaccaaaaaatagcgagatatatatatatatatacacacatacacatacgtgtgtgtgtgtatatatactatatatatacayactatatatatacacactatatatatatacacacacacaatatatatatatatatatatatatatatatatatatatatgtataatttttttgagacagagtcttgctctgtggccaggctggagtgcagtggcacaatctcaataaccagtaatattttgaaaaatartttagtccttgcatttcckattttcaaccaacaacatatcatcaatagttataagagtgtgacacaggaacacagatcaccatataaataaatggaacagattttagaatccagaaatccttttacacagtggtgacttaatttttgagaaagacgtcaaactattgaataggaaaacaacaatattttccacaaatacttctgggagactgattatccaaaggccaaaaaaacaagatacactttctctgacaacacataaagaactaatttaaaatacatcaacaacccaaagttaacaaacagaagtacaaaacccagaatagaaaaagtaaatcttttctaycttcaatttggcaatggtttctaggacaaggcaacaaagtcacaaaaaactaagttaaaatggataaactgatattcttataaatgaatatgtttgttcttgaaaggacaccatcaaaaaagtgtactgatgataagtagaatttaaaaagttctaattcatatatctgataagaaacgtttattaagaatatacggagcaagagacttctggttccaaaatggcagagtagagacaagcagcctttttttcttcatgcaaaacaaaacaaaacaaacatatggcactgagatctacaccacaacaaccaaaagcttaattaagaggataacacatttcccagtgtcataaaagtagaaaaagtctgagtagacactacgtaggggaattatatgtctatgtctacattaataatgcccctaacttgcaactctgctctgcaccaaaaacgcagaatatctatctccaattcatgatttacaatatgatttggatctgtgtccccacccaaatctcattttcagttgtaatcaccagtgttggagatgggttttctgggaggtgattggatcatcrggtggatctttcatgaatgattcagcactatccctttggtgctgttcttgtaacagcattctcaagagatctgtttgtttaaaagtgtgtagcacctcctacaactcccttcctcttgctctggccatatgaggtgttgactgcccttttgccttccactatgattgcaagcttcctgaggcctcctgagaggtagaagccactatgcttcctgtatagcatacagaatgtgaggcaattaagcctctttactttayaaattactcaatgtcaagtaatttttatataaatgagagaaagacaaactgatatggtcactaagcttccccatcttatcaagttccctggtagacctgtctttccttaacccagtggaaatgttatgagtgcatgaagggagaaacattcctgaggacaggcagagacaaaaaagagaggcaggactaccaacctcttagacatggaaactcttctccgtaactcagccaaaaattgacctcaaatcagagtagttgcttagcaacagcatgctgtaggaygtaagttctttaggtatactgggaacaagcccttaggcagtgttctcacacttccaggataatccatttggaacccccatcacttgggacaggcagagctctaatcattcacatgagctgaggtaaacctgggcttaacatgtcacctagaactaaagtgaatgcagtgacttttcggtaaagattttctaagcaaatatattccattaaaaaaagacagaaaaaaaatggaacaaataatccttcaatgcaaaggcatgcatatattcacaagaaacaacagagaacagggaaccaggacctctccaaaaggacaatgcaaaaatctagtgattgacactaataagataayccaatttctgagctctctgacccagaatacaaaatagcagttttaagaaaacttagtaatgtctaagttaacacaggaagttatttcagaaatttatccgagaaatttaacaaaaaggttaaaataatacaaagaaatcaatcagaaatcttggaactaagaaatgcatttgctgaattcaaaatccattagaggtcttaaaccacagaatgatccaagcccagaaaagaatctgtgagctctaagactcgttattttatttttaaaaagtcaagagagaataaaaaagcaagtgccacctacaaaatatagaaaattacttcaaaagacccagtctaagaattattggtgttcaagagagatgtgagtaagagcaagggtagaacgctcattcaaaaaaatagtaacaaaaaacttttcaaaacttgagaaacataaaatgtccaggtacagaaagrtcttagaacacaatgcaaacccaaataagactaccccaattaacaaaataatcaaagtcacaaaggacaaaaaaaaatacattaaagaaaaaagattgaaatcagcaagtgaaagcaaataacatataaaacagcgccaatatttatggagatagacttcccaaaagaaactatacagaccaggaaggactggaatgatgttttcaaagtgctcaacacaaaaggatgccaccaaaaaatattgaaacaaaaataattatcaatcaaatataaatgagagatgaagtatttaccaggcaaacaaaacatagaattgaccactgagctagtcagaggagaaggaggtccccagagaatctccaacaagcctgtgcactgggaggaatgtgcactggggtggaacctcaggaattttgcactgtttgcaacagggaggagcccggcaaatatcccatgtggaacctgggattcaagctgctagtgggaagcactctggcaggggtctccagccttgtggaagatccctgtttcccctttttttttccttttcacccaataaaaccctgctttactcacctgttgaaccatctgccagcctaaattttcrtggccctgagatggacaaagacaccattgcgttatttagtccacctatttacactgtaatgacatctgctttttaccattaatctttaagcctcttcctatttctcaaagattaaagtcacgtgaactgaacggtaccacagtttttaacttctctttaaaaaatattagatgcaagtgtttgtctttttcaggccaaaatcatttagagctctttctgcagacattacacataacacacacgcagacaggcaggagaaaacccagttcctggrtggggttttataagagccaggccaaggaaaacatgcagatatcaaacctgaaaaagagtcagtccctaaggcaggataagcccctactttgtgcaacaaaatgcacagtgcaggtgagtgtggctgtttcctgccaattaagtgaagcccaagctccctggttcatggataaaagccttgttagtatccatggcatagatgaggtctagggactcccagactactgaaagcaggggagatagggtgtatgtgggtaagtgggtaagagtgaatgttctcaccccctaggccccactggttcatgggtgcatgttgctttgacacctgtttcagcacataccaaggttaccagcactcggggaagcaaggacggaagaagaaaagaggatgctctttctccctcatgtaccccaggtatctgctagaaagagaagagaactagggacacctgccaccctcttcctaggtgagtagccattcaccttcagtctgtacccattttgaatgcatcatgaccccctgggacttctttaaaaggtgccttctttttcctttcttctcctctgttctctcttcacggataggtaattatgtctccgtattctgggacattcccctcagatgcatcttccaaactggaaagagttaactttccaaaccttaagctggttggctaaagattgggcccagaagaagggaacccagaagaccaacatgccagcaaaagggtattttaccagtctggcttttggcctttctctccctgtgcaaagtgataaaaggcctcagaatttttgagctatccttactcctccccttgtttcattttgatacatgttttctaataacctagtttgtctgttcttgccttcagggcatcaaactccaaacaataatgcaagcagagtctctgacaatggccctttctgctgggggaactcttagataggcctgtgagtgagctctgaccaccatttcccaaaaacagcaccccttgtcagcaggaagcagtaaagattgatcttccttatgctctttcaaatagcattcagatrtacttctttacaagggggaaagagacagccaggtaggaggtggtccccagrgaatctccaaagagcttgaacactgagaaraatgttcactggggtggaacctcagcaagtttgtgccatttgcagtggggaagagccaggcccctcctctttctgtgtggaagctgggattcaagctttgrgcaggaagcactctagcagggggactctggcctttcagagtcctcgacattcaaaccatctgtgagcctaaatttttgtggccatgggacagacaaggatcccatctttagctgaactaaggaaaagtcctgagactccaccaccagacccatcttgcaaaaaatgctaatgggagctcttcagtcagaaagagtaaaacactatcatgcaaaaagtaacttttcaaggtataaaaacaagtggtaaaattgagtacatgcaaaaacccagaataagctagtactgaatttgtgttctgcatttcacctatcccagaaaacataacaactatagcaaccggttaagaaacagatgatatacaaatatgtaaatcaagataactatgagtcaaaatgggtaggtgattgagttaaagtatatacattttctgtgacttttgcccttatttattttataattttatttgcaatctaagttgtgatctctttaaaataacatgccatatctctaaaatggttttctgtaagtctactggtaaccacagttaagaaatctatcattgatgtacttaaaaagcagcaacttgaaatatactaccagagacaatcacctaattatgaagaaagacaggaaggaaggaagagaggagtctaaaaacaaacagtaaacaatcaacaaaatggctctagtaagccttacttgtcaataataaaaatggatgtaaattgtctcagttctcagttaaaagacatagaatggctgaataaagaatcatgctgccttaaagaaacccacttcacttataaagccatacatagactgaaagtgaagggatggcaaaatatattccatgcaactagaaaccagaaaagtacaggtgtagttataaacagattacaaatcagacgggaaaaaaaaaacaaaaaacaaagacagtaactacatgataatgaaggggtcagtttagcaagatttagtcattatacttaccaaaacctgagctctcaagcatgtaaagcaaacattaacagacctaaaggcaaaactagcatgcaacacagcaatagtaggagactttaacaccccattctctgtaatggaaagattatccaggaagaaaatcaacacagaaacatcagagttaaagtacacactagatatgaagggcctaactgacatatacagaaagtttcacataattgctgtagaatagacattctttttattagcacaaaaaatgtctcccttaattctatgataggctaccaaacaagcctgtacaaattcaaaaacacaagtatcatatgaagtatattttctgaccacaatgaaataaaacaaaaaataaattaaaagaagaatctggaaaacagacatgaacacatggaaattaaacatactgctaaatgacaaacatgtcaatgaagttattaagaagaaaatttaaaaattttgtgagacaaatgaaaatggaagtacagcataccaacrtctatggaagatggccaaaaaaactgtaagaagaaagtttcttgtaacaaacatctgtatcaaaaaagttgaaagacttcaaataacctaatmctatacatcaaagaactaaaaaagcaggaacaaaccaaacccaaagctaatagaaagaaagaaattataaagaccagaacrcagttaaataaatttgaggctaaaataaacacaatacaaaagatctatgaaacaaaaagttgtttttttgtgaagatgatggagaagaaaagagaaaatcagttaagtaaacaattaaggctggtcctcaaaaatgctgccttcctgaaaactcacaactacaggaaaaatagagcagcttggggaaaaactcagactgcagaagctgcctgcctaaaaaaaaaatcacagctacagtgcacctgcacagataagccacagataagcaggcaaggcatgcaatgtccagcatagaaaccctttgctctttgtatgattagtaagctcccaggaaaaagtgtcctccccttttcagacatgtacacagtgggctccatgggaatttgcaaagagaggaggggggtgtacctaaaacaaacccatcattatacaaacgcaagaaacagcactttgtgctttcctggagacatatccacaatgacagagaataactgggagatatgcaggcggttttatagataagaaaagttactcagttacagagatgaaactatgcaggcagttttatagataagaaaagttactcagttacagagatgaaagcagttcctcataagagcttttgaatacaaccgtaacacagcaaccatcagggaaccctctccactgccgagagctttgtttttttgttattaaatttttgctccaacctcaccctttgtaaccacgcttcttaatttttttggtcctgagatcacaagctctgataacaccttagacaaccagaccagtgaccctgacttgtttcaaagatcaatgatgttaacaaacctttagctaagttaagcaagaaaaacatagacaagatgcaaataaaaaccatcagaaatggaaaaagaagagacataaaaactgagaccaaaataatacaaaactattagaattgttatgataaattaatagtaaacctagaagaaatatatgaatttctggactcaaaacttactaagattgaactataaagcggttgaaaacatcaaacaaataataatgggcaagggattgaagctgttattgaagtaataaaatgtctttcatcaaaataaaaaggttcagaaacttatgatcccacttttgaattatacccaacatgtaacagcttgataccaatctgactcaaccttttcaaaaaaaaaaaaagaaaagaaaaagagaaataaaaaaaaaagggaataattcaaactcattctatgaggataatgttactcttacacaaaaacaaagcatgggcataacaaaacaataaaactacaagccagtatcactgatgagtattgatatggtttggctctgtgtccccacccaaatatcatcttgaattgtactcccataatttccatgtgttgtgtgagggaccctatgggagttaatttgaatcacggggactgtttcttccatactgttctcattatagtgaatgagtctcatgagatctgatggttttatctggggtttccacttttgcatcttccacattttctgttgctgctaccatgtaagaagtgccattcacctcctgctctgattctgaggcctccccagccatgaggaactttaagtctaattaagcctccttttctttcttttcttttttttttttttttgagacagagtctcgctctgtcccccaggttggagtgcagtggcgcgatcacggctcactgcaaactctgccccccgggttcatggcattctcctgcctcagcctcccgagtagctgggactacaggygcccaccaaggcgtctggctaattttttgtattttgagtagagatggggtttcaccgtgttagccaggatggtytcaatctcctgacctcatgatctgcacgtcttggcctcccaaagtgctgggattacaggtgtgagtcaccacrcctggccaagcctctttttcttcacagtatctggtttgtctttatcaacagtgtgaaaacagaaaaatagagtaaattggtactagtagggtggggcattgctgaaaagatacccaaaaatgtrgaagcgactttggaactgggtaataggcaaagattggaacagtttggagggctcagaagaagacagaaaaatgagagaaagtttggaatttcatagagacttgttgaatgactttgacaamagtattggaaatggtatggacaatgaaatccaggctcaggttgtcttagatagagatgaggaacttgttaggaactagagcagaggtgattcttgttatgttttagtaaagagacgggtggcattttgccccgggctagagatttgtgaaactttgaacttgagagagatgatttagggtatctgacagaagaaatttctaagcagcaaagcattcaagaggtgacttgggtgctgttaaatgcattcctttttgaaaggaaagcagagcataaaagtttggaaaatttgcagcctaataatgcaatagaaaagaaaatcttattttctgaggagaaattcaaactggctgcatgtatttgcattagtaatgaraagctgaatgttaatcctcaagacaatggggaaaatgtcttccaggaatgtcagagacctttgcagcagcctctcccatcacagacccagaggtctaggagaaaaaaatggtttcctaggcagggctcagggtccacatgctgtgtgcagtctagagacttggtgcctttcatctcagccactccagccgtggctgaaatgggccaatgtagaactcagaccatggcttcagagggtggaagcctcaaaccttggcagcttccacatggtatggagcctgcagtacatggatgtcaaaaattggggtttgggaacctccaccttgattttagaagatgtacggaaactcctgaatgtccaggcagaagtttgctacaggggtgagaccatcatggaaaaactctgctaaggcagtgtgaaaggaaaatgtgtgctgtgagcccccacagagagtccccaccagggcactgcttattggagcagcaagaagaaggccaccatcctccagaccccagaatgatacatgcacaaacatcttggaccatgcaactggaaaagccatagacactcattgccagcccatgaaagcagccagggtggaggctgtaccctgcaaggccacagggactgaactgcccaagaccattggaatcctcctcttgcatcagcatgacctggatatgagacctggagtcaaaggatatcattttggaactttaaatttttactgccctggtggattttggacttgaatgggtcctgtaacccctttattttggccaatttctcccatttggaatggctatatttacccaatatcagtaaccccattgtatctaggaagtaactagcttgcttttgattttacaggctcatatgtggaagggacttgtcttgcctcagataagactttgaactgtggacttttgggttaatgctgaaatgatttaagactttgaggaatattggggaaggcatgataggttttgaaatgtgaggacatgagatttggaggggccaggggtagaattatacggtttggctctgtgtccccacccaaatctygtcttgaattgtactcccaaaagttccacatttttgtgggagggacgtggtgagagttaatttgaatcacggggcagtttcacccataccattcytgtggtattgaataagtctcatgagctctgatgattttatcagagatttccgctcgtacgtcttcatcattttctcttgccgccactwtgtaagaaatgcctttcaccttccgttatgattctgaggcctccccagccatgtggaactctaagtccaattaaaccgctttttcttcccagtctcaggtatgtctttattagcagtgtcaaaatggactaatacaagtrtagatgcaaaagtcctcaaaaaatacaagcaaacyaaactaataatacattaagaagataattttctagggtaacacagaattcgtgcaagggaggagggaaggatgtttcaatacatgcaaatcagtaaacatgacccaccgtattaacagatccaagaattataggattatttcagtacatgctaaaaaaagcccataaaaatccaaatccctatataataaattataatggttttagatcaycaaaccatcaaaatgactttagakgaaacattctccaaaatgataaaggccatatatgatccatgactaaaatcatactgaacaagaaaaaaattaaagaatgtttcctagggactggaacaagasaaagatgcccactgtcagtcctcttatataacataataccagaagatgttgttagtgcaattaggagcaaaaaataataataataaaataaagtgcattcaaattggaaataaataagtcaagttattcttcattgcatttgacatagtataatatctagaaaaacccaaggatttcatttaaaaattgttagatctgataaataaatcagtaaaattgttctctgtaaaatcaggaaaatcaaaatcatatcaagtatcttcttagaccatagtgaartaaaactggaaatyaacwccaaaaagaaccctcaaagctatataaatacatgaaaactaagtaatttgctcttcaatgatttttgggtaaaaatcaagatggaaattaataaattatttaaaatgaatgataayagtgacagagtgatcaaaatttctgggaaacagcaaaagtagtgctaagactaaggttcatagcattaaatgcctacatcaaaaaggctgaaagagcacaaattsacaatctatattgtcacaactcaagaaacactagaaacaagaacaaactaaacccaaagccatcagaaagaaagaaataggaaggatcagagcagaactaaatgaaattacaacaaaaaatacaaaaggtaagtgaaatgaaataaaaagctggttttttgaaaagataaacaaaattaatagaccattagtgagattaaccaagaaaataagagagaatatccaaacaagcttaattaggaatgaagcaggaggtattacaaccaataccagagaaatccaaaaaattattcaaggctactatgatcactgttacacacacaactaaaaaatttagaggaaatagataaattcctggaagcataaaacccttctagattaaatcaggaagaagtagaaaccctgaacagaccagtaacagtgggattgaattagaarttaaagaaattaccaccaacaacaaaatatacaggtccagaagaattcagagctgaattataccacacactcagagaataattagtatcaattattcccactgaaatgattcccaaaaataaagaaagagrgaattcttcctaaatcattctgtgaagccagtatctagaaaatgatataacaacaacaacaaaactacagactaataaatgacataacaaaaaacaaaaaaatctacagactaatatccctgatgaacagagatgcaaaaattctcaacaaaatactagctractgactccaatagcacctcaaaaagataatacatcctggtcaagtgagtttcatcccagggatacagggatgttttaacatatgcaagtcaataaatggaatacatcacataaacagatttaaaaacaaaagccacataatcatctcaatggatgcagaaaaartatttgataatatgcagcaatgctttataataaataccttcaacaaattaggcatagaagggacttacctcaaagtaataaaagccatataggacaaactcacagccaacmttatactcaatggggaaatgctgaaattccctctgagaactggaacaagacaaggatgcccacttttatcacttctattcaatatagaactggaagtcctagtcagagcaatcaggggaaaaaaaagaaatgaaagacatccaagttgaaaaagatgaagtcaaactatcactgttcacttatgatatgattgtatacctagaaaactctaaagatttcttcaaaagactcctagatttgataaacaaatttagttacatctcaggttacaaaatcaatatacacaaatcagtagcacagytatacagcaataacatccaagctgagaatcaaattwaaaaattccatcacttttttaactgcaaaaaaatataatacctaagaacatacttaaccaggaagataaaaygtccgtacaaggagaactataaaacactgttgaggccaggcacggtgkctcacacctgtaatcccagaacattgggaggctgaggcargtggatcacgagctcaggcgtttgagaccagcctggttaacatagtgaaactctatctctactaaaaagagtacaaaaaattagctgagcatggaggtgggcacctacaatcccagctacttgggaggctgaggcaggagaatcwtttgaatctgggaggcggaggttgcagygatccragatcacrccactgcacctcagcctgggcaataagaacaaaactccatctcaaaaaaaaagaaatgaaaagtagatctaccwttcaatacagcaatgccattactgtgtatctatccccccaccaaaaaaagagtcattatatgaagaaaaaaaaaacatgcacacatatgtttattgcaatccaattaacaaytgtaaagatatggaactaacctaagtctacactgaccaaagagtagataaataaaatgaggtgtatatataaatcattaaatactactcagccatgagaaggaacaaaataatgtcttttgcggcaacttaaatggagctggaggccattattccaagtgaaatcactcaggaatggaaagccaaacaacgtatgttctcgcttrtaagtgagagctaagctgtgagtacggaaaggtatataaagtaatataatgggctttagagactcagaaaggagagggtaggaatggggtgtgggataaatactacctattgggttcaacatgcactacttgggtgatggttgcaataaaatctcagaattaactaatatacaattaatacatataaccaaaaaccacttgtaccccgaaarctattgaaataaraaatattttacaaaacatatatctgctaaaagatacatagaacacatataaataactcttaaaactcgataaataataaaacaaagtaattaaaawgttggataagacatgtcaccaaagaagatacagatggtcagtaaatacatgaaaagatgcttawtattattagttattagggaaaggcaatctaaaaccagaatgaagtactatgcacatattagaaaggctgaaattaaagagacaggtcatatcaaatgttggcaagaatataaagcaaccagaactctccatcgctgctggtggaaataaaatggtaaaatcagtttggaaaacagtttgatagtttcctaaaaagttaaacatccacttaccctgtgatctagccaatttacttctaggtatttagccaagagaaatgaaaacacatatccattyaaagattttacacaaatgttcatcgtaattttatttgcaatgacctcaaattggaaacaatttaaatgtccatcaacagagaatgaataaaaaaattgtagcatatctatacaatgaggtatttctccgcactatgaaggaatgaaccattggtacatgaagagtaaatraatctcaaaataaaaataatgatgctgagtgaaagatgctagtgaaacaagtatacagactgtggttccatttatatgaaactctataacatgcaagcaaagctctattaacagaaaacagatgaatggttacctggctataggagactggggagaagtataagacaattacaaaggaacatgataaaactgttgcggcaattgatctattattatcttgattgtagtaatggtttcatgaatgtttacatgtcaaaacttatcaactgtacactttaaataggtagaatttatagtacatcaattatacattactaaagctgtttaagagaaaaaaaaacaaggtaagcagatgttaaagtygtacctgaagctttcagtagtctcaccaataatctagactggagggatcccatgtgacttttagatatattagtggaactggagattgggcagcgaagtgtggggtagagaagagcaaggtcactggtgagggattcaccctcgggcatgtgcccacagacctaattgagaacaggcactcctgtttttgagcctgaatgttgcattttccaagacctctctggcttaccacgccccccattctgtgcccacataaacctgagaccttagcaggcacacacacaagcagctgaacatcaaggccagacgaccagccgacaagcagactagcaacggcagaacgatgtggcagagaaatagagaagaggagggacctctctagatgcttaggatagttcagcggagaggtggggtggtggggagctggcggcggtcagagcagagtcctgcctctgggcagcccgactgcaggggaagaccaccttcccagtctatccctccttctgctacctatccatctcgctgagagccacctgcaccactcaataaaaccttgcattcactcttgagccccagaggygaaggttgcagtgagccaagacggcgccactgcactccagcttgggctacagagtgaggctccgtctctaaaaaacaaaaacaaaacgaaagaaaacaacaacaacaacaacaacaacaaaaccttgcattcaatccttcacgctcacgtgtgatccgattcttttgggacactgggcaagaactcaggatacataagactgtcacactggccttctgcccttgagataaggcagagggyttattgggctaactaacacacaagccgcctgcagatggcaaagctgacagagcttagtaacactgtggttgtaggyacccagccctagacgctgccatggggctgagagtccaaaacgctctgccctggcctctgcacctgcctggcctctgcacctgcccatctgccttaggggtttgagctgccgggtgaccaaacaggtgagccacacccctgtcacacatcctgccaggggaatcagagaactctcccattttattagcttatgtattataaacatatgatatattttctaaaagcatttctggatgcatatctatatttagtctggtcttgattgaactaatttacactcttagagtgtacaagtgtttcctttcctccacgacttcatcaacatcggtaattttttgactttttaagaacagccactctggtgtgagatggtatctcattgtggttttgatttacatttttctttttttaattaattaacttttttattatacttcaagttctgggacacatgtgaagaacatgccggtttgttacgtaggtatatacgtgctgtgatggtttgctgcacccatcaacccatcatctacatctaatgatcagttatgttgagctttttttcatgtgattgttggttgcatgtatgacttcctttgaaaagtgtctgttcatgacctttgctcactttttaatgttttttttcttgaaaatgtgttttagttccttgtagatgctagatattagacctttgtcagatgcatagtttgcaaaaattttctcccattctttagtatgtttgtttactctgttaatattttattttgctatgcagaaactcttaagtttacttagatactgtttgtcatttttattttcttttgttgcagttgcttttggtgtttttatcatgaaatctttacaagttcctatgcacaaaatggtattgcctaggttgtcttccacggtttttatagtgttgagttttacatttaagtctttagtccatcttgagttaatttttgtatattgtgtaaggaaggggtccagtttcaatcttctgcgtagggctagccagttatcccaacaccatttattaaatagggtgtcctttccccattttttttgtcagctttgttaaagatcagacagttgtaggtatgcgaccttatttctgagttctctattctgtcccattgatccacgtatctgtttttatactagtatcatgctgttttggttactgtggccctgtagcatagtttgaaatcaggtaatatgatacctccagcttcattctttttgcttacaattgccttggctatttgggctttttatttttggttccatatgaattttaaaatacatttttctaattctttgaaaaatgtcattgacagtttgataagaatagcatgaaatctacaaattgctttgggcagtataaccattttaatgatactgattcttcctacccatgagcatggattttttttccatttgtttgtatcatctctgatttcttgagcagtggtttgtagtgatccttgtaaagatattttacatccctggtaaactgtatttctagacattttattttattttttgtggcagttgtgaatgggattgtgttcctgatttggctcttgacttggattttgttggtatataggactgctagtgattcttgcacattgattttgcatcctgaaactttcctgaagttgtttatccgggctatcgaacagataatgctttctgtactaacactccagcttctattctacattgtatgaacttggaataccatagtggtttccttttttttttttttcctatgtacttcaggatggaccatcatcctgaaaaactcttttttttttattcttgaagttttagggtacatgtacacaatgtgcaggtttgttacatatgtatacatgtgtcatgttagtgtgctgcacccattaactcatcatttaacattaggtatatctcctaatgctatccctccccactgcccccaccccacaacaggccccagtgtgtgatgttccccttcctgtrtccatgtgttctcattgttctattcccacctatgagtgaraacatgyggtgtttggttttttttccttgtgatagcttgctgaraatgatggtttccagcttcatccatgtccctacaaaggacaggaactcatcattttttatggctgyatagtattccatggtgtatatgtgacacattttcttaatccaatctatcattattggacatttgggttggttccaagtctttgctattgtgaatagtgccactataaacagacatgtgcatgtgtctttatagcagcatgtttcaaarttctttgggtatatacccagtaatgggatggctgggtcaaatggtattcctagttctagaaccctgaggaatcaccacactgacttccacaatggttgaactagtttacagtcccaccaacagtgtaaaagtgttcctatttctccacaccctcttcagcacctgttgtttcctgaatttttaatgattgccattctaactggtgtgagatggtatctcattgtggttttgatttgcatttctctgatggccagtgatgatgagcattttttcatgtgtctgttggctgcataaatgtcttcttttgagaagtgtctgttcatatccttcgcccrctttttgatggggttgtttttttcttgtaaatttgtttgagttcattgtagattctggatattagccctttgtcagataagtagaatgcaaaaattttctcccattctgtaggttgcctgttcactccgacggtagtttcttttgctgtgcagaagctctttagtttaataagatcccatttgtcaattttggcttttgttgccattgcttttggtgttttagacatgaagtccttgctgtgaatccgtctgatcctggactttttttggttggtaagctattaattattgcctcaatttcagagcctcttattggcctattaagacattcaacttcttcctggtttagtcttgggagagtgtttgtgtcgaggaatttatctatttcttccagattttctagtttatttgcatagaggtgtttatagtattctctgatggcagtttgtatttctgtgggatcggtggtgatatcccctttatcattttttattgtatctatttgattcttctcccttttcttctttattagtcttgctagcagtctcctaattttgttgattctttcataaaaccagttcctggattcattgattttttgaagggttttttgtgtctctatctccttcagctccattctgatcttagttatttttgccttctgctagcttttgaatgtgtttgctcttgcttctctagttcttttaattatgatgttaggttgtcagttttagatctttcctgctttcttttgagggtrtatagtgctacaaatttccctctacacactgctttgaatgtgtcccagagattctggtatgttgtgtctttgttctcattggtttcaaagaacatctttatttctgccttcactttgttatgtacccagtagtcattcaggagcaggttgktcagtttccatatagttgagcggttttgagtaaacaaagtggctgggaagttcgaactgggtggagcccaccacagctcaaggaggcctgcctgcctctgtagagtccacctctggggtcagggcatagccaaacaaaaggcaattgkgggagcccctcccccagcctcgctgccaccttgcagtttgatctcagactgctttgctagcaatgagcgagactccgtgggtgtaggaccttctgagccaggtgtgggatataacctcctggtgtgccatttgctaagaccatcggaaaagcacagtattagggtggaagtgaccagattttccaggtgccatctgtcaccctttccttggttagtaaaaggaattccctgaccccttgcacttcccagatgaggagatgcctcgccctgctttggctcatgctcagtgcacygcacccactgtcctgcacccactgtccaacaatcctcagcgagatacacctggtacctcagttggaaatgcagaaatcattcgtcttctgtgtcgctcatgctgggagctgtagactggagctattcctattcggccatcttgactccaccctaccatagtggttttcatttagcatgtccaattaatgttggctgaagggcaaatttgcatacyttctgttatacaatattagattcaagaaacatttcctagttagatacagtgtccttcaaccttgacacattcagataaaatagatactacttcacataaagtatgttcaaaaataccaactttcctatacattttccttttcatttcattaacctttacttaagctcctttaggactttatcagcaggttttgtgttacaatattatcaataggcagaacaagtgtttccagccagacataaagtccatttcataagacatttaagttaaaaagacacactttctttaaattaagcctgtttaaatatcacaaatttcataattctattaatctttatatttttatggtttctcaacctaactataacctcggtcaaggcttccccaatgcatcttggtagcatatcacatggggtcttgtattaaggagtctctggaatttctgttccctatcccctgacagtcttacacaaggctttgggtcaacagcagggccttaaaccaataaaccctttttttgtgtgttaatttttatcttgattaatctgcctcagcattatctgaagaaattattaagcagctttctaactgtgatctctgcattcctgctttttaaactactccacactgcgataaatgaaactgattagtttggggcccttttaggttggattaatttcaaaaagtctcatttgaccaccttacctctcataatgttgtgttgagacctttttttagccatgttaattttcatttcattcatcccttttcttaataaatatccaataattttcaccctgctgggaagagttccatgactctctccatttctttttctctcagtctcactccacctatgttttttcagtttactttatttcttaataactgtaaaatttccaccttcagtaaattgaaaactgttagagcagacaacaatatttaaaatttttcattttttagtgcctcaaatgttgttgtatcwttgagcacagcatcatggtaaaattcggatgaataaaaggcataaacttatctggaaaagaaaattctttcaagtgagggcatatgaagattctcaccaaagtgaacttacagttggtacagtgtgtctgcagcccaactgtaccagaagtgtccagtctccctcttaccaagactgagctagcttgagtcagttgagcccaggggtatccttcaaacactacctccctctatgtacacccacctatgcagcactggagtggacagttatttcgtgcttcatctatggtggatgttaaattttaccaatccaaataatataaaaatgaatcactgatttgattggcaaatgcttaattataaatctaatcaaccatctctttttgtttgtgattcattcaggtgttttgttcatgtactgcacycatttttctcttgtggtaccgtctactggttcttctttgggatacagaagatacaaagggcaaatttataatttgttcaaattctagaatcctgagtcatgatgacagtggctcagagtgattggcaaaggaacaagatcaatgaagttcagataaactggtaaaaaaaaaaaaatgaggaaccctaggtcagagaaggtaagctctggagctggattgctcacagtgagaacctgcaggaggcaagagacaggatagaataaaattaaatttgagagaaacacattgaatcagttcaaaatatttcagtgaagcatagaatgagtgrttaaaaccaggaaaccataatgacagagcttcagaagtaaagcaggcaatcaggagggctctaacatgtggtaatagcaaataacactttcatattttaatcagcttaatggcaattcctacagtattaggtgatttctgttggaagctctatcagtcaaggttcagtcagaaaaagagaaagtttactaattcaccttattgcaggttttgttcattcttttattcgttcattcggttccattttattttgtgaactctattacattttatacaatcagtgactgtatttctaatttccacaatttctaaatgttcctctttctattcatgcttctcacccaattccatttttatgttaagtattttctcatctctgagaaaaaaaattattttgattttttcctatatttataaactttgggtgaaaatcttactattgtgtagaattggttatttcctcatgtggttttcatgagttaatcttcaacagctgttaatttctgcaaactttcatttcctgcatgtgtctgctgtcatctagagagatcagtttcattataatttgttttaattttttagttattacaacttacattttttcagaacagaaattccctgaactccgtaggtaaattttgttttccacttttaaggcttttgccacattttttatcctgccaaaaccatcttgttatagctcctataagaatctattcatataattttctctaatgctaacaactggtgtgtaagttttctcagttgtatacttacctgagtatattctatgccgtcttctcttcatggtatatgtgtttggagcagaaaaggtagtaaagacttgggtcatgaatgrtaagcacagtccactccactgaatgaaattcttaaatgtgtatatttgaaaggtaatacattctctttaagtttataattattttaattgtatcacattatatagatacatatgatatatatacttcagaatttgtggagatttcatctgtgacattgccttagtttaattttataaaagttttcatgtgcacttcaaaagaatatttatactctatttgaagatgcaggattcagtacgttatttttgttacttttgttgctaatacaatcaactttcatagaatttattttctctgttcaatctatcagtttctgagatatatttcaatctccaaatacttattattgttaattttaagtgaattatttctatccacatgaaatgattcacttatcacatttgatacttcgcatcttaattctgctttgtttgatttttgtagcattgcatcaattttcrtttatttgctattgggtatatgcctcttgtaaaatctgtatatattttatagtaatatgggtaatttttattaggtgtttctcttttaaacaaaaataaaagctagattgaaatatctgagaatctctaccataatgggtgagtttatttaattcttttttaaattgatatataactattacatgacattaaatgaaaataactttttacattaaattattagtttgagcttatctgtaaatatttactatttagatttaccatgttttagcttactacactctccwttttctgtattttatggaaatgataatttatttattctcttaagctgttaatgaaaagttatgcatagatacatttccaaaatgtctatgcgtaaatggcctagaagtaataatatcccagatgcaatgaacatgctaagtacttgaaattttgcttctagacactatactccaataaaacgaaccatgccttcctcaagatataaatgacattacccctgaggcaacaaaagtacaggatgtgcctgaaatatctaggggtgccagaaagtaaataagtatacaacatgatgacaacatatcagaaaaatatagarggaaactgaaggaagtcccaatgaatcgaatctggaccaatttgagcaatggaataatgawagctgtggattktaacctttggaataaaccaaatactcatgaaatcatattgacagaaaccagtataaggaaataaaagggaaaaaatgttctttcttagagtagaatttctcttactaattgttaaagaaattatagacatagaaataatcattagacaaactccacagtaatttaattcaggcaaaaattatctttgaatggatgctaaaattagagggaaaggatgtaatggaaacaggatatttacagtctcaaagtctcctatcaagatacttctaattccaaaatgagaaattataattttacagggaataaacctgtagacagcatcttaaccaagaaatcaaagttagtatcaccagcatgacaaatcaacactatctgctgcccaaaaatgatgtaatgtgaagactacaacaacatgtctgcagtattctttcaaaaaatgtgtgatagcaacttaatcatgaaggaacattaaacaaatgtaaaataagaatcattctacaaaacaactggtcaataattcatctagaagtcaaaaattaacagagacaaaaaatgaagggataattacagactaaaggaaactaaagacatgaaaatgaaatgcactaacccttactgtattacataatacgttcctctttgcactttccacacaaaaactagagagtttttccttaaagaaattgaaataaattcaccagggtaaaatgagaaaactagaattgatgtaacacatcaaagtataatcttttttatgaaatttttggttccctttaggtaaggtctagtagttgtacgcgttcagcataaaaatcaaagccaaccagatactaagtccttcacagatacaaagatatcccagtgaatcattctatgtcctcattcttaaatatatagatagatgataaatagataatagatagatagatagatagattagatagataaatatatagatagataggcagacaacatttgaaaaaagaaaataaaatgacagattaaagccaagataaacaaacaaatacatggagatttgtgcacacacacacacacatgaaccagaataattaacccagaaacagaaaactaaatactatgtgttctcacttaaaagtgggagctaagcttggggyacacatagacaaaaatgggaacaatagacagtggggactactacagagggaagagaagggcagaaggcctgaaaaactattgggtactatgtaaaaatgtatacaatatgcattctatgccattacaatcattttatcaaaatatgtataattacagtgtcagctataatacaagaattgtcggaaactgagaaacaaaatgatgaatagaactagatcacaatttttatgcaggatgaaaaggaatatacaataagattaaaattatctaaataaacatcacagtgaattatataaatagaataaaaaccataataaaagcatacaaatttaaatcaggaatagctctagacagagagtatgagggaaatttaatttttttaagcttttcatactytaatattttgtacactgatatattattttcatgaagatatcccagaatgagatcactgatgagtgtataaacagacaatatgctacctcaatattgggtggatgaagaagactctgggcagcgaggcattgagaaaaaacatcaaacacaagttccattaaatgtggctacaggtctgaaagaaaaataatcttgaaaacccaaagtcactaagtcaaagggaagtcaagctggaaactgtatcagccaaacctgcctcccattttattcctaaataaaatagctacaaagttgggtttttgttgttgttgttgttgttgttgtttttaagttacatacctcccttacaatcttcccaagaggaaattccttgtgggcctcaaaatctttaacctgaaacatttctgttgaatttcaccctggaaatgtaaattgatagcttatcttcacaggtgagggacaaaagaggacagaactcaaagccatcccttcaccattgtttatggaaaaaatgcagatttactgagtcagactaaggcataagtgactatttctcaacccttctctcatatgtatactgtgtattcagcaaaaggctcatctaagacccaaaaaagaatgcaaccttttaactcttatctatgacatgaaggcatcactttgaattgccccacctttcctgaccaaaccaatgtacrtcatacgcatattgattgatgtctcatgtctgctaaaatgtgtaaaaccaagctgtgccccaaccaccttgagcacgtgtcattgagactttctgaggcagtgtcatgagcatgtccttatccttggcaaaataaactttctaaattgagaactgtttcagatactttgtgttcacacaggtaacgagtcacacagaatacctgggagccccaagaactacctggaatagtagtacagtgactctccaattaaaactaatgtcataaggctcaaattatatttttgaaaaatacttggcaaaatatgttgtgcatacacaaactttargatttctttttttaaacaagtttttaaaagaaagtttacctcccatgtttaggatctgaaagtataccggttatgtcagaatgggttcatcattattttacagagaaaataaataaataataaatggaaaacaaaagaaacaacaacaacaaaaagatgggtattcaattttgacattatatactgaaaacttttggcgctacatttctctttctctttattttgtcttgataggcgtatgcactgagcaatgtggaattayactatgcatttacatttacaaatgagaacataagggaaaccacaattcagagtaattctcaataaatttcaagcaaacacatattcaacaagggctttatattgtgtgaatgagctactcaagatagtgaagagatctccactggaaaaatgactggtagattcttccactgaggattaagtgcccctgtgagacacagaaaagtgatgatgagggtccctcacaggcagttataggtagcacatcagttgtttgtttggtwkgtttgttttgttttgttttgttttgagatggagtctcgctgggtcgcccaggctggagtgcagcggcacaatctcggctcactgcaacctccacctcccgggttcaagcaattctcctgccgcagcctcccgagtatctgggattacaggtgtgtgccaccacgcccagctaatttttgtatttttagtagagacagagtttcaccatgttggccaggatggtcccaatctcttgacctggtgatctgcccatctcgacctcccaaagtgctaggattacaggtgtgagccaccatgcctggccagtagcatatcattttatgcagtgtgatttcaggaaaaaaagtgtcttagtaatatttaaacaatgacctgagaaatacaatcactcagttatgtaactatatactgcataattctgtattataaatgggattctcaggactagttcacagaaatttcacaccacagtatcagactcttgaatctccatcattattaaacttcagcttttaaagatttttttttagggaaaaagacataatctgacaagttttaaatgaggtataaagaattacagagctaaagaaatagacatataaaattatttcaatagtaacttttcctcactgctcatagccaggtaatggttccaatgactcccaactaaaaatactctacagaaagaacaaacaaacaaacaaacaaaaaaccctgccttaataracacaaggaatttagtagaactacaacatatggaattaaacacaacaaatgccaccttccaagaacccatattagtaattacagtattgtaaatgaagagtctgggtataatattttctagcattgtctccttcttctatagtgtcatagttgtttttcatcttttccttttacagacacacrtatttacacaaatagccataacagatgccatgtatatcatattccataacttcttccaaagaaagagattaggtcagttaaaaaatagccattactccaaaaatttctgataatgcttgattttctcttcttagatgtatgtactaatcttttctatagtgtttgctatgctgacactcttttgtgatagaacaaattcttcacagaaaatggaagagtttgtgcagagctctggagaaaatggtgtcgtggcagtcttgcttaagtctatggtcagtaacatcacagaagaaagggccaacgtgattgcatcagctcttgcccagattccacgaaaggttagataaaatgtcttaatggtggacagctactgaatgagtctgttaaactctgtaaagagtccaatcayagaaattttctgccagaaaaactaactgatatgatagctctaattatctcagatattggttcaaaaacaaaaatatatatggaagatactaaaataacgagggtgtgtttgattgataaaaattctgacattaatattgtgatcagaaaaaatatatttaagaggtgcaggtgaagttgtggtattatcatagtattgtaggcatgtacatagaaatcaccaaattctgccctgtcatttgtcccttttgcttacaagtttcctgagaacatggtatacactatagatattatttaaaatcacttacattttaatcagttactgcactattacaataacaataaggtattgaaaaaagtctgaaatgcatcattcaatttaggcttgctaggtaatctggtctcctgtacttcctgtacattttggaatagacctatttagtaggcaattcagaatgcattcagagaaaagatgtccaggctgacaaaccgctattctggaggtatccacctagccaagtagatttagagaagcagaagaacttgcctgccctgtttactgggccttgctaatgtcttaaacaggaaaatatgatagaaaaggarggaacagaatcctgcttttagggtagactccgtgcattataaaatgtggtcccataaagcctctgctctaaccatcagaaaaacacctcctcccaayggaggaaggagaagggaatataagaaggagtcaagcagaaggaagccaggcatggaaagaggttcagatgccctcactccatgaaatatagtaggaacttattttgtagtatgcagaatacacttgaagtctttgtgtatttgtgagttactttttagtttcctctctgacatagccttctcctaatgacctatgctaatttttttctggaaacacaaagttactttaacactcacatagcaaatacaaggaaaacacttgtaaattacactccagtttataaggattgcttggggaatctaaaatcagtatcttattttggtactgtctatgggtatggcttggctaaagcagcccatattaatctatgctgtcgatgctttatagcagcatctaagtgttaatgatcagttaagcaaaatttagcaaaatataattttacaatttttagtgtgtatattcttattcataaattgccaattggctcttttcgcctacattggaagaatttccaaaactagcaaaatgatagtactttgaatttgactcagaaattgccacttgcactttgggatgcctaggtgggcagatcacttgaggtcaggagttcgagaccagcccggccaacatggtgaaaccccgtctctactaaaaaatataaaaattagctgggcatggcagtgcatgcctgtaatcccagctacttgggaggctgaggcagaaaaatcgcttgaacccaggaggcgagggttgcagtgagctgagatggtgccactgcactccagcctgggcaacagagcaagactccatctcaaaaaaaaaaaaaaaaaaagaaagaaaagaaaaaagaaaagaaaagaaagaaattgtcacttgaaatttttcttggatgtagtgctgggtaatgtgtaatctacaagaagttatatgtactacctatgtagcactgatttatttctcacaggtagctgattttatagattttgttttttataaatcaaagatgtcaaacactaacaaaataacttacagaaaaatatatataagtaacacttctcatttcactcaagaaataaactaacattaaatttggaagattacaggtagtataaaatacataaaataaatgtataggttgtcactaatttgttactgtattttacagtagaattataatgactgtctaataatttcttaaatttttgaattttttattgatactctcaagtgtctaagcttctctgttgaaaacatcatgattttctaatataccaaattgataataaaagacatgaaatgtggatattcaatagtcttttagtagtactcatttcctaaaattgcttgttctcgttttttcatctattatatggaaggggtttaactagytgattgacaatttctttagagttctaacatcttatagctttggcattctactcatggaacaagatattttctttaccccaacaggttctgtggatggaaagagaccaaatactttagcatccaatactcagctgtacaagtggatatcccagaatgaccttcttggtaatactctgcagaacaaatactgaatatatgactaacagctaattagarggatagytcaacctgaaagaaacttacggaacatttattatcaaaaaactcaaatataaaggctaactactttatatttattttccagtcttaccaggaaaataactatatagttggtattttattatagacactcacattctttatgttcagaatcaaattatctttatttcagatataattacctctcacggggtttcccaataacttcctggattgtctctctgtctcctatttgtacagctttacacctgtccttttccctacttcagggttaatttcaaaagacactaaaaaataacagtgcctcttttattaccaataactctgcattttctgaaaataaatmctcaatctttttttttttttgagatgaagtctcactcttgtccccaggctggagtgcattggcatgaccttggctcactgcaaccttcacctcccaggttcaagcgattctcctgcctcagcttcccgagtagctgggattacaggcacctgccaccaagcctctctaatttttgtatttttagtagagaccaggtttcaccatgttggccaggctggtctcgaactcctgacctcaggtgatccacccacctctgcctctcaaagtgctgggattataggcatgagcctccgcacccggcctaaatcctcaatctttatcataaagtgataacacgtttcctgatgtaatgtggcctgcctttcttctattccaataccaccaccacactccctgttgccttgcatacaccacatatcccactcagaccgcagtatgtatttaagggaaaatgctctaacatacacaatattattgattttcttttctctttttttttgcacatttttttcattcagaatgtgctttttcattttgtccacctggcaatatcaattcattttttgagtctgaagtcacacacgcccccacctcttcatgtagccttcacttacctccagaagaattaggtgcttctttctctgaaatcygaaagcaattctaatggagtttgatgtgtataataatctgttatttagtagacactgcccctttcagagcattctattgtgcatttctcattttagtcttatgaataattttgctaaaatttatccaatcctaggtcatccaaaaactaaatcttttatgactcatggtgaaaccagtggcatctatgaggcaatctaccatgggatccctatggtgggcattcctttgtttgcagatcaacctgataacattgctcacatgaaggccctcaatgtggacatcaggaccatgtcaagtacagatttgctcaatgcactgaagacagtcattaatgaccctgtgtgagtatgacaattttttttactatgtggtatttacagattcttttgacaacactgaatacatgtcttaccccttttaggagaccaattttgaaagaatttaaataatttaaccaacttgaaacctgcttttatttttcaccaattattttagttacatttgatcccatatatttaatgggtcaccaattactgtaacaaccttctacacacaaatatttttaaacatatatagataattgtttaaaatataagttttttgaatgatggattataatacaatgaaataatgaacttggagaaataaaataaagtatttcaattcaatacataaaatttctgaaagtataactgtattcatgctcaataatgtatttttagtattatcattattttaagatacaatttgcatagcataatatttacctatttaaaagtgagatctaaaagtagttagtacatttacatagttayaaagccatcaccataatataatttttgaacatttttatcaccctaaaataaacctcaaaatgcataaaatcactgttgataaacctccagtcctagggaaatatcaacttactttctcaatagattattctctctggatatttcatgtaaattaaatcatacaatttacagtgttctataaatgatttctttgacttagtacaatgtcttttattagtttcacccatattgttgaaagtgtcagaacattttttctttttattgctaatattctttgatgaatgtaccattttgaatttacccatttatcagctctcagacatttcagttatttccaattttagctcttataaacactgctatacatattttttgtgaaaaaagttgttttcactaattttgagaagatactaggagtggaatttctgagccatatggaaagttgatgtttatgaagaactgctaaactgtttttcaaagtacttgcaccgtttttcrttacttctagctgtacaggagggttccaatttcttcatgctcttccctacacttgttatctcctatctttttgttacagggatcccagtggatataaaatgatctttcattgtggatttaatttgcattttccttgtggctaaagacataaccatcttttcatgcacttactggcaagtmattcgtcttcttttgagaaaattttattcctatcttttgaacatttctaacatttttatcttattattsattcataagaattatttttatattattggtggaatgccttgtcagtctatgatttttaaatattttctcccactctttataggttgattctttttttttactttattgaagatgtcccttgaagcacaaagttttaatattgagaaaataaatctgtaataatttttctgtgctccaaaagaaataatgtagaaaatgctgtgactattgattactattatcaatatatatawggaggtaccaccttagaaaatatactgaaaataccttaccaggaagataataagacagtgaatgattaaaaatagtttaaaagcaaacaggaaagaattagaaaagaaacatacagcagattggaaaacagaaaataaaatacagaataagatagtagatttaaaagtraatctactagaactcatactaaatttaaacagagaaaaaaaagtgacttaaaaataaacatttgaagagcataaatataacctattgtatatatgtgtgtgtatacatatatatgtattgtgtatatatatagtaagtttgtgtatatgtgtgtatatatatatatatacacacacatttttatgtgtggaggtgtggaggtgagtgtgaatgtatattgagaatatacgtttattaagagtatatggaatagttagtgaattgaacttctgctgggccaaaaatcaggacttagcaaatgtgataagattcraaagcataaaaaggaaatgctctagccatactagaaataaattcgaaattatccaaaaaattataacttaaaaaacaactctaaattttggaaattaaatttgtgtatttaaaaagctagtcaacaaaacatcataattctacatgcatctttttctcagcaactcatctctcaagtatatacccatcaaaaatgtattaatatgtatatctaatgatatacacacatttgcttacyccagaattagtaatagtgwtcaaaaatcttaacaacccaaatatccatcagtcataaaaataggagataatctgtggtatttgtcaattgactgaatcatattacagcaatggaattagccaataacttctacccaaaaaaagacacaaatgagtatatattatataattcattatgtaaacaagcaatattaatctattagaagtcaaggtagttttaacttgaggacaaamgtagtgactaaaatggcccaagaagacagagtttttctaggcaggttgtgatgtcttatattataatctgcgtagtaggtaagttggtgttcacatcaggatattgttcaaggtaatgttaaaattttgagctattcactgaatttgtgtacatttatgtattttatacttaaagttttatttgagaagacatgtaacatatttttaagttccaggagttaaacagcaaaataagcacaaaacaatagaggaaatcctacaggtactaccatagtgtggccacgaaaagcctctttaacaggtattatttaaggggaagcctcaaaaagwtatagaagcaagcctcaagttgttgcaaggaggaatattccaagagagggagagaggggataaagggtgtaaaggggctcaggtgagaacacattggggagctcaaagaacaatagaagggcaatgcctctaggagagaaggtggttggggaaagtgttagaagaagttgcccatgcctgaccatgtagggttctgtagaacaaagacagatttagattttattcttaatatagtgagaagccaggtgaaaatcttatcagaggaatgccataatctggcttttatttcaaaaaattattctgactactgagaggaaaatatggtagaacacagaatagtagggtagaaagagaaagactaatttagaaatattacaccagctgtgaaacaatttttccttaaaaatatcaaaatgggtcgataaaggtagttcacacctgtagtcccagaaatttggaaggctaaagcaaaaggatcacwtgagcccaagagtttgaaaccatcctgggcaaactggtaggactccatctctacaaaaaaatatttaaaaattactgggcaaagtggtgcatgcctgcagtcccagctactcaggaggcagaggtgggaggattgtttaagcccacactgtggaggctgctgtgacccataatcatgccactgcactccaatctgggccgtagagaaagactctttctcaaaaaaaaataaaataaaatatcaagatgatcaatctcagattgcatttccactgtcttacctgtagcacatagaatggctcaaaatatttcctctgctacaaagacattaactttctcatcagaccttccatttttaatttaagacatatttttctttataaaattccattttaaaaaataaactttctacatttgtccaaaccaaaacattcgattcctatgacaattctataatatttactttgaagcattgatgtgacacttttcaaagaccatccatagacttaggaaataaatttactttcaatgttggtatttttatgtttatccttcagctacaaagagaatgctatgaagttatcaataattcgccatgatttgccaattaagcccctggatcaagcagccttctggattgagtttgtcatgcagcrcaaaggagccaagcaccttcgggttgcagcccacgacctcacctggttccaataccacaacttgcatgtgattaggttcctgctggcctatgtgtcaactgtgatcttcatcatcacaagatgttgcctgtttyctttctgaaagtttgctaaaacaggaaagaaggagaaaagggattagttacataaaaggcttgaagctggaatgaccaaaagatagaattccttcagttaattccagcatgaagaggttgatacagaggatttccttcctcctgtgacaaaacatatttttataacttacactgttaggtcaaaatttattttccagagatttagtacctatttaaaagttagaaatattcttagtcaaatacttaaaaacaaggaaaaataaaaaataatgtaaaaccatatgggtttatgtgaaatacattattctattcacaagtggcacatgcacaaaaattactgagctgtgtttcacactttatacattgacccaatattaagacatccgttcacaatattaataccattttgcaaatactcagaattctttggtttcattttcagcagaattttgttgtttttactgttgcaaagaaactactcaataattaaattgtgaagaaagtctcactcttccttttgatattacaagaccagtagtgttgcttggcttttactatgttcaagactcagcattgcttctttcctaaaagaaatgacaaatttatccctagatttaaggataatagaacacacaaaaatgagcaaatgtgacatatcaccttaacccaatgatgcataaaaatcacttgatatatcagtaaatgcaaaacaaagcatttgaaaaaaatcaattgtttatgagtttttaaaagagagctctaaacaaactagaaatagaaatgatatcgggggaacaagcccccaatatttcaatgtaggtcttttctattttccctaattggtgactggtctgagaaataaagagtaagagtaaaaagagagaaattttacagctgggcctccagggttgacatcgcatattggtaggactgtgcagacgaccctgagctgcaaaaccagcaagtttttattagggattttaaaagaggagggggtgtataaacagggagtaggtcacaaggatcacatgcttcaaagggccatatagatcacaaggcaaaggcagaattagaattactgatgaggctctatgtcctgctgttcccatattgtttttataaacatcttaacaggaaacagggtttgagagcagagaactagtctagctagaatttaccaggctggaatttcccaatcctagtaagcctgagggtactgcaggagaccagggcatatttcagtccttttctcaaccgcataagacagacactcccagagtggccattcatagacctctccccaggaatgcattccttccccagggttactccttgctgggaaaagaattcagcggtatttctcctccttgcacatccatttataggctttctgcaagaagaaacatatggcttattctgcccaacccctcaggcagtcagaccttatggttatcttcccttgttccctgaaaattgctgttattctgttgtttttcagggtacactgatttcatattgttcaaacatatatgttttacaaacagatgtcatattgttcaaacacacatgttctacaaccaatttgtacaatagtggtcctgaggtgacatacattctcaacttatgaagacaacaggattaagagattaaagtaaagacaagcgtaagaaattataatagtattattagggaagtgataaatgtccatgaaatcttcacaatttatgttcagagattgcagtaaagacaggcataagaaattataaaagtattaatttttggaacagataaatgtccatgaaatcttcacaatttatgatgttctgcctcagctccagccagtccctccattcagggtccctgacttcctgcaacaagaaatagaaggaaattatcttaacctgataaaggcaatatatgaaaagctcatagctaacatcatactcaatgattaaaaaaaaactgaaaacttttcatctgttttcacaataaggaaaggatgttcactcttgctgcttctattatacaccatactggaaatcctagccggaacaattaggcaagaaaaagaaaaaaagcaacaggcttctgaatcaacagtaaaataacctctgtttgcagaggacatgatattatatgtggaaaaccctaaagatgccaccaaatattattagaacaagtgcataaattcagtaaatttgcagcatataaaatcagcatacaaaaatcacttacctttctgtgtattaacaaagaactatcagaaaaggaaattaacaaaacactccaatttgcaatggcctcaaaaaggacaaaatacataagaataaactgtaacaagtggaagaaagacatgtatactaaaaactacaaaacactgatgaatgaaattaaagattatactaatttagaaagacatagtatattgaccggaagatttaatgttacagaaacatctatacaacctaaagtgattaacatattaaatgtaatctctatcgaaacaccaatgacttatacaaagacaaaaaaatcttaaaatgtataatgatccaggaagaagtaactagccaaaacaatgtgggaaaagtaaaacacagttatagggcatcacatctccttatttcaaaatatattaaaagctacagttattaaaataacatgatattcacataaagacataaatagagagagatttaagtaacagaatagagagcccagatgataaagtcacaaatatacaatgcacttatattcaatgagtctcaaatatactcaataaatgtcactctcttcaagaaacggtactgcatgagaacaccagatgtccacatgcaaaagaataaaattggacccttagtttatgtcatatacaaaaatcaacacaaaacaaatgaaagacttaaacataagccctgaaactataaaactctcacaataaaacacggaaaaagttttatgacattgggctgggcaatggtctattgggtatgacctcagaagtacaggtaacaaggtcaaatatatgaaagtagaattgtatcaaactaaaaagtttctgcagggcaaagaagtcaacagagtgaaaagataaaatgggaatgggaaacagtttcaaatcatatatctcatgagaggttaacacctaaaatatattaggaactgcaacaactcaatagcaaaaagagaaaaaaagccatgattaataaataggcaaatacttgaaaaagacatttctctgaggaagttgtacatatggacaacagctgtatgaaaactaattaatgtaaattcatcatcaggaaaatcaaaactgcaatgagatatcacctcatacctcttaccatgtctttatcaacatacagacacaaacacacacatacatatatacacacacaataaaagttgttggctaggaaatggagaaattgaaactttcatacactgtcagtgtgaatataaatttttacagccaaaatgaaaacagtgtagaggttgctcaaaaaattaaaaatagaacttccatatgatccacccatcctgcaatatgtaacaacatagatgaaccttcaggaaataattttaagtgaaataagccagtctcaatgggacacatactctatgattctacttgtgtaagaaatttgaaacagtcaaactcaaagaaacggagagtagaatggaggttaccagtggctggagaatggaggaaattgagagttgcttttcaatgagtataaagttccagtaaaaataagatgagcaggtttcagagcactgctgcacaacattgtggccatagttaacaataatgtatcatacacttaaaatacttttaaaagagtagatctcattttattttcacttatacaagacatacttccaagatattgcagatttggtcccagaacactgaagtaaagtaagtcaaacaaaattttctggttttccatggcatatagatgttatgtgtacactatactgtagtctcttaagtctgcaatataaatatgttacaaataatgtacacactgtaatgaaaatacttcattgctttaaaaatcctaacaatcatctgagcctgcagtgagttgtaatcattttgtaggtggagggtcttgcattgatgatgacagctgctaactaatcagggtggtggctgctgaaagtttggggagctgtggcaatgtcttttaaaaagacaaaaataatgtttgctgcacccattgaccttccttctttaaaaatttccaacttttatttaaagttcaaggtacatgtgcaggatgtccaggtttgttacaaggtaaacgtgtgccatcgtggtttgctgcacagatcatcccattacccaggtattaagcctagaatccattagctattctttctgatcctctccctcctcgcatcccctgacctccaaaagtccccactgtgtgtttttaccccccatgtatccatatcttctcattatttagctatcacatataagttaggacatgtggtatttggttatctgtttctgcattattttgctatgaataacagcctccaactccaaccatgtccctgcaaaggatatgatctcattcttttttagggatgcatagtattccaaggagaatatgtaccacattttctttgtccagtctgtcattgatgggcatttaggttgagtccatgtctttgctattgtgaatattgccacaacgaacatatgcatgcatgtgtctttataatagaacaatttatgttactttgggtatacacctagtaatgggattgctgggaaaaattatatttctgcctctaggtctttcaggaatcaccacactgtctttcacaatggttgaacaaatttaaactctcaccaacagtgtaaaagtgttcctttttctccacaatctcaccagcatctgttgtttttgacttattaaaaatagccattctgactggcttgagttagcatctcattgtgattttgacttggatttatctgcagcatgcaatgcaatttggtagcattttactcatgatagaacttcttttaaagttggaatcaatccacttaaaccctactgctgctttatcaaataaccttaagtaatattctaaatactttgttgtcatttcaacaatgttcacagcatcttcaccaggagtaggttctatctcactataccaaatttttttgctgatccataagaaagaactcatctattcaagttttatcatgagattatagcaattcagtcacaacttcaggttcttcttttaattccagtaatagttcccttactatttctaccatatctgtggttacttcttccattgaattcttgaagctctcaacattatctatgatatttgaaatcaaattctgccaaattcctgttaatgttgatatgtttacttcatttaatgactcaaatgttcttaatatcatctagaaaggtgaaacttttccagaaagtgttgaatttactttgacaacgtccaacagagaaattgctgttaatggcagcaataatcttacgaaacttattccttaattgacttaaaagttgaaattactttttgatatatgtgttacagaatgaatgttgtattaccaggcataaaaacaacattgatctccctgtatatctccataagagctcttgggtgaccaggtacattgtcaatgaatgctaatatttctaaaggaatatttctttctggtcaatagatctcaacagtgggattaaaatatttagtaatttatgctgtaaagaaatgtgttatcaaccaagctttgatattccattaatagagcacagagagagtagatttagaataatttatctaaggccctaggatattccaaatggtaaataaacagtgacttcaaccgggtgcggtggctcatgcctgtaatcccaccactttgggaggccgaggtgggtggatcatgaagtcaggagatcaagaccacagtgaaaccccgtctctactaaaaatacaaaar

SEQ ID NO: 94178 - DNA, 13052 bp, Homo sapiens
tctctcactctattgcccagattggagcgcagttgcatgatctcagctcactgcagcctccacctcctgggctcaagtgatcctcccacctcagcttacagagttgctgaactaaaggtgcgcacaatggcacccagctaatttttgtatttttttggtagagacagagtttcaccatgttgccccagctggtctcaaactcctgggctcaagtgatctgcccacttcagtctttcaaagtgctgggattatgggagtgagccaccatgcctggcctgaaatttctttacaaaataaataatgtaaattaaaaagcagcaaaataaggctggggacagtggctcaaacctgtaattccagcactttgggaggccaaagcgggcggatcacttgaggtcaggagttcgagtccagcctggccaacatggtgaaaccccatctctactaaaaatacaaaattacctgggcgtggtggtgcatgcctgtaatcccaactacctgagaggctgaagcaggagaattgcttgaacgctggaggtggaggtggcagtgagccgagattgcaccattgcactccagcctgggtgacagagcaagaccctgtctcaggaaaaaaaaagcaaaatattaaaatattttaggtatatttttgtggaagatattttaaaaagtgcttatgctcaatttggcaagtgtgtgggaaaacagacattgtcatatattctgggcggagatgtaaattttgggtggaaaactggcattacctaataaaattaaaatgagcatggcttttgatctaagtatttgacattcagaaatttagcctacgtaagtattcttgaaagacagcaaagatgacagtataaaaaattgcagtaatgctttccacaaataggaaataattaaaatttttaacaataggggattgtgaaatcatgtagcatttacataatgaaaaaccatacatttattaaaatggtaagctgtcaacaatgggatgatgtccataacaaaattaagtagcaaaaaagcaaatttcagggaagaatgcttagaatgctttggatttctattaaaaaaacctctgtgtgtgtgttttggtatagttacagccaacaaaaaaataaaatttggaaatctgggtgagtatacaccaaactgttcatagctgttatctctggaatgtgtttatgtgaacattttcactttgtatttaaaattctttttgcaatggacatttttgttgtttgtttactttgaaacgggtctcctcctgtcatccaggctggtgtgcagtgatgtgatcatagcttgctgcagcctcaaactcctgggctcaagagattctcctgcctcagtcttctgagtagctgggactactcagtgtcaccaggcctggccaattgaaaacttttttgtagagatgggatctcccctaagttgcccaggctggtctcaaaaccttgggctcaagtgatcctcctgcctcagcctcccaaaatgctgggattacacgcaggagccattatgcctggcctcaaatatttctttggtaatcagagagagagagagagacaaagagaaagattgagggagagacaaaggtcaaaaatatagggatgggaaaagagctagaagagggctagtagctggtagaccttcaagctgggtcatggcctttctgggctccagcttctccatgtacaaaacaagggggtcgcattagctaccagggccccctccttctctgactcttagccttgtgttcagcttttagaggtagaatggaaattagggaaaaaggtgcagatatttctccagccagagtttctttgagcctaggacaaacaggccacacagcactgaatccttccttcctaagcagtagatgaacctgctggctggcagagaggcacaggtgtcttaggatgaaaggctctacaagagaacagggacaatttccagccttggggaatcagatggtaaaacattgagattgggccacttagaccattaggctccatgcagtccctttcatctctcctctcagcagctgttcgctgatttccctgccctcttctttctgactcatccctttgttctgtcctttcgctggtgtgcatcaaaacttttcctgcatccaaactgatatgacaggttaaggttatgtctggacccctggatggctctgtgtcacctctcgcttgtttggctcagtctggcacacattcctccctgaggaggccacatatgggactcataccttccttgacacccgcagccctcaggacttctccaatacagagtgaatgacgctggtacaccatctccagggtgtcttgtcttctcaccagagccctttcttgtctttcggtatcctgaaggctaagcacattgcctggcatcataaatattgtataatgaaatgattagtctttgctgctgaatgcatgccattctccaggttccagcaagatgaacccttatcttgcttctcagtctaggtctaccggcatgccataaatgaccccgaaattccagccctcaaagtctccttacagcggggaaaccttccaggtagcagtacaacttgaagatgtcctgtaggacacccagctgggtgggcttactgtggccatacaagaatgttttctgagaatctcaatgataaaagtctgaatgtgttcggtgttattgcctgtgctggctacatatggtagcttggatgccaggtggaggaggccttcctactccttgaaagttaggtgagattgtctcctgtatccctttcccataaccctggaagttcaaaatcctcccttggagtcccccgattcctgttgtagggcagggacactaccttccttgtggcctctcctgactcatgggctccatttcccttggtggcctcctctatttgcaccacacagaggcagtgattccataagagaaaaatcactcataccaagcgcaatggagtgattgtcctcctaaaatccatttgttgaagtcctatcctgccaggtgatggtatcaggaggtggggcctttgggaggtaattaggtcacgagggtggagccctcatgaatgggattcatacccttataaaagagatcccagagagcttcctccccatctttatcccatgtaaggccacaacaggaaggcatctgtctgcaacttggaagacagccctcaccagaacctgaccataccagcaccctgatctcggacttccagcctccagaactgtgaggaataaatttctgttgttgataagccacctggtctaaggtaccttgttacagcagccggagctgattcagacaccaagcatggaggagaactattgatgcggatctcgctgaccccctccttgtccattcccatctctgttcctctccatttccctcccagtttgctccaggagttccaaattcatataaatgtcttttgtcacttttcttatgtctcttttcaggcgagcatttctgtcctgtctcctggcagctttggtgtcagccttgttgagaggcagccggggagagagagttgggaatggtgatggtagaaaatggctttcattttctttcttttttttttcaccagctcttttcacatagataaatgctccattctcaatttggcataggttttggattatcgccctcagcaggaggtccccgagctttgctccccttcacagcaagtctgtattgaacatctcttagatgcctgcatctgagcaaggagattaacactgattcaggaagcaaggagatttcactaattattcagtcctcacaagcctctgagatgggtataattattagcccattttatagatgaaacaatgccagctcagcctgattaaggaatttgctcaagattacacagtggtagagacaggcttcaatttgaggcccgacccagagctactggcccttccacaccccagtgctgattgccacagactggagacttgtgactcccttggaacactcagtgtgggggtgtctagaagaagatggggaggtgctggttacacgcagggatggagagatgtgtggtggggatagtttggaaaggaggcattatttgacattgccactatctttttttttattttttatttttctgagacagagtcttattctgttgcccaggctagagtgcggtggcacgatcggctcactgcaaactctgcctcccaggttcaagtgattctcctgcctcagtctgctgagtagctgggattacaggtgtgtgctatcactcccagctaattttgtatttttagtagagatggggttttgccatcttggccaggctagtctcgaatttccgacctcaggtgatccacctgccttggcctcccaaagtgctgggattacagatgtgagccaccacatccagctcttgacattgtcactttcaaagaaagttcctataaaagtgattccatattcacatgttttgaggacataggagctggaagggcaggaaatagcatcccccctgtgtaactgcaacagggcaagtgtgtttcagaaagcctataatgtaagaaggttattcagctcttgagaggggaggcctggcttcttacgcagtgtcctgattacagagaaggtggagaatgtgtgctgattctcacaataattagaaatggactctgtctttatgacaaaattcaaagaaaaatacagaagatagtggggatctgaattttataacaataacaatgacaataagagtagttatcatgtacagagagcttataggtggcaagcactgtaataacccctaacatgcacctctcattcatacccaacacaattctaggtgggagatgcaattaactgcccccattttacagatgttgaaatcgacacttataagagaagtaatttactcagtcatggagctatctcagtacaacccatgagctcctgctctcccatgtgctgctgttttaacctggtgaggcaggccactaggaagccaaggacagtagtttcccccatatccacagtttcgccatccatgctttcagttacctgaggtcaactgcagtccaaaaatattatattacatacaataagatgttttgagagagcgagtgagaccacgttcagatagcttttattacagtatattattacactcattctattttattattattattcttaacctcatactgtgcctaatttataaattaagctttattgtagatatgtatgcgttggaaaaacatagtgtatatagggttaggtactatctacggttttaggcatccactggggttcttgaaacatatcccccaagaataagaagggcctcctgtaccaaaaggcaatttaagaaagtatagcagattacacaggggactgaaaagtgtaggggataagcgtttgactgtgaatacactagttttcagatgactcattttcccagccaaatccaggagaaactgtaataatttagaattgaaaagtcatccttttgccatctccaggccttgtgaaagtcagttctgggcctccaagaaggtggagggagaagagatgcctaactcacaaatccttccatgatctgtggacgagcaatgccagcaacaaaagtgagaggacagagcaaagagtgagttttcaaaggatggaaaatataagcagggatgaaaagatagaactaagccagacaataaaagggcacaacagcccttgttcccctcaccactctgctccgtatttctgactaggatgaggtggttttgtgcacagtgagaccccaaaggtggctatgggtgggtagccaggccagggcagctcaggttccggcccgaggagcagactgcattctttgcccctgtctcacagtggtctcgtctatccatccagaccgtgctaaattctccactaggggctctctgctcctcccgttcgacagacagctgcatcttctcgtgcattgccagctgcatccccaagacaccgtggtgaaggtgaaggctggagtcaacggatttggatgtattgggcacctgctcaccagggcagcttttaactctagtaaagtggatattgttgccattaatgacccttcattgacctcaactacatggtttacatgttcgagtatgattccacccatggcaaattccatggcactgtcaaggctgagaaagggaagcttgtcatcaatggaaatcccatcaccatcttccaggagcaagatccctccaaaatcaaatggggcgatgctggcgctgaatatgttgtgaagtccaccagcgtctttcaccatggagaaggctggggctgacttgcagggaggagctamaagggtcatcatctctgccccctctgctgatgcccccatgttcgtgatgggcatgaaccacaagaagtatgacaacagactcaatatcgtcagctatgcctcctgcaccaccaactgcttagtgcccctgggcgaggtcatccatgacaactttggtattgtggaaagattccagaatacagtccacgccatcactgccacccagaagattgtggatggcctctctgggaaactgtggtgcgacggctgcggggctctccagaacatcacccctgcctctactggcactgccaaggctgtgggtaggggtcatctctaagctgaacaagaagctcactgacatgggcttctgtgtccacatcaccaacgtgtcagtcatggacctcacctgccgtctcgaaaaacctgccaaatatgatgacattaagaaggtggkgragtgagcattggagtgtccccccaagggcatctggggcgacactgagcaccaggttgtctcctctgacttcaacagagacacccactcctccacctttgatgctggggccggcattgccctcaaagaccattttgtcaagctcatttcctggtatgacaacgaatttggctacagcaacagggtggtggacctcatggcccacatagcctccaaggagtaacacccctggaccaccagccccagtgagagcatgagaggaagcgagaagccctcactgatggggagtccctgccacacacagtcccccatgacactgagactctcccctcctcacagtttccatacagaccccctgaagagggaggggcctagggagccccaccttgtcatgtactatcaataaagtcccctgtgctcagccaaaaaaagaaaaaaattctccactagggtcacccaaaagggcagatcacttaagcttgctaattcctctgtccgcctccttccttgcaagctggaaccagatgtttcacccctaatcctgaaatgtcactgagcctcaatggattattacagaaaacttccctgatggatcattacaaaaaactgccccattcctcccagggagcacgtgctctggtcaaggagggctcacagaaagatctgcctggcacaacagcattcagagcagatggacaggcgaggccctggacctcactctctcttccctgcttgccctgatccactgcttgtgacaggaggggagtgggtagggttggtggaggtttgacttatctgggatgaggctttgcaagccataaaggaacaggatgcaagaggacataatgaaaaacgccagcgtgtgaagaagtgcatttggcaagagaatccaacacttattcttctgaggctgctgaagtgcacaaatggaggcaggctggtgccggccggtccatctgctctgagatcttgctgatcttagtggaggacagcatgacctcaggagagtcttgacctagtacctcctactacatggcaaatacactgttatagtgcctgggcatttcattccagtgtctcctgatctggtttcttatgcttcaggattgtttaaaagaacaatctggcaagaccagcatttgaagaatgagtgtattagtcctgcttttagttttagttttcatgttgttgatgcatcaatcctctggcaagcccagaagttcttaatggtgtttgtgagccactgaaaaataagaggttatttgatgtgcatatgtacattttctgcgtagctgtttcatagcttccctcagattttcaaaagcgcccatgtaccaaaaaaaggataagagccattgatttagagaaaatcactgttttgatcaggaaccatgttgcatgcatgctctaaaagcgtgaatgagctatcagaagattgggcttcatttttccctaatgaacaatacaaattgagtagtaccccatgttgatgatgatgtgaatgaatgggcattcatacattgagggtaggagtataaattggaatatgctttctggagggtaattgagtaaggtgattcaaaagccttacagttttatgtatttagtttccctgaaattacaattttaagaatttgtcttagtggttaagtgtgctagctctgcagtcaggctgacttgaattaaattttaacatcactacttattatctatgtcactgtgggtaagttacttaacctctctctaggactcagttccctcatctataaaatggagataatattatttatccatagggttcttggaagggttaaatgagataatacatgtaaaacacttagtacagtatctgagacaaaataaatactcaataaatgttattattatttagatataaggattttattggcacattatttatcataactaaaaattggaaacaaccccaaatattcaacataagtgactggcttaatgacacatacaattcaaccagtaaaaattaactaagtgaatatgattagaaacgtgttcataatacgtcaagagacaaagaacaggttacaaaatagtacatttgatatgccatagaaaaatggctgaataaatatgttttcaacatttcagtggttatgtttaaggggtggctttttactatctttttttgtttttctgattcttttaaattttctacaatgaaaacacgcatataacttcttgtaataaaacgttaactaacccagtaaaagttactttttgaaaacatgatgactgatttctgttgaaaaacgctttgtggctttgaatcatcatttttgtgaaggttcctttcttcatgttgaaatgagagttatattttctttccttgttgagataccaggaaactcaaatgaaagggtgagcataaagtgctttgaagggcagtgcatagcatgtgtgaaaaggtccagcttcttaacctgcggagctttcacaaaataatctgtgctgtaatgcaggaggactccagaagccctgttgtctggacttagagaacatgcctccagccctgggtcaaagtcctgttatgattaactccagggaactggtatggattgaggatgaaggtacagagactttcagctatgaaaatcggtctgcagtcaggattccaagtttaatctctgtgaaaccgatgggccagtgtggccatgcttactaattagacagcagcaatgtaattgatcaaatcaattcccttcatgacgcaaagccaaagaatccagggacagctggagcttggaagagcttgcagaaagccagagaatgtgaatccctctcccagagatgttaacgtgggtaagctaaatttttgtgctaattgctggctcctttctcaataacggataatatggtgatgcaatgtagctcccgtgtccctcacgtggccagactctaggctggagagatttaaattgtgctcattcatttctttcctggatttacagcaagcattcaacgtcttcaagcttaaagagcctttgctttctggaaagaagcaaagtcatagccaggtcccccatttcatttatgaatagctttagcgttaatttgaaagccagtgtattgaaaaaaagaatgtaaaagggaaaccattaaaagaaatgaggcttattgcaacaaccaagtattgaggccaatacttcaatctatttcatgcagatcaaatgaaaaaaaatgctatagaggctgcattggttgagtgaaataagcatgggatttggtggcagacagagctagttgcaagctcagctctgccacttatgagccctgagaacttgggtcaattattttacctttctgagccatggttttcttttcttttcttttttttttaagatggagtttcgctctgttgcccaggctagagtgcggtggtgcgatcttgtatcattgcaacctctgcctctcaggttcaagcaattctccctgcctcagcctctggactagctgggattacaggcatccacaccacacctcgctaatttttctattatttagtagagatagggtttcgccatgctggccaggctggtcttgaactcctgacctcaggtgatctgcccacctcggcctcccaaagtgctgggattacagatgtgagccaccgcacccagctaactatggttctcttatttgtacaatggaaacaattatgccatcctcaaagggttgtgaagattaaataagataacgtactgaaacacctagctcactgctagggacatcataagtgctcagtcaatattagttctccaccagtgtcttgtcttctggacaaagccctgaaatcatgtctttgttctatgctgcaaactcatgtgtcgtggtcctacactctgtgccattggattccagatgattctagacaaggtaacctgcaggctttccagaatctatgccatgtttatgtatgagctctgattcttaagagagggaacaatagaatctaagcatattcaatattatactataattttaattgttttcataatatacatcacagaatacaaaattcaaatcatcgtggctggtggtatcagaaatctctgattgcagaaggcatgcaacttttggtttagaaaaagaggtcatgagataagcaagactgagaatatggatttacagcacgtcattctggcaaaacatgtgacagacacacacttggaatgccagagatggactggaaggagaaatggggaggctttgcgggtactggtaatcttttctttcttattttggtgctgcttaccgggatgtgttcattttgtgaatattgacacggccatcccttctgattggtgctcttttctgtatgcatgtcatacttcaataaaaagtttatttaaagagaaataagtgtcacacagtttgtatgcattcagcatgaggtgggataaatcctggagaagcctcatgtcaatttaccagggaattctctgtaaatcccggatcaggctttttcctggatggtctagatttttataggtaagaacagaatgcaatcgaaagttaccatcatctcttctggaccacggcctcagcctcacaactgacttccctgtctctacccttaagcctctacaatccatcctccacttacccaatgaagtctttaaaaacagaaatcgggctgggcgcggtggctcacgcctgtaatcccagcactttgggaggccgaggtgggcggatcaggaggtcagaagatcaagaccatcctggctaacatggtgaaaccccatctctactaaaaatacaaaaaattagccaggcatggtggcgggcgcctgtagtcccagctacttgggaggctgaggcaggagaatggcgtcaacccgggaggcggagcttgcagtgagccgagatcgcgccactgcactccagcctgggcaacagagcaagactccgtctcaaaaaaaaaaaaacaaacaaacaaaaaaacccaccagaaatcggattacattatttccctttccaaaacccccccatgattttcaatagcatttagagaaaatgctaacctttctatcatgacctacaaggcctcacaggatatacatgcttccttcctgtctgacatcatctgccacctctctcctcctgcttctgtgcagtccagcactctggctgccattttccatgtcactcatgtcaaatgcattcctatctcagggtctttgcatttactgtccttgctgcctggaatgctttcccccagattcctgcagggctggctccttctagtcactcaagtttcagcccatgatctcaacgagcagctttctctcttttttctttccttatttttatttatttattaattttttagacagagtcttactctgttgcccaggctggagtgcaatggcgcaatctgggctcactgcaacctccacctcccgggttgaagcaattgtcccacctcagccttcgtgccactgtgcctggttaatttttgtatttttggtggagacagggtttcaccacgttggccagactgctctcaaattcctgacctcaagtgatcgtcttgacctcccaaagtgcagggattataggcgtgagccaccgcacccggccctcttttttcttaaaattaattattttctttttcgatcagcttcctcaggttgagcttatgctttttcttgatcatcaccaccctgctcctctctagcacaccactccatatttcctctatagtacctgcaattatctgatatcacatgcttatttatatgtacgatttgtccatgcccacccctcaggactgtaagcttcatggaggcagtggctttgcctgtttttttcactcttgtatctgcagtgccttgaagagtactcgagacagggaaggtacttaatagatatctggctgtgtgatctttacaagcctctcactgtctgaatttcaatttccatatctgtaaatttaggctaataacaagcttctcccccaaccccccatctcccccagggttgttgtaaagattgaaggaggtaacatatatgaggcacttagcacagtgcctggcacatggtaaatggtggctgtgttccctgggtgctaattgtaaggcattgttagtttctctcattcattcatcatgagcaagcaatcatcttttattagtggccctttgacaaaatggtaacacagcctgtcgagagaccaggtttcacagcatcattctgatgtttctttggctaagtgttagcctttctctgtgt

SEQ ID NO: 94179 - DNA, 18954 bp, Homo sapiens
  misc_feature (1)...(18954): n = A,T,C or G
gtccaaagccaggggggaaggtcagcgtggagatgagcagggtcaccagagccgggaagagcaggcgtctagagtcgtaggtttcacatcagtcgtgggtggccaagggctgggtggcctcgcatatctcagggctgaggtcagagcagagccttggctctttcatgaaaacactcagtcctgacagaaggtctcctttgctgtttatgatacgatagccccaaggctgatggtggactggggttattctaagagcaggggtctgacccaaagacctttctgtcagcccctgactctgtaggtgggtagcagcagcagaaagtccatcctccaagccctcccttggggccctccgagttgttattccaccctccaccctcagaagcccatcagggcatattgtgtgatggggtggagaagtttctgcctctctttgtctctctgcagtgacttagagtgaaggtcaatgttgggggaagctggggtcacttgtaaagttgaccagaggtgcgtagggagcaggttcagctggctgccctctctctgaaggatgtcagtcccaagggaagtcatgtctcgccctccccactcccaatcctcagggtcacactgagagagctgtgttctggagattaaaaaaaaaaaaatctcggccgggcacagtggctcacgcctgtaatcccagcactttgggaggccaaggtgggcagacctgaggtcgggagttcgagaccagcctgaccaacgtggcgaaactgtctctactaaaaaatacaaaattagccgggcgtggtggtgcatgcctgtaatcccagctacttgggaggctgaggcaggagaatcgcttgaacccaggaggcggaggttgcggtgagccgagatcgcaccattgcactccagcctggacaacaagagtgaaactccgtctcaaaaaaaaaaaaaaaaaagagatctcatctatccccatgggtcatggggggaacctgaggctcaaacactctccagggagcattcctatatgggccagcccagaggacctgaggaggccttagtctttgattcccaaatgtcctctaccgctgactataaacttaaaaatgccaattttcaggtaattcatatgaatataaaaatgctcagtcagcctggaaaacactgctggctgatttctcagtgaagtgcctgttttgactgggccattctctccccatcactgtcccctgacctactgtggcccttatacaactcaaagcagcctggagaggagccgagagccactcacttcctcatgaggaagcgattgatggttttctgcttccgcatcacctggacaatcttccggttcaggtagacaaagagggctccaccgaagccactagcaatactggaaagggaagaggcacctgagtgaaaaggagccttctagaaacccccctcctctctgatacccccagccccctcagctcctcacccaatgacagcaaaggctggcagctcctgcaggtcaaaggggaagtcgagccggaatcgggttttgaagagggctgtratagtctctaaagggaagaacagcagagggaggcaggcctagcctcgtgggccccctacctggcaccatctcgggctgccctcatcccctgggtgcccccaccttcatcccggttccagactgccaagacccggaagatgaaggcactgaaggtggcagcgaagaagccccgccagtagttccgcactgcaaagaaggtggaggtgacctcgatgctgaagaggacgcctgtgagggggagggagaccagcacttgaggcctgggcctggcctaaggcctcagacccagataagaggggccaaggaggagaggccaagggcagggttgtggggctggactgacctaggagccctgcctacctccaataggtgccgcgaagcagcagcccacccccacggcacaggcggcagccagcatctctgtgttccgggattcattctggcgagagtggtggcaagagggggtcagctgtgggctcagcagcctctgccccctacttgccccagggttccccttacctcatagatacccccaaagagggagaggaacttgctgagaagggcagcacacatgcttgcgatatgcacaaaagggccctgcggggtggggcaggcggtgagtcgggagggggcccgccctgaccttggcctggcctcctcttccaccaggagggactccttcattccccagcctgcagttacctctttgccaagcggcatcccgctgcctagggcgcaggtcagcccaatgaccttagctataaaggtcttgagtgtgaggtattctttcagcaccactccccgcaagatggtcttcatctcagggatgccagagcctggagagggaacagtctcaggagaggcattcgatgcacccatttcaggggtcccgcctctgccctccccttctcttctaacataccgacagcctgaggggccaggatctgtgtgaatccggctgagaaagtgatgaggacaacagggtaggtgacccaggccaggtactggagcaagatgctggtgttcaagccccgggacatccactgctgggctgtgggaagaggacctgctggacccccagtgcacacacccactgcctgcctggccagtggaccacgctgatacgacaggctgtcccagggagtaccacacagagtcagggcatgggtgaaggaaagggtccctgagggtattcactgggacaaagcgcaatctaggcaagaggatcacttggagaggggatgcaagaagctgtgccctgtgggagtggccgagatgatgcctgaatctgggcagtcagactggctggggaaagtggtcagtggccaagaagccaagacgccttcctccatgtctagacgagtgtggcatggacgcaggaggtttattcccagtcctccccctgccagctgtcaccctcaccttgcagacaggcagcaatggcatagtccatgacccagctgaccaatgccatgagaagccccagcaggaccaggaagatccaatcttcaccaaccctggatactaggaacttgtggcagcggacagaacagactgggtgcagggaagggaagaagggggaggatggcaccaaagtgctcctaccccttttactgccccctcaactgtcccctctcccccatcagcagctctaatggcctctgcttccctcagcacagcacagccaggtcccctgcccccaccccagttctcaccgcggcatcgggcgcaayggctccgtccatattccaagagctctggggcagcccgagaggaagggggacctttccagggttcaggccctcccaggcgaatccgagcagcttcctctttggcaaaggccccaaggtcctgagtgtaccggccatacatctggagcaacagaggggatgggggcattcgaggtcatgggctgagtgggaacgcagggagagttcttagagcctccactcctcttctcccagcccccacactggatatccctcttgaacgcacagttcccactctggcccgaggtgtgggaacaatgcacattgcagactgtggaggctgtcctggccagagtgatggggacagccaaggtacagggacacagctctgggggtggcagaataatcggtcctcttctcacaggcctggggctggggcactgaagaggagtgagagggaagccccagaagaggaaaaggtggaaaaacctgtggcacagtctaaaagtgggaggcgggaaggccagggagtaagggatgatcaggggcacatgggcaacaataagagcctcgtggagctcggggcrgctgagttgggcccaggagcaggcgcagccccaatccttatcacgttcctgctgggcctccggcctgtgaccaactcagctgcacctctcccacccaccctaatccccttgtccccattctccactgccacccccaccagcctgccagcccagctgggagtggaaagcctctcacttagggtgggtggagagggcttggtggcctcagccccaytctggagctgcactgagcccagcggtgggttgggggacagcggaggctgaggatggctgggctgtgactgtggatgctggggtgatgggacgggagagtcgcctgaaccatggctagacctgccaagctgggcgtgtgttggggggcggggaggagtagattctggctgccacccgcagagcttcgggacacaaagggctcctgttggggctgggatgggggggagggagggagggaaagatagagacagagagagggtgagagataggaaagggaaagcaaagagaagagagggaactagagaggagaaagtagaagagaaaagagagggaaggcgaagggatggagaagagaaagaaggggatgagagaggaagaagtacggaggaggaagagaatggagagtattaagaggcaagcacggtgtaggaggagggaggtgagagtgggagagaaagacaaagggataggatggtgaaggggggcgggagcaggctggagcacagagtgcccgggacagagctcgaccctgagagctcattccagagacagctggaagggacggagatggagaggtggctggtgttaagaggcaccatttcagaggccaggtgcctggcttccttgaccatgctcctatcctggtctgggcagattggcaagtgtctcctaccccatcccaagggttggcccctctacccttgctctactcccacctctccctgacatcctgattcatccagctactttctcctaactgggcacctcccagacttatagcctctcctctccaagacgttccctccctgccaccttcctgggcaaattccagcccaagctggtaaaaaggaaccacgggccccttcctttccctagggcttgggtcttccaccccagtgacatgaggagggtcacgtggcttctcaaacaccaagtaacaatgggggcgataagtcagctcagagcccaggacccctgcttctaatgaggtcaggggacacaccctggggtgggtgggggctggataccccgcatcagcatagacaaaggtcccaattcccacacccattcctgcttcacccaccctccctaaagctcctgtcccccagagtggcaagccacctttttccagagtcaactgaggggctcctggagccaacgctgggtgtggagcctccagaggtagggtctggggctgaccatctttctacacactcgattctatgcttagcatggtgccatgcacatggcagggacacagagaatgtcttgggtggtggagatagtggcgtagagaaagttcaatggtgtgaatggtgccgcggaaggggcagtggggtgctgagacttgggcccaggtggtgaaggggaggtgcaaagaaaacgtgcatgttgtggggtgaggggaaggacacctgagacaagtacctggtgtccttgtcctctgcaggccctcagcctcagccagaaaccagcatgcagttttccatcccttcggccctgcagcctcagacttccaagcctcagtttccccagctcaaaatgctaggacaggattagggtaggcccctggtcctcgcgcttcccagggtaacctggagcaggggtcccggagcgcactcctggggctcagctcagcttcacttaccagggtctgctcgtactgcagcgcccgtggctccatcccttcctccgccgccgcggccgccatctccgcgcactgccctctcgcctccctcggcggttccggctctgtcctggactcggctcccggcccgcaaagtccgcgccggcagccgtcccgtccccgcagcccgggaggccgagagcagagtgcggcgggcccccggcgggcgccgctggcgcagcctcccgctcgcgtcccctccccggcgggcgggccgagggcggtgccctctgcgctgctccgcccgccggcccatccggaggggacggcccagccaggctggggtccgcgcggggcctcccgagaggcggcaaggggcgctgggaaggcgcaagcccgcgccggctccctgcggatgcccgggtcggagaggggcgcccgggaggggcgggtctactggcacgtggaggggccggcccgggttcgcggttccccgtgcccaggcaggaggggctgcagacgcctgagctccgtaggggttggggctgggggctgcggagctgtctacatcggactcctccgggtcagcccgttaggagccgcctcccctctgcccctccgaagagacgagcggcccagacaggcctgggaaggcccctctgccccgtcaggggtgaaaagcaaagctggaaggattcggagagggttggggccgtcttcctcatccttccttttctcggggctcccgtgggtaggtgcacttggagcaaccgggcctgcggggtgtgcgggggtggaggttggggagggcaccggaaggggtaggccggagggaagggagctccaggtgccgggaagtctactcctgggacgcgggcgtgggtcgcttctccctggctgggcccaaggaggaacccaagtcgctgcttccatccctccgctttgggggaactgcctgctggtgttctgggttctctatcaggggctggggaaggatagaacagagggcggagcgcgcgcagggtggatgggcagcgtagagatagtgtgagaggagcgagggcagcgcccaggaaacgcacaagtgtgcgggagagccagcaccaggagtaaggggcatttgggaggcagaggcggggctcarggggcgggagcagtgcccgggaagggggggccttgtgatagaagccagcactcaggaggaagggccagtgtgagggaagagctggtatccaagggacagggcagtgccaggctgaaggggcacggaggggatccgtgtccaggagaaggcagtggagggggaacgcgcagcactaagctggaggggtaatgcccgggggaggggggtggcgggagcccggctgaaggggcggtgtaggggaagagagcagggcctggggggaagagggagggcagtggtgggagggtgcagtacgagaggaggggacaatgcaggctttcctcttctccatagcgacgtcatggcaaattcccaaactggacggatccggctcgggttacgtccagcagggccgagccggcccaggccggccccggggtcctcggtgccggctggaggggctgggcacctctggggcggggttctgctccacctgccctcggcgcggactgtgccctcggcgggcacgcggaccggcggggtagggctagggcccggcttctctgggccaaggatcaaggtccctgcctgggttaggcccccacgcattccagtcttcggaacccggcctctgaagagggcgcagtagggccccagcggagcgcgagaacccgctctacagcctattgcttccccgccctgggcagagccacctggacatgagacccgccctcaatgccgaagcctctcggaagcaatctttcgggacggaagttaagtagccccgagcgggaggctgtggcggaagtggtcgcgttaccgcttgtttgtgcgcatgcgccactctcgtctggccgccgcgctttcaggaggtgcttttggttctctccggtcttgtccacgctagggggtgcacgtactcccaactgtggtcgcgctctcaccccttctgctgctctcgtggccccctcgcgatggcgggcatcctgtttgaggatattttcgatgtgaaggatattgacccggagggcaagaagtttgaccgaggtaagtaaggtatgtagkggcggtttggaggaagaggctaacctcgcggacatgcccctgggccccgtgtccacccagctcttgtggcctgcccctaccagcaggtcctggtgtagggacctccctcagtaaacattttatggatgagaaaacggagactcccgagctctctctggcttcacgcatgccgtgcccggtgcctgggtggccttttgtcatggtgctggcaaactcctaggcatatttataatcgctacctgctctgtgctagacactgtcttgtgagaccagcctggccaacatggtgaaaccccgtctctaccaaaaatacaaaaattagcctggcgtggtggcgggcgcctgtaatcccagctacttgggaggctaaggcaggagaattgcctgaacctgggaggcggaggttgcagtgagccaagatcgcgccactgcacgccagcctgggcggcagagcgagactccgtctcaaaaaaatgacagtcctcatgaggtgggtggtgcctttcccatttttctctgagaggttgagtaaaccacccaaggcttnnnnnnnnnnnnnnnnnnnnnnnnnnnnnnnnnnnnnnnnnnnnnnnnnnnnnnnnnnnnnnnnnnnnnnnnnnnnnnnnnnnnnnnnnnnnnnnnnnnnnnnnnnnnnnnnnnnnnnnnnnnnnnnnnnnnnnnnnnnnnnnnnnnnnnnnnnnnnnnnnnnnnnnnnnnnnnnnnnnnnnnnnnnnnnnnnnnnnnnnnnnnnnnnnnnnnnnnnnnnnnnnnnnnnnnnnnnnnnnnnnnnnnnnnnnnnnnnnnnnnnnnnnnnnnnnnnnnnnnnnnnnnnnnnnnnnnnnnnnnnnnnnnnnnnnnnnnnnnnnnnnnnnnnnnnnnnnnnnnnnnnnnnnnnnnnnnnnnnnnnnnnnnnnnnnnnnnnnnnnnnnnnnnnnnnnnnnnnnnnnncaaatgatccacctgcctcggcctcccaaaatgtcgggattacaggcatgagccactgcaccggcctacacctctttattttgtcatctatcaataattttctctttgatgtctctttctttgcctggagactaagatgtttttcaagacggataccagttcttatacatcttggtcactcccctcagcacagtgcctagcatagaaagagaaaacctttggatgattgaataacttgcccagagtcaggttctcagtcatccaggcaggctttgctgctggagtatctttggttgttttctggggattacgttcgcttgccacagtttttctccccttttccttcttgcatatctggttctgattgagcctgaatttctatgagagcagatgagagaccactggatgtagactgggttagattgagtatcctgttgcatacaatcccacactgtaggatctgccttggcaatacctctgtcactcttttcctgcttctccccagtgtctcgactgcattgtgagagtgaatctttcaagatggatctaatcttagatgtaaacattcaaatttaccctgtagacttgggtaagtattgaatacagacaataataagagactttttgctgcttctgctattctttactctctgatattgctgttattttcaggtgacaagtttcggttggtcatagctagtaccttgtatgaagatggtaccctggatgatggtgaatacaaccccactgatgataggccttccaggtgagggagtggagaaggtaatacttgaaatatgccttgaggactaagtagataagtgatatagaaagactcttctaaaattcctggaataaatgatgatcagcagaatctgagtaaccttaaggaaatttctgcacttaagaattcaaacaggccaggcaccgtggctcacacctgtaacccaagcactttgggaggccgaggcaggaggattgcttgagtccaggagttcaagaccagcctgagcaacatagcgaaacctcactgctacaaaaaagaagagagaaaaaaaaaaaaggctgggcatggtgtcatgtgcctgtagtcccagctgcctgggaggctgaggtgggaggattgcctgagccagggaggttgaggctgcagtgagccatgattgcaccactgcactccagcctgggtgacagagcaagaccgtgtctcaaaaaaaaagaaaaaaattcgggccgggcgcggtggctcacgcctgtaatcccagcactttgggaggccgaggcgggcggatcacgaggtcaggagatcgagaccatcctggctaaaacggtgaaaccccgtctctactaaaaatacaaaaaaaaattagccgggcgtagtggcgggcgcctgtagtcccagctacttgggaggctgaggcaggagaatggcgtgaacccgggaggcggagcttgcagtgagccgagatcccgccactgcactccagcctgggcgacagagcgagactccgtctcaaaaaaaaaaaaaaaaagaaaaaaattcaaacaaccaggtatttatctataacagtgattacatgcttgtgagttgcagccttttgaaggctgaggaggtaactgctgagtgacctaggccatgtgggtcttgtgtcttgggagggagcttggtgtgatggaaagactttggcaccccacttgagttcatttctcagctctaccacttatttgttgagtaaccttaatctccttcagcctgtttcctcatcaataaaatagagatggtcatgcctagctcatggggttgccatgaggactaaatgacatcatgtttgtaatgtgcctgttgttataatgctggcatttagttaccagtaaccatttttttttttttttttgagacggagtcttgctctgtggcccaggctggagtgcagtggcgcgatctcagttcactgcaagctccgcctcccgggttcacgccattctcctacctcagcctcctgagtagctgggactacaggagcccactaccacgcccggctaatttttttgtatttttagtagagatggggtttcactgtgttagccaggatggtctcgatctcctgacctcgtgatctgcccgccttggcctcccaaagtgctggggttacaggcttgagccaccacgcccggctgaccagtaaccatttttaaatgggatcttttatattgttaattactgttaagaataactttgctgctattgctccatagggctgaccagtttgagtatgtaatgtatggaaaagtgtacaggattgagggagatgaaacttctactgaagcagcaacacgcctgtaagttacgtaatcttgtgaggattcttttcctcttccatgttctgagactttgagctatgctcctgcttcctctgttgagtccctctcctcaggcacctcagaccgaggtgggaactagaaagaaatagttctgggagcagtttccagtctgaaatgtagactgccctttgtcaggccctcctggcccagtggtccacatgagaaactgattatctcactgtgtaaagtgcaaaggagacttgcttccccaggaataaatgcagcattaagtgattagactgttaggctttgtgtgtgtgtgtgtgtgtgtgtgtgtgtgtgttttgctactctgtaaaaggctgtgtgtgtgtgtgtgtgtgtgtgtkgctactctgtaacccaatccctagttccttggttttcctgtccagctattttttcttttctttaaagtcttattaaaacaatatgtgctttttgtaagyaatttgaaatgcagaagagtaatgtgaagaaggaaaaaaaagtcacctgtaattccatatccagagagaaccttttacatagacttttttgcatatcctggtgttctgtttttttcttggagactgtggtgtttattatgttttcttctgctctttttgcttaacattatgtaaaacatgtttccccatgttagtgtaaagcttttcttttcttttcttttcttttttttttttgagatggagtcttgctgtgttgcccagcctggagtgcagtggcgcgatctcggctcactgcaagctccgcctcccgggttcacgccattctcctgcctcagcctcctgagtagctgggactacaggcacccaccaccatgcctggctaattttttttttgtatttttagtagagacagggtttcaccatgttagccaggatggtcttgatctcctgacctcgtgatccgcccgcctcagcctcccaaagtgctgggattacaggtgtgagccaccgtgcccggccggtgtaaagcttttcttaaacgtttcaatagttgcataacatttcagtaagtggatatgtcttgattcatttgaacattcccctgatttggggcatctaggtgttttccaccctcgataatataaagaacagtgccttgcacatatctgtgcattgatgtttgtcagaattttggttcctagtgacaaaacagtaggaagatgcctcttctgtttcttaggctgagatggaacagtgccttgcacatacctgtgcattgatctttgtcagaattttggttcctagtgacacaacagtaggaagatgcctcttctctttcttaggctgagattgagagctgctgagtggcagtgctccagaatcacgggatggggccttctgtttcagctctgcgtacgtgtcctatgggggcctgctcatgaggctgcagggggatgccaacaacctgcatggattcgaggtggactccagagtttatctcctgatgaagaagctagccttctgaacctcgcctgaagccagcctctctgccaagtcactcaggtcatgggcattgttcaagcctgagtggcagccgctcttgctcacctgttgaggaagggctggctcactgtccaccgtggcggcatctttaactggcctccactcaatgggaaactgactcgcctgtgaaagacacagtgggagagctgaaaatgaatcagaagctttatgtawatgatttttaaattaaactttactttttcagactgcccctcccctttttgtaaaaagtccatttactgtaaaatcgttttttccagtttgtctgtggtgtattgtttctggcccacagccagctgatcacttgtcaatgtaggatctattccagccttttggtatctgggttcagggttatctcagtctcctggctgactgttctcaacatttatcctccagtgtggttttcagtctgggagagagttgtgcttttggctcctgagggtaccccaggcccagaagataccacccatttggcgcagaattttgaattggcaaggagccctgctcatgtccttccaacactttcagtctcttaggaagtcagttcatgctgacttgaatgagtcacttgcatagtctagaaatgttcattatttttatggaagctttgggtagaggcttttagctacaggcatgggagatgactatgaagagagtaggacgagaggacttggtggttctggaagcagctggaggagctggctctctgctctacattccagtggtgacctgggagggagggtaagtggaagtggacagggcagcaataccaatgaagttggcaggccagagccagggccagtgccaggaccatgtagcggcctgactacagtcactaacttatgagtaggggaagaaaaaacattaaggaaatggctatgataagggctccagcatgtgagctggctcttcagcttggcattagaggtctctaggaaagcatatggggttctgttttcccctaggaagtttagggtaacaatccaaaaagattctctgtgcattaaacagttgtctgtttgatctggttttgcctgggagctggtcccctgctgggatacctggggtatttccttccccatcattttcggatcttcatgtgaggtgttagaaatagtatttagggaaatgggttgaaaatgaatggcctcagcagggaggaggaagaggtgtttcttttaccttactatgggtagagtagggggagggagttgggatgaatttttatgaaatcctagaacctttccatggggtgggtttttttgtggggttggagaacgacaaatgagagtgagacaaacgaattacaagtaatagtgtgtaggttatcatagactgtcctggcggtcttggggtagcagaagaaagagaactggtagagcattgaatagggataggagtgttctggttgtaattgtttttttgtgttagtgggaagaagggatgggaccaaccagactgatttgggaatgggttagatttgtaatagggcaggtaagttcacactggagaagcccatgagttactcgcatttgcccacaagtggagtaagtcacataccaataccagatgcctggaagtttctggtgacatttgcagttttgacattctatttctttttttcttttttttgaaatggagtttcgctcttgttgtccaggctggagtgcaatggcgcgatctcggctcaccacaacttctgcctcccgggttcaagcgattctcctgccccagccttccgagtagctgggattacaggcatgtgccaccatgctcagctaattttgtatttttagtagagacgaggtttctccatgttggtcaggccagtctcaaactcccaacctcaggtgatgcaccaccatgcccagctaattttgtattttttagtagagatggagtttctccatgttggtcaggctggtctcgaactcccgacctcaggtgatccgcctgcctcggcctcccaaagtgctgggtgtgagccaccatacctggccctaaagttttgccattcttgtctctcatctgtctgtgctgggaacccatcattctctggttctattggtgtatcgtgtcctaggtgctggcactttcatgtgctataaagtgtttcatttgattattaaatttaacccagctcaatatgtcagtaagttagtttccacttaacattcccttgactgcatgctggaatttgtagtatgaatgaactacttctcttccatgcagaaactgacagcatttgagatttggacaacatttttgagctttgtgcatttgttgattccttctctaggaaaactattctgtccgtgaagggagagagggacatgggaagatgtctaaattggtcacctccactaagaactttggttttctactcagaactcttttttttttttgagatggagtctcactctgttgcccaggctggagtgcagtggcgcgatcttggctcactgcaacctccatctcccgggttcaagactacaggcgcttgccaccacactcggctaatttttcatatttttagtaaaggcagggtttcaccgtgttggccaggatggccttgatctcctgaccttgtgatccgcctgccttggcctcccaaagtgctgggattacaggcgtgagccaccgcgcccggcctcaaaactctaactgttactccttaaggacttgtatgtctttcccagtaaacagaatcattaaatgacatataggacagtgtaccacactggagagagtatggaccctagagtgaggtcagactagggtgtttcttctcctgcccacagggcgtgtaaccactgataactcacctggcttctctgagcctcagtttcctcatctctaaaacagaaaagataatacctaccttacagagttgtgtgaatgttacaaaaggtaaagtacacgaggttcctagcacattgcctttcattctgctgctttggaatgcctttggtgaccctggggtatttgtggcagtgtttgggtttctgggttcctggctcctctacctccgtggtagcctttccttcctcaggggtcggggagaggaagaagcttccactagttttcctacaggaacctctggaggtagcaggttgatttttgcagtggaatttgtgtttttgtgcaacacaaaccttttcctgagcaccaaggcagcacttatttgcaaagccccataagcctgactcctttttagagatcccctagcagagtttatggtggtcacacagagctgctttttagatgcatttgcgggaactgggaaatgagccttcaacttgtacttgacttgtacttgttctcctgctgtgtgagctcaaggagcctgactcatgccacttcctgcacttcctcctgacctccacaggagggaggcaggcgtccatgcctggcaaagcctcctgctgagctgccaaagctctagctgtttkctcagctgtcacatccaggtcctgtctttactgaactgtctacacagccttacctggggtgtgaggctctccaaggcttcctgttagcttttttgtttggggtggcagggtgagggggatctattgccaccctcgaagaacatctttcccttgctttttagggagcttttcggcgctcccatttattccttatacaggctcagttttgtctagtgtatagggacagcatttctgagagaaagcttattcatttctcaagagtaaagatctgttaagaatatgggatcagagtcccactgagaatgatagtaaaggggatgggggcgttggaaggccttgaatttgaagcaaaggaaattaccctttctctgttttctgactcaaggttagtctctccctctgttcaactgccaggccagcccaggcctttgcagagttatcacagaaaaagagcatgtagagaatcagtgagttgcaaatttctgcagaaaatagaccaaagagctagctgctctgatgagtattgctgatagcttaaaaaaatagcttctgaaggtttataatgtacagtgaaaaatgattcccttttcagtcctgtgtatcccttttaccagggctttgggtttcaggagaaagtaggaaatcttgtccagttgtctcccaggggcgycctgcagggaagggagctgtacacgagacaatgctgatgtcggcagtgtctgagaaccttacccttcctgagacagattctgggagtgggtgtaggatgtgtttagaagagggctggtaggggtgggcgttggagcagaagggtcaggaagcagggggtggagctggaccacaggggtgggcaaggtgggtggaagagggaagagcgtatactgtccagtaggaggatgggttggggaaggagaatatccaggctggaggttgggtggcagggagcctgtgtctgatgttcctgaggaaatgtccggggctcctagggtcctgcgtgagggtccaggaaagagtccacgagttccattcaagagttcgtgtatcctgttcaggtatccggggatttggtccagggacctggaggtttggttcagcagaccaggaatcttggctctgaatccctgctgccacttcagaagcccagagccagtwgttctggctgaggcagtgaagtttgtctccaacaatccagaagtcctgtttgggagctcgttcagtgtgaggactagagaggttctgctggggacagctgtggtgggtggggcccgcctgacgcagagggtggaccctcctacaagcatcaggaaacgcacctttcctcggagcaggtgttggaagctcaggaagatggcattgggatccttgtgagctgtggtcctgccctgtggaggaagctgagggcagaggatggtcctgaggccaaacaccagggccagatctcaggcctcccttgtctaagtaggaaagacaggatgccagtacccaggcattgtggctggcagggagcactcttagtagatcagctcttctgcccttgagctccctggaagagcccttcttccctcaggtcttctagggggactgagtcagaaaagaacagtttctacagatcccttgactggggacttacctgggttccaaggaggctctgcagggccccaaggaggagacggacctgtycagaaagctgccccaggagggatgagaggcaagtgggtcccagttgtccccgtgctgccatcactccctccagcagaagggtcactgctcccagaatgtcctgtgccttggtctcctcctgagaaagagatggaagagagaagcgcactgcctcaaagggcacactaaaagcgggtggggagccttaggagtagccagcagagtgaatcatwcaggctgagaactggacaggaccaaggtcccacccagggcaggaattccttcacagtctcccgacagctggtcatcagcctctgcttcaaaaactcccgtgtcctctagtccagcctggtcttacacttggtttcagtgagaagagctccttttttcttacgttgctgaaatctgccctgttacagcttttacctcttggttctagtgctgcaaatttactctttctgctgcaaaaccttaggatcatttgatttttaaactgaatgaaggctgggtgcagtggctcacgcctgtaatcccagcactttgggaggctgaggcaggtggatcacctgaggtcaggagttcaagatcagcctggccaacatggtgaaaccccatctctaccaaaaatacaaaaattagctgggcatggtggtgggcacctgtaatcccagctacttgggagactgaggcaggagaatcgcttgaatccgggaggctgaggttgcagtgagttgagatcatgccactgcactccagcctgggggatagagtgagactccgtctcaaataataataataaataaactaaatgtaggtatgagactctaccataatgatcataaggatgaaaagaaaggactagaagggacccataggaactgcccttcttccctgactcagtcctgaaggaagaagggacgctagggttcttgaggatagattttagttttttaaactattgcccataaaacatgcttctagtctctttctgttcaggctgctgctttctagacacatgttagtttaatatggtccctcttaataaattagcatatgtcttcagggggatgtccggtgttcaggccagtatatttaagtgtagtccactcggaatagagttctgtacgagcatttccacaatggggatgcy

SEQ ID NO: 94180 - DNA, 14972 bp, Homo sapiens
gttggtctacctctctgagttagactctggctaccttgagttagggtgcagccatgtagaagtactgagagcaggtaccacagtaagcccagaccacacatatttgattttctgaaactgtacaggatttgtgctaactcatttgaggattcaagtagacctgggatggtggcaaggaacagtgttagtgaatctggattagatctggggaggacaatgtgatagttaccatttttaccctatacttgggtaccataatatttatcttaatcattattttatagtccaaattctttcatataaattttcataagtgcaggaattaaactgtttcattagtgcctcaagaaatgtaaaataaatagtgatgttcattcattcattaatttatttaataaatatgtattaaatatttgtcaggcatgtgccaggcattgcactgtatgatgttaacatgtttatctcaatgtcaaaataattttattttgtgtaagccttgtatgctataattttttccacatgactgaaaataaactctattttaggaaaaggtagtttaatgagaatgtagaggtaaacccttgaaatatttaaaatatcatgaaaatacagtcagcctccatatctgtgtgtttcgtatccttggcttcaaccaaactcggattgaaaacactcggaaaaaaaaaggatggttctgtctgtactgaacgtgtacacacctttttttttttttggtcattattccttaaacaatagagtataacaattatttacatagcatttacattgtattagatattataaagtaatctagagattatttaaagtacactggatgattgtgcaggttatatacaaatactataccattttatataagggacttgagcatctatagattttcatatccatgcgggttcttctacactacttttgcaaccctcagtgtctaaagacccttccccatgcctgatctcatcttcatgcttgcaactgaaagctagttctttctgtgcaaatggatatggaaggacgactgcatttccgattttaaccaaaacttcactatgtccatttttctgagcatccacaattcttgcatttcctattctgtcaagtaagtgtacaggaagaacttgagtgcataaaaagtataacactaaagtaaatataataaattcccatattgactatctataacaatttcttttagggccagtacattttcacacttagataaaaagaaaagcacttacaaatttatgttaggtttatttttctttctttttttttttttttgacagagtcaggctgaagtgcagtgacatgatctcggctcactgcaacctccgcctcccaggttctagtgattctcatgcttcagcctcccgagtagctggaactgcaggcatgcgatactacgcccagctaattttttttttttttgtatttttagaagacataggttttcaccatgttggccacgctggtttcgaactcctgaccttatgtgatctgcccacctcggcctctcaaagtgctgagattacaggtgtgagccaccgctccagcagttttatttttctgtaaaagattttgcagggcaatgaacaatagattgtgggtgtcattgattgtacacaatttttgattttttaaccaacagtccattccatacttatctgtccaactatgcaaggttaaaaaattgttcctgacaaaggaaactgcctccacctatttgcacacagattagccattccaaccacacctgctcactgacgccctcagcatttcctggtaagtacacaatgtaggaagggactcaactgcctttttctctcttcaaggaaaaaaaattaaaacatacttagcaggccaatgttcagacacagaaatctcagagccaaccaagggtaacaacccatttgagggtagcctgaatctcagggagtttatgctgacagagcttggctccgcctagaaagctaggcagtcagaacctattctggggcttccataggaaatatcaaatctgtctctggtgagtaacactgggagagcctttaaaatgaactaggatggtcttattatcaaatgaactatatccttgagaaagaataaggaatgagttcgaattttaggaaccacagttggcctggttcttgctcccaaagaattctgtccaatataaaattttggaaccgaataggtcacttttggcatgttgtgagttcattgctcattcagtgtcataaattaagtcttgaattatggagctctcttctacactacttttgcaaccctcagggtccaaagacccttctccatgcccatctcatcttcatgctggcaactgaaagctagttctttctgtgcaatattttgtggaaactgagaggcctttaaatgcacaaagaatcatttgttaccaaatgtaaaagaatcatggactattcttccatgttcgaaatctaagatgattcagagttcatttagtccagcctcttcattgtaagaatagtaatatctccttccacatgggtagcagacatgtttttgcccacctagcatcctttccctctttttcaggtaacaccacctcattttttcttttgggtaacttctctccccgcactgttattcaagaataacagattattccacatctgttattcagatgggactgattctagctccagaggagggtctaaagagagtacccattccctgaccacagtgattgcttcaagaatgagcactcatcccaggtttggccaatgacagcagtctaatttgatatcatttctgatgcctgttgccaggactatgcttaatacatgtacaatattttccactgaaagcttaagggacatttcaaggtcatagcaagtcattcacatagccaagatctccggatgtcttctcattttgtagtggggaaagagataccaacagataatttcggtgatacattaagggcatacattcattcaacaaatattcactactagaaacctggttccgtggtgggtgttcaggatggaattatgaatgaaacagtcatgatctctggatgtcccatgatgttctgaaaggtgcagcatgtgtgagagtgcacaggagggccatgtaaactaccctggatatatgtttgtgggtatccagaaaggcttcccagagaaagaaaccagcctcctaaatctctctgaatctatcctcctttaattttcttcctcatcctcacagctactgtctcagttcaggccctctttatttcacatctgaattacagcaataactttccaactgcacaccaccacacccctactcttaccctatttttacccaactcactctttactaatgacagaatgattttttcttagaaacttttttctaaagtataatgtccacccataaaagtacatatgtaagcatacagtttgatgaacttccataaccaaacacacccattaaccagagcctacattaacagtcagcattccgcagcccccccgtgtccccatccatatactcaccctccttatacgtaataaaaataagaattcattttaaaaatgaatatcgcttccttcctttgttaaagccttccaaggactttctcgacagcctgcaggataaacaccatctccttcgccaaactataccctagtaattcctcgcctactgccccagtcttccctccctggcctctgcagtgctgctccctctgtggcaactaacacctcagccctcttcctctgcattgtaatgattcctaattattccaggagccaccttctcaaagccttccatgatcccttccctccccactatctgtttctctcgtagatttttgaaggtagaaaccgtgttttgcatttgtttcccaatttgttaaatgaacaagtgagtaaatttattaatttcccataactcctttcctccctttccttctcctctaccctaccaatggctcttttaaaataagaacaatccagtcccctgtgaatgtttgtgcatgtatgagatgcacaatgatcacgtatgaccttcaaccagcaatttgcgaagtcacgactggtttccattcatccagacacaccttactacctagtatcccctcctcccacatcaaataagggtatagtaggggcagtttgtggtctcaaccctaccgaggtaagagggcacaaagaaaattgatatgcatgagacctcgggcattcttcaggtaaaaagatggcttaattggaacattcggaggcttaagagaaaatcgggagtggtggaaggaagcaatcaagcagggtaatatttcccaaatgcctaccggccacgtgccagacacaatgttaggctctatctgtgatgtcttatttaactgaagagggagaagaatgtgaataaatggctggattcttgaattgcataaaaagagaagccaatacactttttcctttatttcgtttaaacaagtaatttgtgcatttatagctttttcttttaattaaaagtaagagtggaaaaaagtcactgaaatgtctaatttcaaataaaatatttgatttctaatttctgtttttcaaacaaacaaaaaaccccagaagcattatgaaaggttttactgtgcaggaggaaatgttactaggttgatgggcctagccagaacacctaacatcctccatctagtctccaaactgaggctgtggccctgcagagagcgccacccggaagccacttttatagaagcttttacacacaatgcttgatttttttttttttttttccgagacggagtctcgctttgtcgcccaggctggagtgcagtggcgcgatctgggctcactgcaagctccgcctcctgggttgacgccattctcctgcctcagcttcccgagtagctgggactacaggcgcccgccaccaagcctggctaatttttttttatttttagtggagacagagtttcaccgtgttagccaggatggtctcgatctcctgacctcgggatccgcccgcctcggcctcccaaagtgctgggagtataggcgtgagccaccgcgcctggcctatacttgatttttaatgaaaacattcttaaattcatatggctaacgcaaatttattttctgtaggcataacatcaaaaacacctggcaggattgccccattcccagcactgtctatttctcccctagtatcagtgggactccactgatgcacagctgtgatctactaaaacttctctcaaaactttctcctctccttaggtcagcagccccgcccctgatctatttggaaatcccctgaataaaagttgaatatcataaaccaaagcgaacacccagaaattcaaattcaacccgtaggtaaaaaatttctcaagtgactgtagacgtagatgtctccagtgtcgcctaataaggtagaagaggccagtgcgatactgtctttacacccttaacttgggtgctagaatatttatcttcgtcatcattttatcatccaaactattttgcataactttcatgggtgcagaaaatgttttttaagtgcttggtaaaattaatagtgatattcattcattcatctcactgaacaggcaataaattccttgacgacaagggccttgggggggtcacatcttcatctttggtttatgagtcctgtgcgtcttggtacaagcaatactactatgagccggcaagtcagacttatttggtaggggaccaaaggaaagaacatgttttgattgctaagaaaacattttgttctctatcctttactgggctggcaggcaaaggaaatgttcttatgagcactcacattgaaaacttaagttcttcaccaaatgcagagactctgaaggccacgccgctgcgggctgcctccacaattcgaccgtctcggcgggccacgagatcctggccacggatgcggtggccgcgcctctgctcgcacgttcccccggcctctggactccctccctccctcaatccctccctccggcgggcgtcgctggcgggtggctaggcccaacggcaggaagccgacgctatcctccgttccgcggcgccgggtccgccttccgtctgttctagggcctgctcctgcgcggcagctgctttagaaggtctcgagcctcctgtaccttcccagggatgaaccgggccttccctctggaaggcgagggttcsggccacagtgagcgagggccagggcggtgggcgcgcgcagagggaaaccggatcagttgagagagaatcaagagtagcggatgaggcgcttgtggggcgcggcccggaagccctcgggcgcgggctgggagaaggagtgggcggaggcgccgcaggaggctcccggggcctggtcgggccggctgggccccgggcgcagtggaagaaagggacgggcggtgcccggttgggcgtcctggccagctcaccttgccctggcggctcgccccgcccggcacttgggaggagcagggcagggcccgcggcctttgcattctgggaccgcccccttccattcccgggccagcggcgagcggcagcgacggctggagccgcagctacagcatgagagccggtgccgctcctccacgcctgcggacgcgtggcgagcggaggcagcgctgcctgttcgcgccatgggggcaccgtggggctcgccgacggcggcggcgggcgggcggcgcgggtggcgccgaggccgggggctgccatggaccgtctgtgtgctggcggccgccggcttgacgtgtacggcgctgatcacctacgcttgctgggggcagctgccgccgctgccctgggcgtcgccaaccccgtcgcgaccggtgggcgtgctgctgtggtgggagcccttcggggggcgcgatagcgccccgaggccgccccctgactgccggctgcgcttcaacatcagcggctgccgcctgctcaccgaccgcgcgtcctacggagaggctcaggccgtgcttttccaccaccgcgacctcgtgaaggggccccccgactggcccccgccctggggcrtccaggcgcacactgccgaggaggtggatctgcgcgtgttggactacgaggaggcagcggcggcggcagaagccctggcgacctccagccccaggcccccgggccagcgctgggtttggatgaacttcgagtcgccctcgcactccccggggctgcgaagcctggcaagtaacctcttcaactggacgctctcctaccgggcggactcggacgtctttgtgccttatggctacctctaccccagaagccaccccggcgacccgccctcaggcctggccccgccactgtccaggaaacaggggctggtggcatgggtggtgagccactgggacgagcgccaggcccgggtccgctactaccaccaactgagccaacatgtgaccgtggacgtgttcggccggggcgggccggggcagccggtgcccgaaattgggctcctgcacacagtggcccgctacaagttctacctggctttcgagaactcgcagcacctggattatatcaccgagaagctctggcgcaacgcgttgctcgctggggcggtgccggtggtgctgggcccagaccgtgccaactacgagcgctttgtgccccgcggcgccttcatccacgtggacgacttcccaagtgcctcctccctggcctcgtacytgcttttcctcgaccgcaaccccgcggtctatcgccgctacttccactggcgccggagctacgctgtccacatcacctccttctgggacgagccttggtgccgggtgtgccaggctgtacagagggctggggaccggcccaagagcatacggaacttggccagctggttcgagcggtgaagccgcgctcccctggaagcgacccaggggaggccaagttgtcagctttttgatcctctactgtgcatctccttgactgccgcatcatgggagtaagttcttcaaacacccatttttgctctatgggaaaaaaacgatttaccaattaatattactcagcacagagatgggggcccggtttccatattttttgcacagctagcaattgggctccctttgctgctgatgggcatcattgtttaggggtgaaggagggggttcttcctcaccttgtaaccagtgcagaaatgaaatagcttagcggcaagaagccgttgaggcggtttcctgaatttccccatctgccacaggccatatttgtggcccgtgcagcttccaaatctcatacacaactgttcccgattcacgtttttctggaccaaggtgaagcaaatttgtggttgtagaaggagccttgttggtggagagtggaaggactgtggctgcaggtgggactttgttgtttggattcctcacagccttggctcctgagaaaggtgaggagggcagtccaagaggggccgctgacttctttcacaagtactatctgttcccctgtcctgtgaatggaagcaaagtgctggattgtccttggaggaaacttaagatgaatacatgcgtgtacctcactttacataagaaatgtattcctgaaaagctgcatttaaatcaagtcccaaattcattgacttaggggagttcagtatttaatgaaaccctatggagaatttatccctttacaatgtgaatagtcatctcctaatttgtttcttctgtctttatgtttttctataacctggattttttaaatcatattaaaattacagatgtgaaaataaagcagaagcaacctttttccctcttcccagaaaaccagtctgtgtttacagacagaagagaaggaagccatagtgtcacttccacacaattatttatttcatgtctttactggacctgaaatttaaactgcaatgccagtcctgcaggagtgctggcattaccctctgcagaacagtgaaaggtattgcactacattatggaatcatgcaaaaggaaaaaaagtttcatgatatctgttgttggcagtttttgtttatctctgacagtttttagttaaatgtttagatcctcagaactacattagtgcctactattaacttactctgtctcttgttaaaggctaaatctgcgcttctccctggtgccagcaggttcccctcacagtcaatgcagtggtatagcatatcctcacatttctagtgcccttgagactgtgctatggaaccaatcttgaacatacatgcattgacttgacaagttactgagtaagcagcatattcagcaggtgccactacatgcctactctgccagacactgagcttggggccctagggaagatagagaattatacaaggcaaagtccttctctttagggctcttacaatctatcacttccaaaaagtaaatggtgactgataaaacaattggcagaacctgtttgattactgtgacagtcttaatgataccataaatcaatattagaaagctagttgacttaaagcctgaaataatgggagttttctcctccacttattagaataaggaccctcagtgactaattattgtgggtagggtcaagattaactagttttatacagagttctgctgtaaatagtcattttgcatttgattagtgcagttctctgaatcataaagcaagttttacctctctgtacatgtttttgcagacatacttgaaaagctcacttaaatctaggtgcttcaattcactttcttgagaggacaaatgaaaagctgtggagaaaatgtcctcattaaagtattaaagtgtgggcagaattacaattacaaagtgccagccaccgaataaagataaaagttcagttcttaaaatgagtttttatgagataacagtcagtgatcttggtgttaccgggattccacatggggcagtgggaaagagttcaggttttgaaggtaacctagtttagatttgaattccagctatgtgacattgggtaaattagtagtagtcctgagcctcagcgtcctcatctataaaatgactggcgaaaatacttcacaagctcattttgagcactttaggaagtaagtgaaagtacctaaaatagcaggcacccaattgatgattttatatcttccttctttgcttgcagtgatttcaggatgtcctcatatctatttataggtctaaaattatatcttaaggtatgttgtagaataaattaaaaggataatctaaatcaccatttagattaagcttgacttgcaaactaggaagaagcacctaggctttctttgaaaatatttttttggttcgttttggtaaagctctataaattggtatctattattttaccaatttttttttagtattaagtccatttagaactaaccatattatttatggaataattagcatgaggaaggtataattgcattttttttttttttgagacggagtcttgcactgtagccccagctggactgcagtggcgtgatcttggctcactgcaacctccgcctcccaggttcaagcgattctcctgcctcagcctcccgagcagctgagactacaggcgcctgccaccacgcctggccaattttttgtatttttagtagagactgcgtttcaccatgttgggcaggctggtcttgaactcctgaccttgtgatccacctgcctcggcctctcagagagctgggattacaggtgtgagccgccgtgcccagccattgcatttttattcacatacacattgttaatgtggaacaatttaacactaatctcatcagagagcgagatgaatgtggcaattgctcattttattttgcatatattaaattgagtaggttcagctctaacataccttaagaaaaatgcatatcggtgcactgtatgtatttcaaaatgcctttcctatgattgtcatgtcctcctttaaggcttttccctcaaatttattacaaatttagtatttttagtacttgatgactctaattacatgaatgcacctggaatgacatttgtaacagaagacggtctgacttgctttcagtattcacaagttctttccagtttccaagtcttttcctagcagtaatttaggggagacagaggagtttcatgtaaagagcatgcagtttggagtcagaacctgggtatgactctgtggccttgatgaagcaagttacttaaactcttgagttttagctttctcctttacaatgcatgaatgcctatccccctacaaaacaaagattaaatgtgatgatgtatgccaaggtgctttgtatattgtaaagtgctatataattataagatgttctaaattttcaaggatctaaaccagggattggcaaacgtttttccagggagtaaatattttacgctttgcatatataatttatggaggtgttgagaggatagattagacacttgaagtactcaggatagtgcctggcatgtaggaagcacctggaaaatattcgctgtgattaccatcagtccattttaccgaggaaggagccaaggtccaggcccactgaaggacttgcataacattacaatagcagtggcagaaccagccatgcttctgcaaatcacaacctctttgagcctctgtcacctgaactgcaaaatgagtgggttagacaaaatcatctgttgggacctcctagttccacgtgctatcattctactaactggcaccctaaggttgaaagtgcttatctgctttccaatgtggcttccttacagtctggaactgacaatatgcaggagcagtaaactggcagaaaaccaggaatcagagaaagaaaatataatttaactttaaagatgtaaattatatatatagtatattatatatatttttaaagctttatatgcctcaaatatcagggaaaggagccaagtccttggtatttagtttggtgaatacttgcattgaatacatgtcaagatgtcaagtcatttttgaatgtgtctcagggatttctatgctacacattcttttaacaaatcaagtatttatgtacacatgttcagattttttgacaaaatgattaaaataatgagatggaaaatgactctgtttataatgtatatcctccatgcactaatgtgttcagtcgtcacccatgggatatttcttggcttggggcagtttctgtaagttcactagttctagattggtaattggaatgtgatggctttgcctcttctgtgttgcacaaagtccaattcagcctgtcctcttgttctttcttgcctgtcttttccactttattctgaggaatcatctccaagggcataagtagtatactcctttctctcagtccagtttattttcctgagtgctctgatgtgatgccctccatgtattgtctctagctcctgttcactaaattaaatgccattttaaaaagagtaggatcagaactgggaacatgatgatgggcagagagaaggggaggcaagctttcttcttaacagccgatgcttaaattattgaaataggaaaatacgaagtggtaataaacactaactattgtctcttctttcctacctgccctcctccaacaccacacacacgcacgcacgcacacacacatgcatgcacacacacacactctgacatgttcatttaagcacagactttgaaaaattatgatggccagctgaagataggagcaggattggcaagaaaaaaggattcaataatgaatgagtaaaaagaaaagtgcattgtaaaatagagcaggtggtgaatatagatggggagtgaagaggaaaagaaagatgggggtggggataaaagtacaaagtgaagagacgatcagatagaagaaaggcagaggctaggaaacatgagaaaagtagaggaaagataagtgttaaacggcaagagtggcaggacaaaggaggaacatatgcggcaagaatgaggaaataggttaaaatctaccattctctgccacaatgctgaaaagaaacctttgctccagcttgaaacgcagcatctgtcagcaaatggggagtcaaatcaagaagtctgaactcactgacagggaaagtcagaaacttaacaagaaatcacctaacattttagcagaaatatagaactgtcccttgattcatgacaacagattcttgaacttgaatgaatggtccttttcttcatcttggaaaattcgcattcatggccactttttcatttctagacagcatatttcatctgtactcaatattcacttttaaagaagtatattttgttatgttgtcataatcaccaatttactgttttaaagaatagaaggccaggtgcggtagctcacgcctgtaatcccagcactttgggaggctgaggtgggcagatcatgaggtcaggagatggagaccatcctggctaacacagtgaaaccccgtctgtactaaaaatacaaaaaattagccggacgtggtggtgggttcctgtagtcccagctactcgggaggctgaggcaggagaattgcttgaaccagggatttggaggttgcagtgagctgagatcatgccacagtactccagcctggcgacagagcaagactccatctcaaaaaaaaaaaaaaaaaaaaaaagctatttcaagtaagttttaaagaattggatttttatgatggatttattttcagatcttcaaatgaatgttttaaaaacttactgaagctgagtgcagtggctcatgcctgtaatcacagcactttgggaggccaaggtggtcgggtcccttgaactcaagagttcaagaccagcctgggcaacacagagaaaccctgttactacagaaaatgcaaaagttagctgggcatggtagcgcgcacctgtagtcccaatgacttaaggggctgaggcaggaggatcgcttgaacttagaaggtcaaggctacagtgagccaagatcgcgccactgcactccagcctggagacaaagagatcctatcccaaaaaaaaattactgaatctcacctaatatactaaaaaaaaaatgccctatgagaccatgagtgctaagcatcttaatctgaattatttttaaaaggggaagaaatgggactaaaatcagcaacttttaaccaacatttttcgagtggcttctatgtgcaggcactgtgctaggacttcgggatgtaaataaaattaaagcagggaccctgcactcaaaatagtctgttggacaagcgtatgccttgtcagggaaacagtcgtgttgagaaataatcccaacacatgatatatatgttagatcaaatgtagaaccaaataatttaaataactgtcagtaggagcctcagagttgtcagaggattgcatttcaggaatgaatgtccttcatcaaaaactaagtcatcttaatgttatttctgggaaatataagtgctgcaggctccagtctcagcactttaggcacctgatggttttcactaatactgcagttaaaaataagtgttattattaagcatcaccttcaaaatgattaatctctatagggattttgttctcctagcaactaggaacacctgcccttaccctatgatttttctggttctcatatgttaagtacatgttttaaaaatctctgttccattagctgaaacttattctgaaatataattaagcacatccatcttggtgatcaaacagtaacacctttagataactttagataacctagggtttatcaagccttcttggggaggtacaaatttgtggctttgaagttaggattctttgccagatgttttaattcactaatatttgttattattaagctcctactatacacaggatgctttacctaagtattgttctgttttttaactctttagttaaaggcattgtggtacacagccacgatgactgacattggtccttgcctcctggtatccatgccctcctgtattctttcccttgagtttggtttggatttagtgactcacttcgaatgaataggatatgggagaaatgcaagg

SEQ ID NO: 94181 - DNA, 80013 bp, Homo sapiens
tgccttctaaaaaaaattatccaagcatagtaatacatgcctgtggtcccaggtacttgaaaggctgaggcaggaggatgactgtagcccaggagattgaggctgcagtgagctatgatcacaccactgcactccagtccaggtgacagtttcaaaaaaaatggttaacatctaatggggagggggttggcttcagaatttgctgggagttaaaaggtacctcaacatttattgagtccttaccgtgcacttcattcagtgccagcaagtaaattatcacactaatccttatggggagctgggaagaaggtattactactgtgcgcttaagttcagagacatgaacagcaccaaagacccagctgctagacaacagagacaaacatctagccctggctctgtaactctgggataccctataacacagtaagtatgttgcttcattaaatagctttatcagtcccaagtcctgtgaagtcaaagcttagttgcaggagctgttcaaggcactatgtatctgggaatacagtggggagcccagctgcctctcaaagctaccatgtcaaattgctttcagaatgcactttaagcagttcagaaaattgttctttaaaatgatttcataggatgtgctttaatgatatgctctaacagggtaggaactctttcagtttaattaatctccaatagtatctaaaactgtacatggtacatctataataaatacttgagaaagaaaaaatacatttttctataactcagataatttgtgggcacactggcttttctctttctgactttcatcactcagttttctgaattatgacaaagaagggaagaatctaactttttgttgagcacttactatgtccagcacggtgagaaatagacaaactaagctttgtgaagtcaaatctgaagacagatgtggatggaaatagatatcgaaacagagacagagacggagatagagatagagacagagatagtgatagagatagagacatgcatcacttaacaaccaagatacgtctgagaaatgcattgttaggtgattttgttattatgggaactcatagagtgtacttacacaaacccacaaagcatagtcttctacacatataggcgatatgctatagcccattgcttctaggctacaaacctatgtagcttgttgctgtattaaatactgtaggcagtcatgacacgatggtaagtacttgtgtattgaaacatagaaaaggtacagtagaaatatgtcattataattgtatgggccactctgtatatgtgatccatcactgacaatgacatcatattgtggcacatgactacagtgtacatgtgttattgttatagacattaatattaatgtatagatatacacagatagtgatataggtataaatgtaaatattggtatatagatacagaaatagatttagaaatgaagcttaacatacatacagagatagagatagacgcagacatagacatatagatatctgattttcagtcctcaacacttggagatcaggttcttatatatctagatagatagatagatagatagatagatgatagatagatagaaaataggtaataggtagatagatagacgatagatacataatagataggtaatagatagataaatagatgatagatagataatagataggtaatagatagatagatagatagacagataatcagtgaaaaagctggacatataccagtcctatggtgtctatgttcaggtattcatccccattccttctctttagaccttaactccaaaagttaaggaaatttttttcctctggcttaactactctataagagcttccctataaagtgtgttaactagcaacagctcttatttctaaaatacttgtccgtgctgaatgctttttgcaggatatcgtgcatttatcaccatggcttcaggcaataggtgctgccaatatgcctatgtttttatagggaggttaaataaattgccccaagttatgtgggtgggaaatgaaagtgctggaatttgagcccgtgttgtttgatctctagggccatgctgtttcagctaccacagttctccacagctgggcactgtgtttggccctctcatgtgacgaagattaaattagaatcacaaacacatttgtgagatgatgccaaagtcatttcttctttatttgatcaagaggagtacattggtttgctagggctgccatgaaaattactaatgactgagtggtttaaacaacagaaattgattttctcaaagttctgaaggctggaggtccaagatcagggtggttttctctgaggtctttttccttggctatcttcatattcacatggtctccctctgtgtgtgtctgtgtcctaatctcctctttttataaggacaccagtcatattggattagggcccaccctaataactcattttaacttaattacatttttaaagacccaatctccaaatacagtggtgttctgaaatattggggttcgtacttcaccacatacattcatgggggacacagttcaaaccatgataactggttaatggattccctcactatatctctcccttttgttttggtctttagtcacttagtaaggggttgtttggactgtcttcaggaaaaatggtgagtttgtattttaaggaagaccctgaggtcatatagacacctgcatagaaaaattgcaactgagtttgatattctcacccaaactaagctcatgcctgtggaaggaggtgtgtgttggaaaatgtaacagaggtgatgggcttctagaaccaacttggctacaatattgtttgaaatgtttgttccttggtgccgtaaagaaataggacttgaatgtaaatttaatttactcagcaaggccatttttacttcctgcagaaatggtacacttgccagcagttttgccaggagagtacatagaacaaaggagacagggtcatttataacctgacgcatccascctactgctgtgtccggtttccactggctggaacgggacctcacattctgtatttgtcccgattggctagcaacttagaacttttttaaagaggcaaaggtagaggagaacaaaggaaagaggaagtaactcgtgaaatgctgagaaagattaaaacacttttaaataagcaagaggaacaggctatggcctaatgcttgcttggaccagtataagaatgccagggcaaatatttaggctaaattgtgggagctaagaacataaagtacattgatttctttattacggttagcagatatttaagaatcttagcacaggactttgaataaattttgcttttaagagaagttactatttattcctaattagatggggaggaaagtctttgaagaggaacctctattttactttttacaatattaaaattgcatcatgactttggggaaattcctgcctctcctgggatgttggcctaggttagagattttaagctcaaatatacacaggggctggacagctacaataagtggagaagcaggcaggagggacaaaataaagtggtaggaactgcatcaaactggagaacatctcatttaaataaagcagacaattctcagctccagccacttgacaacaagttgaaataaagacccagcatcactggccattactagttctattgtctattatatgggtctgttgtcagccggtattttatcattgttgaaagtgagcaagagggaacttaaatgttcatgatgataaagtgcttcaatctcaaagctgtttgagaaatagctttcttcagtcaacatttacatggaaagaaaggatccagcttaagccattttttccaatcaaacttcaagaaggatcctaataaaggaggttcctgctgtcatgttggcagcatatttcaggatctgaaggggcaatgaggtttaattttatgtgtcaactctgatgcattggtatcagctgtcctgaatgctactctagggaagaactcaatgccacatcccagtccattggaaagtgcagtgacattagcagtgaggactaagatctgaatttttttttttttttttgagacggaattttgctctgttgcccaggcttcagtgcagtggcatgatctcggctcactgcaacctccgactcccaggttcaagtgattctcctgcctcagcctcaccagtagctgggactacaggcaggcacttccatgcctggctaatttttcaaatttttagtagagacagggtttcatcatgttagccaggatggtctcaaactcctgacctcatgatccacctgcctcagcctcccaaagggctgggattataggcatgagccactgtgcctggcctaagctctaattttttatcttgctgaaattcctatctaaggggcttagggagttatgccctacaaaccataaattctcatcagatgggttttatttaaccctgtatatcaagacttactttccaatcagactctggcataacaagaagaaaatcaaaatgttttacccaaaaatatatttccttgccataccttgaaattgccctgaaaagtctcttgtaggaaaaatccacattctataaagaaccccatttcctctttgttttctttccttccttcccagatccaggagacaatcaactaagagccacatacccttttaggtctaagacatattttacaacctgctctctctctgacgtctggtgtctgagagataccggtgcacaataaaacttggtctccacaaagctttaccttaacctgaacattccttgccattratcccaggtcttcaaataaactcacccaattgtcagccacaaaatgtttaaatttacctatagcctggaagcccccactttaggttttcccacctttctgaaccaagccaacacagttcttaaatgtatttaattaatgtctcatgccttcctaaagtatataaaaccaagccgtaccccaaccaccttggccacatagtctcaggatttcctgagggctgtgtcacgggccaggttcactcatatttggctcagaataaatctcttcaaatattttacagagtttaactctttttgtcaacagcagcatctgctctgaggatgatggtgtatatttttcagtatctttatagtctcaagtgacagaaacccagtctcaggcaaaggagaatcttttggcttacagaatccagagaatattaacaagacaggggcagacatgcagaggaacaatttgaaccagggacttgaatgactgcaggattcttactccacctcatctcattgtttctgtacatcagtttcattctcgcctgtaggggggctgtctccacatgataggaatcataaccacaaacagcacacaaaatgtgcattccaccagagggagacagcctgatatatttaaatctgtttagaaacacacacacacacacacacacacacacacacacacacacacacacacacacattggagaggtattatgattggcccagcttaggttacaaagtcatgagaaatgactgctcaaccctggaccaatcaactttagtcatgggatgggatcatataaagatatcacagcttccatggcaacaacatgatttggcttggcagaaagggaagtttctaaagtaaagacactataaggtacagaactttccaaaaggcgagttgctctaccacaaaagggatgaccatatggcttccatcctgggctgacatcttagcaggttgaaggagaagacccctaggaacgcgcaccaaacccataatagtagctatataacctccccagcgttttctgccatgtggttcctcagctgggaagataaatccccaccaaaatcaatcaggggtgccttccaaattctggtgacctgaaacaaagctataactgtagcaattaaccaaaaacatgcacccaatttagggagaaagttttggatacacagccaatctattagccatctcttcccaaggcaggtggtgacttgagaactctgtgcctggtttctgaggactgtttcaccatgcagtggctaatgaggttccggaccctctggggcatccacaaatccttccacaacatccaccctgccccttcacagctgcgctgccggtctttatcagaatttggagccccaagatggaatgactatgaagtaccggaggaatttaactttgcaagttatgtactggactactgggctcaaaaggagaaggtaagagatctgccgtgatggcgatataagaacaagggtggcctcactttccttatcttgctcctactaggctgaaaggtawggaaccaaagttacttctgcctcaacttatcagtgttgtggaagaagcttatatttcaaggttctattcccagcctggccatttccttacttcattgagcctcagtggtttcatctatgaaatgaggaattaactcctttaaaaacaagaaaataggtaaatatatcttttattcaatcagggtactataattgtgaccaggtgcaaagttctagtcacaaggtcagcaaattcgtattagtctgagttctcatcttcagtgaatgggacaatgtgtcttaactggtattcatgtcatcaaacttgggcttgacttgagactgcatgcagaggaggggatagaccacctgaatgtgcacatgagtgtctgacacatttacctatgttaggccatccatcttcccatgaggatggcaagtctaattagattcctccttgtcaactacctacttgactgtggctttaaggtatgtcaagaaaaaccaagccctgtgtcttccagaggttatgtgtttctgcagaaaaccccaagtgcttggtttgtcttctcacaagacacagaccaagagagaagcagtagtgacattaggagtcaggtagacaatggatggtatttatagccactaactcccagctgccaatatggtagtgtaaaaagtcacccagcactgtctttgtacagaagagagaatccccctgagatggaattggagagttaatataatttttaagtgttccatgaatatgtattcatgtattactatccaaagcctacatgcctttatggcatcttcctccccaccaccttctttttcttttctctgaatttgcatagtaacctcaagaaaaataaaaccctcagttacagagagcattgttatgtgccttggcaatcaccttgcatttaatcatctaattagatgtgtactgttattgtctctatttccttaatgaagaaactgaggttccaaggatttaatgaatatactgaaatcacatgtctaataagtrggagagcagggtttgggtccaggctgtctgatttcacaatccattatttaacctagtctcccaatctgatgatgccaaaatatctctgccttaagagtataaattcatttttttcattgcccagactggaaatctggttgagaatttttgaaacaagatgggttggagaggaaggaagtaaaaggaggaggtgaatgggtgaacattactatataaatttgagtaatataaatgcaattttgtttttcaaaattaatattaaactataagcattttattataaaaacaattctaaaagtttttcattgattttatcatattcaatcacatagaagtagcttaatttttgcagacagcatgtagttggattttttttttatccattctgccaatctatgtcttttgactggggagtttagtccacttacatttaaagtaactactgacaggcaaggatttactattgccattttggtaattgttttcttgatgtcttatagcttttctgtctctcatttcctctcttactgacatcttttgtgtttacttgagtttttgtagtgacacactttgattttyttctcatttccttttgtgtatattcaataaatatttgccttgtggttaccatgggaattaaatatgatatcttgtagttctagcaatctatttaatactgataacaacttaattttaatcacatacaaaaaccctactcccatgacattataaggccaataatgaaaattaaatgtaaaaatccttcccctttacagttctatcccagccagcccctccccacactttatgttattgatgtcatcaataacatttttgtatattgcttaattaacatttatttaacatagatattgtaaatatatgttaacatatattaatatataatayaatatattaacatattaaatatatgttaataagttaacatatatttataattatttttatgatttgttttttaaatactgtaacaaataacaagtggagttacaaaccaaacttataataatattgatttttatatttgtccatgaatttatatttacaagagaactttacattttcatatttgagttcctctccagcattcttttatttcaccttgaggacttcctttagcatttcttgtaggggcaagtctagggatagtgaactttgacttttgtttatctgggaataccctaatttyccctttacttttgaagaatctttctggatgtaaaattcttggttggctttttttttctttaagccctttaaatatatcatccacttctttctggcctcaaggtttctactgagaaatccactgataatcttattgagaatctcttgtacatgagttgcttttctcttgctgatttcagtttaattataatgtgtcttgatattggtcctccttggatttattctacttgaggtttattgagcttctcatatttgtattaccatgcattgtctcaaatttggggatcatggggccaatatttcttccaataacctctatgcccatttctttctctttctttttctagaatgcccaaaatgggtatattggttggcttgatagtgtcctataattccctcaaactctgtttatttttcttccttctttttaactttttcttctcagattcagtaattttaaatgacctgtctatgtttatggattttttcttctacctatttgaatctgccattgaacccctagtgaattttcaatttagttactatgtttatttagttactatatttttcagctccaaatattgtttggttctttcttttttttttttttgagacagagttttgcttagtctcccaggctggagcgcagtggcacgatctcagctcactgcaatctccacctcctgggttcaagcaattctcctgcctcagcctcctgagtagctgggattacaggtgcatgcaactatgcctggcttatcttttgtacttttaatagagatggggttttgccgtgttggccaggctggtctcaaactcctgacctcaagtgatccggtagcctcggcctcccaaagtgctgggtttacaggcatgagccaccgtgcctggccgggttcttttttaatatatagtttctatctttttgttggtattgttattttgttcatatatagtttttctaatttcctttaggtgtggatctgtggtttcctttagctctttgagcatatttaagacaattgatttaaaatctttgcctagtagctgaatcctgtgtttatttagggtttgtttctggagatttattttgctcccttgaatgagccatgttttcctgctcctttgtgtgctttatgtttttatgttgaaagttaggcatttgaaaaaagcagcccccctctctcagtcttgaagagcagctgcatgcaggggtagaccttcactaatcttcatagtgtgaaggctttaggccttctcaggccttttctagcatttatctttccttggcctctgtgtgtgcatcccgccccacctcgctaattttcccgtataaatggctgttttaatttcttaatttccctaaaagtctcttccttgcttctcttcagggtcttacatgttttattgtatttctctttcccctacgtgcctgcaggtctgatgtttttgcacagcctgttacccaccactgctttcagagacccccaacatcatattcaaattatgccatggtttctatctgacctgcaagtcaggcaagacagaagccagtccctccgcaacccttggacaagccagaacattgtaaacaagtttcactcctttccttcagtcctgagagaagaggtgggagttggggggcttcctcttgactgcaccgcaccacaccagaaagagatgggggcaatggtgaccaaaaaaaaaaaaaaaaaatcacaaaattttctaccattttgagtatggctttttcatttttttcctttttaaatttttaatcatacgtatttaaggtgtacaacatgatgtcttcttgtacatatactactgcagtcataccaattaacatgttaatcactttccatagttaaactttttttttttcttttttgagacagggtctcattctgtctcccaggctggaatgcagtggcacaatcactgtagcctgaaactgggctcaggctatcctcctgcctcagcctcccaagtagctgggaccacaggtgtgtgccacctcgcctggctctatatttagcttttatttatttatttttattttactttaagttccgggatacaagtgcagaacatgtaggtttgttatgtaggtatatgcgtgtcatggtggttttctgcacctatcaactggtcatctaggttttaaaccccgcatgcattagctatttgtcctaatgctctccctcccatggcccctgacccgtcagactggccccagtgtgtgttgttcccctgcctgtgtaagtgggaattgagtatggctttttcatgactgggggcatttgtttggttttctgcagatccttggctggtttctagacctcccatgaagctatttcagtccatctgttgtttctgtaggtagaatcttgctgtttctatgaggcaaaaaagggcctggagcttcctagtctgctttgttactgccctcacctctaagagtaacttaattaaaaaaatttttttcaaaaatttagcaattaagtaagcctcttttgttttgttttattgtgataataataatatttattgagcatttactatgtgacaggcactcttacatgctttatgtaaataacttatttaaactttgctactttctaggtaataattattgtcagcattttattgaggagaaactaaggcacagagaagaatgcacagtccatatggaattaaggcaggcatgtggtggaatggagttttaaatcttcaataggaagcataaaggctgtttatggtcttatgtggcttgaggcagggtggctacagtaggccagaagtcccgctccacccctaaacctctcctgatgctataagttttttgttttttttttktttgktttttttttttgaracggagtctcactgtgtcatccaggctggagtgcaatggtgcaatcttggctcactgcaacctctgcctcctgggttcaagcaattctcctacctcagcctcctgaatagctgagattacaggcatgcaccaccatgcccagctaatttttaaatttttagtagagacagggtttcaccatgttggtcaggctggtctcgaactcctgacctcatgatcaacctgcctccrcctcctaaagtactggaattacaagcatgagccactgcgcctggctgtataaatgttttaaaatgggatctcagtccttaagctgtgttcacattggaacgtgactatggctgtggattagtttactaagtgccctttttctttgaagcagaaaataayacataatatatggtcttgaccaggagggcaagagaggtccaaatccagctttttggtgggtgaatggccaaggggatgaagtaaagtggagcttcagagagatgggagacctaacccgccgtgtagccaacgtcttcacacagacctgtggcctacaacagggagaccatctggccttgatgctgcctcgagttcctgagtggtggctggtggctgtgggctgcatgcgaacaggtcagtgatgcaagagggacctggtggacctcggggctgttctagaaccaatgggtcctgagatattaggtgctgtgcacccagcctggcactgacacagctttgaagccttcgccccagtttctgtgctgggaccacaaagcaaggcttcctgccctgtgggaattatcagtttaattagagacaaaacaatttctcttctctgtacctcctttcttcttcacagtctttgtctttctcatactccctcacaaattctcttattctctccctcacactctcacattcatacactctcaagtgcagtgccaaactttgtctcatacacacacacacacaaacacacatacactttctcttgcacagcctcagagagtcttacttttttaaagattcattgataatgtttttccatatttgagcactctctccctctctctttctctccctttcttactgaattatttaagaatcactagtgggcattgtgacacctatgaacaccaggtaaacactcataaacacaaaagcaggcatctgataagatccaaaatattccacagccttttctgcatgacagtgacatttttgaagaatgcaagttgtattgtagaatatatctccaaatttgtatttctgactctttctttgtgattatattcagattagacacgttaggcaggagaattgcaaggacaaagttgtgtcttcctctgtgcatcacatcagggggtatattctgaagtcagtttgttccctcttcagttatactgttttatcacttaagcaaggtggttttcacagaaaacctttatcctttacaaaggcacaatttttccttgtaattaataaataattcattgtgtgatccttaagcgattgtgtgaatattcctattccctaacattctttcacattatggtttgagtacctagtgatgattctttacckaattgaatattaccatgttggttttacatggaaattttctatttctgtcagtttcatttattagttagaattcttatrtagagatttcccttccccttttgatgacttattttttgtctatatagattagaatcagtgactcacagattcttttttgaatcacttctctcattttatcatgtgtacagcactctgccatactcttgatcatattttctctctctccgtctcatattctctcacaaataaaataggtgattcattcagccagatcatgtgaaatcaagaagtaataaaactggtggaaggagtatagagatgaaaagccatgtcatctgtagacctataagatggtccatgggaaatctaagacttggcctgggtggtggcttaggcctataataccagcactttgggaggctgaggtgggtggatcatgaggtcaggagatcgagaccatcctggccaacatggtgaaaccccatctctactaaaatacaaaaagaaagaaagaaagaaagaaagaaagagaragagagagagaaagaaagaaagaattagccaggcgtggtggcaagactctcaaaaaaaaaaaaaaagacttgagctgagccctctgggctaagaagaattaaagaggattagaaacaaaggaaggacattccaagcatggggtgaggcatggccattttgaaatagaaaataaggtgtaggggagaaagatggaaagaaagcagcatcttcaaagtcaggacgagaagtgtggtgttttcctggagagagggtacaggtgttagtgcagagaagaaatgtagggaggccaggcatggtggctcacagctgtaatcccagcactttgggaggctaaggcagacagatcacttgtggtcagaagtccaagaccatcctggccaacctggtgaaaacctatctctactaaaaataataataataataaaaaatagctgggcatggtggtggacacctttaatcccagctgctggagaggctgagacaggacaattgcttgaacccaggaggctgaggttgcagtgagctcagatcacaccactgcactccagcctgggtgacagggggagactccaccttaaaaaaaaataaataaataaaagaaaaaaagaaattcagaggaaaaaaaagtcaatgtttatggaactaagcaaataataatatggaagatgggtagcaggaagattcaaaactggtggagggatgagaatccagaaggaaacacaaaggcttgagctcactgttggcaatggagatagaagggaatgcaaaaaactcaaaggacaatgtggtgaaatacagaatgaaggaaagaggggacattcaagatgacatccaaggaakgacagaaaggggaaaaggaagggaaagatgggggagagatgcagctattcttgatgtcagagacactgttctgtttacatctatacttccagatcctgtgtaaatgtgtgtaaagcagtgtccaccyattttttggctagatccatttacagtagaaaagattagggcagggcttacaaattttagtgcaaaagaatcacttggaaaacttgttaagatgcagattctgattctgtaggtttgaaacagggtgtgagattctgcatcctggatagtgctgctgctgttgttctgtggcctgtactttacataacaagaagttagggtatttygatgcagacaagccaagtctaaagcccatggttgtgaaaaagaaaccaaaacaatcagttcctttctcatccccagggatcatcttcattcctgcgaccatcctgttgaaggccaaagacattctctatcgactacagttgtctaaagccaagggcattgtgaccatagatgcccttgcctcagaggtggactccatascttctcagtgcccctctctgaaaaccaagctcctggtgtctgatcacagccgtgaagggtggctggacttccgatcgctggttaagtgagtctctggtctgatgaatataatctctgagtacagttgttgtgggataatttaggaatcagagagaccagtggggttgaggaggatgtatttattatttaggtgcaccagcccagtcagattaacatccaaaggactgagccctgaacaaagagtcaggttaccttttaagcatttcatggggtgagaggggagatctgtgcagggggaagcttactacagaagtgagaaacaaagacagttattcagttgagacatgtattacatcatttcttacttttcaaggaaaaacatgttttacaacttgagtttatctgtctagtgaccatgcagctgcacagctggagaaacagggtcttcacaatgcctgggaaagggagagataaggctcactagctacagacggaaaaacaggcagtgaatttttaaaggactccacctctttctcttcctcaggaggaattgggtttccctacatacaattgagtttttgcttatgcattctttaatttcttttaattcctgttccatttcccccctttgttgctttttataacaaaggtgttaatagaaagcaccactatttgccacctcttcacagagctgagcttcttctactggcagtggctgatatttggttaatgccatcaactgtgyggtagtgtgttgagttattactgcctcyatagttgactgaatcctcctaataaacaggggtaaaaggtaagggaggatgaggcagatgccaagaataaacaaaaacccaccagtgagggttttgaatcctccaaaggttgagaaccatcctccaaacaaagaatccagggaccattaggaccaagtctgaattggaacatgggccaacttgtgcattctagctctgatttccatgacaacccggccattattagcaatttctaggcaacrgttggttaaattaaattttccacatactcttccttcagaggctaagtgataatctaatgccaatctatttcaatatatagcatttctcatttgtgttgcttgtattgccaataaatctagtgcccttgatgtttcattggttataatttcaaagactgcctgcaaccttatgatgcagttgagcatatagattggggtgtggtaaccccatgacccatcttgcacccaggtagctggccaataatatttaattattctttcaggaggccattcattatctttccagtctcctatgtccacatcctttttgacatttgtgtctatttttgtgattatgctcttctagttcttcttttattttcatcatcaactggataccataagagttccccttgctttagaggaattagaaagaagaatggcttgattgttactacacacatgctcctgtccatttagctggmagttgccaatatgcccatgctccacagatccaatataggccagagggtgctttcgaagcatttggaacctctagttgaygccaagtgtggcttagggtagagaatggagataaaggatttggatctggtaagtaggagtaattcygggtgcttctccatagagttttgtttttagtctcatcataayactgttgccctaggcaggttatttctcctactgcctctgtgaaagcctttccccaacgggcgatacggtactttccaattatggaggtttttaacaaccaaacactggctgaggctgttggttcactggcagggttaagcgaagtgaagttatcttgtggcattaattcctttgcctcccatggccactggttccccatattagttcctccacgtacatagcatgaggaaattcctaagctgccagctatgttttcagctagttgagcaaataagtttttggttggtgggggaagctcaggcactggcttatccaaatgcttatagaatgattatggacccagaattgcggggttggatgcatttgagtccttttagtctttttgacaattagtagtggaactccaaggcctgctcctagtctatcaagtcgttatagtgctgtctgtcctgtagaccagaaaggtatctctggctttaagatagtaaaatgtaaaggattgcatgttcttgtcttacagtttggtttggttaacatactacttagcagagcactccttcctgaatataaatattggagttgtgttagtgtggaccactgaatgttacagtctgggcatccgatttgtggttctttgtacagatgcttagggctgctcctgctaagcctctcttgtgttacaccattgcagactgcttctgtttttttttaggattgtgaacatatgcagcatagcaggcatcaaagtacaaggaaataggccctttacaggagggaggggcttcttttgttcgagctataactctccttctttttctccctctgatttaatatgtatttcaaaccagaattcatagggtaagagcttagggtcataacatacatatagctgattatttcctgggtcacagaccgaataggtggtctggttgtatgtgcaggttcctaacttggttcctgtactgtaggtatggtacagtagagttttaactatggtattccttacccaggtagtatgtacacagtgtgggcatccttctagagatttctccccttctagtataggcagaaatggtaacaacattagtgtatgtaatagaaacatgcttacactacacataggaatggcaaaccttcctctgggcatggacatttgcagcatttgcagtaataatgtaacaacagaacaattataactaggcttataaattttatctacatttacttatctagagatggtcctcttagcttcggctgtgtgtagactagtcagcttccaggatgtgactagagcagagcttgcaagatcttcaagcttcagccatgtgtagactgaccagcctccagtgtggtcagagcagggcagttgtccttcttactggtggttgggattcgccgtaggtctattcgggtggggcaatcagggtcttgttggttaatccactggtcatagtcgggagtcactgctgctgctagtttcagccagctatggtgaatccaaggtgtgacacctgcaactttaacagcagtagaagtagacatgattacaatatgaggcctatcctgtatgggtcctagagtggttggattccattttttaacttaaagaaaatccttaggtttgaaagggtgtactgggtctgttagacttataggcatttttctatacctagccatgcatttttgcatggccatacttaaagtctgcatttgccttcttaaagttacttcttctagtctacagatgatggggggtggccggctgaacaaaatctcagagggggaatacccagtttgcttggtggaggtgcacctgacttggaggaggaccatgggcaagacctgatcctacctttgatgagtttcttgacacaatttcttcagcagttgttttagtgtctggttcatgctcttcgctttacctgagctctgcagtctgtaggctatatgttatttccattttatttttaatagtcaagttaagtcctgaactatttcagccacaaatgttggtccattgtgagatcttagagttagaggcagtccaaatctgggaataatgtcttttaacaacactttggtcacctctagttccttctctgtcccggtgaggaaggccttgacttatcctgaaaaggtgaacaccaacatgtactgatagcccccatcacagggtaattcrgtgaagttcataagcagtttttcacatggcatggcttctgtttcctgaactcctgggggtggagtaagcccttgtcatggattgttctgaacacaagttaaatattgttcatttacaaatggcttgagtaatagcagtgagccatggcacatagaaatgatgccttaataatgtctttagtgctgtttttttgtgtgtttttttttcaggtcagttccttggtggaactgttttacaaatctgggggccaccgtttcagggatggctagcctcccactggaaaatttttactatccttcttcaatgtagttgatatttttctgggcaaaacaagccctttcatttggagtgtagcttgggatctacagaaggggaatctctgggaggagaggcatagctaaggcttcttctttagaaggtggggttgtcctgctttgcctctttgtctcatttatttatttatttatttatttatttattttattttagcctttagtattcttcctttatggtgccccttgcagtgcatctctgccacatcttttaaggcctatacagcatttaagagctgtagaatttcttccttgtactttatttctttactttcagcagttaaaagccttttttttctttgtaaatagcctcatgaacatggaaagtgtcagaagcatatttggaatctgtgtaaatatttgtcttttggtcttttgctagccagagagctcttgtcagagctattagctctgctttctaagyagaagtttctgtaggcaaagactgcacctctactactgagtccaaagtcaccactgcatacccagctcagcagattccctttcgtatgaaactgcttccatcagtaaaatattctatgtctggstccccaaggggcctatctgtcaaatctctctggcttgagaacacttcatctatcacatttacacagcaatgaagggggtctcctggtactgacttgatgaggagcaaggtagccgggtttagggtattcacagtctctaaagttagtttgttagcttattgagccagtagggcagtggcagctattgctttaaaacaaggaggccagtgaagtgccacagaatctaattgcctggataagtatgtcactgggtgatgccatgaccttatggcttgagttagaaccttcatggcctccctttcacttatggrcatacaagaagataagcttagttagttagatctggcagtcctaaagctggggcctgagtcaaggctttttttttttttttaatttctttaaaagtcttctcctggttagcctcctagaggaggggytctttctttccttctctttgtggcttagccataagctagaaatttgggatctaaatgcagcagaaccttgctgcccttaggaactctcttatttgacaccaggtggttggagtaggaagtgcacaaacagattgcttttgtttactactaagccatctttcctcttggcttatataaaggcttaaatactggagacttttagagcagatttgagcttttttctgacactttatgtcctgcctttcacagcaggtgcagggagtcttgggtttctcctgggtgcagtagcccttggctggagggtttttttttataccatggccttgaccattctccttattttatttatttattttttggggcatttattcttctagtgtcatttccttttgcaccgtgcacattaatctctctctagccttggccagctttcaaactcctgtccaaaccagccttttccatgactgtgttcacgcccacgaccatgcctccttgcaaagccagcttctcttcccataagggctgctgctagtaaattagcctttgttaagcctctgatcagctttcttctctgcctcctgaactcagttaatgtacaccttgtaaccactttaataagctgagttgcattcacrcctacggagcttctaacttctgcaatttgtgcctgatatctccttgggcctgccttacaaatgctgtgtccaccatgcactgattttcagcagccttagggttaaacagagtgtacaaccaaaatgcctcaaaaagtctttcttaaaactggctggtgcttttatctgcaccctggagcacctctgagattttttatattggttgcctttttcttttaccagcctttagcctttgcagaagggcttcttggcacttttgtaggtgctgaagctggactgcatcatctgggtcctagtgggtrtcctcttgtcctcttaagaggcrtaagcataacttgggcgtgaccagacctgagacaccctccctgacttttccagcctttcactttaacttcctggagctctaatttctccttctcaggtgagactgggagcctgtatctctttgaacttaattccttaggggcagttagccttggtaaagggaggtagattggaatgtagggaggaggggtctctattccctcctgtggttcttgcaaaactggttttctctttcctgagacttttcttttgtctccgtagttgccagggcagctgatttttacttttacttttggctttcacttttcacttttggtgctacaagcctctgtgactttacctttaactccgtagccgccagcgcagctggtttctctgggtgtgagctgtgaacgttctacaataaactgctaggcagggctgcattcatttagccatgaatcaatataaagactaggtctgaatgccctggctgtcttccagggctagtcactaccttaaaacacacagccaatttacctatagtgccattggtcagccatccatcactaaaagagggctattctaattcacagtatgtccttaacttttgaacatccagtttcatcccataatcagctctaaatccyttttaaaaattctttatcatgcactccaaaaggagttggtttccatgcttttcctcccatttcctcccttgaggtgcactttcactctaaggtccaccagactgggtcctattacaggagtttcagacgctgcttagccaggaacgtgcctttccctgccacagactgctgcagctgtgaagctcaacctatcagccatatgcaacatcctaggactgatttcccccacactcgcctgggagcacacagcctgcgctaagggatctgtgcctccccacattrctccccgcattggcctctcctgagaccgtctctttcacacactttcacacacctcccttgcctcaggactcctcatcggacaaaacaaccctctctcgtgtcccgggtgagcctagttagattcccacattcacacacatacacacaccacttctaccccaggactcttcatcagaggaaacgaacctctctggtgtcctgggtaggtccgcacacacccacacactcccagttggggtggcaagccactcttaccattctgccagcaaactcttccttgctgcacttgccgctgtatcggcccattttctccaccagtgaaccactttcactttgttagggggacacgaggttcatccaaattggcgggccactcctgccacccccagccactctgggttggatgagtggttggtccctgggaggtgatcaagctcaccttcatccctatgggatgggctttcctaccttgggccctttctccttaccgcggttcctgaagtgctggtgtcatcctgcagccccatctcaggttcagttgcactgctgggcaggatgcggggagagccagtctccrtccgggtgaaactcccccatggcatgccttggatgccaggtcttccacagccccagggccctagtcccatgggcaaaggagacagtaaatctgttatctccaatccccatatgggccaccagaaatgtttggggatgatttaggaatcagagagaccgatggggttgaggaggatatatgtattatttaggtgcaccagccaacccagtcagattaatatccaaaggactgagcccagaacaaagagtcaggttaccttttaagcattttgggggtggagaggggggagggagagatctgttcagggggaagcatattacagaagtgagaaacaaagacagttattcaattgagacatgcattacatcatttcttacttttcaaggaaaaacatgttttgcaacttgggtttatctgtctagtgaccttgcagctgcacagctagagaaacagggtcttcacaatgcctgggaaagggagagataaggctcactagccacagacagagaaacaggcagttaatttttaaaggactccacctctttctcttcctctggggcaactgggttttcttacatacaactgagtttttgcttacacattctttaatttcttttaattcctgttccacaggtagaagaatgccattcactcccaagtggtgagagacaagcagccagtggtaggaaggtcatcaagtcagttgtcagaaacctcacttatgtcactgttttgctatgtgaccctgacctagttccttgccctctcttgatctcagttgctttatctgtaaaatttcacatttttcagcaagtcaaccttccatgttcctctcattaaaatatactcacccctgggactgtgcaaaggagatttgtaaagtcagggggttattgtgttacatattccttgtaggtgggaaacctaaagtcttatttttctattaaaaatatatgaagtagttgaatgaaaggttaaaatgaatttttaaggtaaaacttaagaccccaagaaaaatggaattgccaactatggcttataggtagctttgggagcaaactctttccatctcccagggactgggtgccttcagagacacctgggggcaaagtgaaggaaggctggagataagaaaggccccttctgcctccaaaactctgattctgtaagccttcagtcatgtctcacattatacacacaaaccatgctgggtttgttttcttgkagtaatacttgagtttttaaagctctttatttcaaccccaaaaggcaaacattacagcaaagtcacatcttatrctgtagtctaatgtcagagaatttaattaaaacagagtactcttgaaaaatccctcgaatttcccaaagtcagtatgataccatttcacagcaagaccagcagacctagtgtttcctctcgtgttgggattatttgcagttgctttgaacaccatagaagccttgcatttacaattgtagtaggcccaaggccctctcagtccaggggaagctcctgagaaacaagagagrctgagggaaccacagatcttatctgccatctcaagctcatgctagggcagaggtacattgatcgcagtaattttatatataatatatatataatatgcaaatttatatataagtataatttatatataagtatatatatcatataattatatgtatatatgacatgtaagtrtatataatatatgacatataagtatatattttatatatttawgtataattttatatataaattttatatatgagatataatatataaatgtttttatatatttatatrtaatatgttttatatatatttatatttattatatattatatatatttatatttatatattatatattacatatattatatatttatatttttatatattatataatatatattatatattatacatattttgtacataatttatatataagcataatttatatataagcataaatattatatataacttacatatacttacatatacatgtatatgtatatatatacttatatataaattatatacmatatatactatatgatatatattatatatacttatatataaattatatatcctataattatatttatatatgacatgtaagtatatattatatatgacataaaagtrtatattttatatatttatawataattttawawataaatttaatatatgatatataatatataaatatgttttwtatatatatatatatatatatatatwttttttttttttttttttttttgagatggagttttgcyctgtcacccaggctggagtgtagkggtttgatctcggctcactgcaagctcrgcctcccaggttcacaactaatctcctggctcagcctcccgagtagctgggagtataagcgcccaccagcatgcccaactaaatatattttttttactctccccctttctctctttctyttccccacccctcatcaccaaggkcacagagtttaattttaaaaaacaagcttarcagtctggttaagggcacaractaggatgccgactgagtttgaatcctggctctgccatttgctagctgtatattaccaagcaaattacctaacctctctgagtctcagtttccttacctgcaaaakgggcatgattagagtagtactcatctcctagggttgctctgagtactgaatggttcatatttgtaactcattgagagcattgcctggaacatagcaagtgctattyaaatgttcattagattacttaatgaattcattaaattacttaagattcattacttaaattacttaagattaaatgacttaagattcattgtattttactaatttttcaaataaaaaaatgctggtccacatgtccgaatcacccatcaagtcagtgtgatgcctaactccgggagagccagttttcctctagtgttgcaaactcccagtttcctgtccgtgccttatgtttcttttgcattcccagaagatgaagaaacagcaatcatgacttttttccttttgtcttgaacccctttgcagatcagcatccccagaacacacctgtgttaagtcaaagaccttggacccaatggtcatcttcttcaccagtgggaccacaggcttccccaagatggcaaaacactcccatgggttggccttacaaccctccttcccaggaaggtaggaaagagggcaccgacatagaggctggacccagatgtgggcaaagtttgtgtgtgtgtgtgtgtgtgtgtgtgtgtgtgtgtgtgtcttgggaaaggaactggaagtagaagtgactacatactccttttcccttccactctcttttgttcagacctctcagggtctgagaggtgaaggctgggaatcctaaatgtttgctgacagaggcctgagagtgacaaaggaggcacatttaggttttaccagagcatcttcataggagatgtggaggaaatgtgggtagagacagtagacattccagawgccacacacatgacaagcctgacagtggttccataattttgtagggaaagacagaatattctagcagggtgacctgagatgacagagcctcacctctcccctattatgggcaaatcagacttagggttcctcaattattcacttctagggaagaaaatatctggaaccaagctatgccaagccatcaccyctaagagggcaaagctctatccttgggttaattatttaatcacctgcaaaccaaacctctccttctctacgccttctcatctccaactagtaatattcagaatggaccaaattctttatattttttaatgtattaacatattaaacagaatatggagcacagatgtctttttgtattaacccgaagaggggcagtgggtatttacactaatgatgacagttgagtagcaaaacccagggaggaatggaggtgagagaagggagagcttctgtgcaggtggaataatatgtgcaaagacacaaagatataaaaagtagtattcatagaactacagagacttgggaatatctggtgctcagggtgtagggtgaaggaccaatgggaacaattggaaaagtgagcaggactcagaccgtgcagggatttgcagaccttgtagtagattttggactttattaggaaaacaacggggagatattgaaagttttttagggaggaggagatctgatcaaatttgtattttgataagatcatcatggctgcaggatgcaggatggattggagaaaattagaatagagttagggaagaccagttaaaggctcctagtctaatccaggtgcaagctagtagtggcatggatcaggtactagacatatgatggaaattaacacagttgagatttcaggaaatagagtggaccagatctgctggttaaacatgggagatgggaggaggtcaaggttgatgccaaagtttggggcttggacagtttcatggatagggatgacatgtctggttacagagaacactggaggagaatcagttcaagagaggtagcatgattgaaccagtttcagttgtacgtaattgggaaatatttggcagtacacctttgagacctggcctgagggtggtatggagccccacacaaatcacatgaactgagagtgagaaaggtgggttcgtagctaaaaaccagagtgcacagcccttcatcacatcagccatgatcacacagctgaggccactgcattttggagttagtaggaaattacggagcctgargacatctgatgtctcctggtgcctgtcggactcaggatggattgtggctaccatttggwccctggtagaaccatggacagcgggttgtacagtctttatccaccatctgccacagtttgacaccaaggtcatcatacaggtaagaagactcaccttcccctatcagcaaaattccagaaaaaaatccatgtttcctggaccttgctaaaaaaatattttattaagcaaagaagcccatgagcctaagatgatcctgagcctgggcttctcaaagtgtgatgcactgagtctgagtcactatacctgagtcacatcaaaatgtgaccttgaagaaaatgtgtattactgggcgatccttcagacctgtagatcagtctttgtagacttgggacccaggatgtgcattttgaaaaattaaagcaagcacaagtccaagtctcccagatcctggaccctgatgctgccagggccaagcagctggggtgtgtgtgtgtgtgtgtgtgtgtgtgtgtgtgtgtgtgtgttttcttactcaatatgataaaatgtttaaaaacagcccttggaatatgacagatctagcttcttatcccacctttgaaattaactagcaggttacataccactctgagcatcagtttccttatctgcaaaataggtcttttaataattactacctcataaagtcttaggtaatattaatgagatgatagaggcgatatgtgtaaagtacttaaccctgacattagcacatagaaaacactctatctgtgggagctgctgctgctattgttatgatgagtacatcatgatgacaattcaagtcacctgcatgaattctttctgtctatgtcccttcaccccaacattttctttatgtctccactcacacccttgctttccctctcagaggcagaccttgccctccacctctcaaaatccacccgctctgcacaaccactgcagagttctgtctcctggccttggataaacagcatttctttattaatctttaatctactatgcattttctcctgtattttcagtctctcacttttcgctagttttacaccctcagtccrtaaacatattcagtgtacttatcctaaaatgccttcctttgaacctgctacacactgggtcaacccatcttttccaccttaataccaaacttcaccaaagaacatcctccatttgctgcagccacctctgcttcacctagcctgctcctgaatactgcagtgctccagtggtctgcccttactgttcttctttctaagcaatttccttcacctccatttttctcagcaagcacatcaatgcaggtggctgtcaggactgtacctagggtctagtcttctcggtccaagctgattctcccaggctagcaaaacatttccaacctgctagttggtaaagcccatctgatcattcctccagaacatcaaactgcacttcccatatctcattacctacctctatatcaatgcctcctcctgtgtcaccatcattattttctgtaccacattctgcacctgagacttaaagcaccacaaacaagactgaccacccttcccatcctcatgcctaattcttccgctgctatagagagtgtcccaaaaggtctttatgtattttaagccttagtaaatgcttaaagtttaaaattctacaaatttaccaaaaaagcatttgcattactatttcccacttactatttttatgaattattcataataatttttaatttagatattktattagtccatcttattgaagactaaaacaaaaagtcttttaaatttttgattcagagggtgcatgtgcagattcgttacatgagtatattgcatgattctgaggtttggagtaagaatattctcatgacccagctagtgcatatagtacccaataagtttttcagcccacgaccccctccctgtctctcccttctcatagtgtctattgttatccccagcatctattgtttccaactttatgtccatgtgtattcaatgtttagttcccacttataagtgagaaaaaaatgatgtttggttttttactcctgcataaatttacttaggataacagcctccagcttcatccatgttgctgccaaagacatgatttcattcttctttatggctgtgtagtattgcatggtgtatatgtagcacattttctttataccagtccaccattgatgggcacctaggtcaatttgatgtctttgctattgtgaatagcactgccaataacatatgagcctctgtgtcttcttggtagaaccatttattttcctttggatatatacccagtaatgggattgctgggtcaaacggtagttctaagtttgttgaggaattttcaaattgctttccacagtggctaaactaatttgcatttctatcaatagtatataagcattccattttttccaaagcctcaccagcatttgtttttgaccttttaataatcaccattctgataggtgtgagatggtatctcactgtggttttaatttgcatttctctgattaatgacattgagcattttttcatatgtttkttggatgcttgcatgtcttcttttgagaagtgtctgtttatgtactttgcccattttttaattggattatttgggttttacttgttgatttgtgttctttgtagattctgatattagttctaattagacatcacatataagagtctacaaataacttaaattctttgtagaatctggatatttgattctggatgttgtcagatgcatagtttgaaaatattttctcccactctgtaagctgtttactctcttgataatttcttttgctgtgctgaagctctttagtttaattgggtcccacttgttaatttttggttttgatgcaattggttttggggacttagccataaattctttgccatagctaatatccagaagagtatttcctagattttcttctaggatatttacagtgtaatgttttatatttaaatccttactccatcttgagttaatttttgtatatggcgaaaggtaggagcccaggtttattctgctacatatggctagccagttttcccagcaccatttatggaataggaagtcctttcyccattgcttatttttgttcactttgttgaagaccatatggctatagctgtgacttctctattgtgtttcactggtgtatttgtctgtttttgtaccagtaccatgctgttttggttactgtagccttatgacatagtttgaagttgggcaacgtgatgcctctagctttgttcttttcagtattcaagccctttttggtactatatgagttttaaagtcgttttttctgattctgtgaaaaatgacattggtattttaataggcatagcattgaatctataaattgctttaggcaatatggtcatgttaacaatattgattcttccaatatatgagcatggaatctttttccatttatttgtgtcatctctgatttctttcagcagtgttttgtagttttctttgtagccatctttcacctccttggttagatgtattcttaggtatttcatttttagtggtagttgtaaatcagattgtgttcttgatttgactgtcagctagaacattgttggtgtatggaaatgctaatttttgtacactgattttatatcctggaactttactgaagttgtttatccgttccaggaaccctttggtagagtttttagggttttttaatgtatataatcatatattgtcagcaaaaagagatagtttgactttttttctatttgaatatcttttatttctttctcttgcttgattgctttgggtaggacttccaattctatgttgaataggagtggtgagagtgggcatcctacactttttccaattcgcatgggaaatggttccagcttttgcctggtcagtgtgatgctggctgtgggcttgtcatagatggctattatttagaggtatgttctttcaatgcctcatttcttgaggggctttatcatgaagagagattggattttttgaaagctttttctgcacctactaagaggatcatatggcttttcttttttattctgtttaagaggtgaatcctrtttattgatctgcatatgttgacccaaccttgcatcccaggaataaagcctacttgatcatggtgaattaactttttgatgtgctgcaggactcagtttactagtattttgttgagaatttttgcatctacgtttatcagggatattggcctggagttttcttttgtcattgtatctctgccatattttggtgccaaaagyattctggcttcatagaatggttagaaaggagtcccttctccttaatcttttggattagttacagagggattggtaccagttctttgtatatctgttagaattcagctgtgattctatcttgtccagggctttttgggattagtaattactgattcaatttcagaacttgtaatttgtctgttcaggttttcactttctttctggttcaatgttgagaggctgtgtgttcccaagaatttatccatttcctgtagattttctaattcaggtgcatcagtgtgttcataatagtctctgagaatcttttatatttctgtgggaccatttatagtgtcatctatgtcatttccgattgggcttattttgatcttctcatttttttctttgttaatctagctagcagtctatcaatattgtttattcttttgaaaaacaagctctcagtttcattgatattttgtataaacttttgcatcttaatttcattcagttctttaattttaattatttattttcttctgatagctttggtgtttgttggttgttcttttttttcctagttcctctagaagtgatattagattcttaattagcgatctttctaacttcttaatgaaggcatttagtgctataaactttcctctaacattgcttcaggtgcatctcaacgattttggtagatggtatctctattttcattttcattaatttcagaaacttttttgacttcttgttcacccaagagttattcaggagaaaattgtttaatttccatgtttttatatggttttcagtgatcttgttgacattgatttctgtttttcttgcactgtggtctaacaatgtactttggtaagattttgattttttgaatttattgagacttgctttatgactgaacctgtggtcaattttagaatatgttccacgtgggaacaagaagaatgtatattctgtggttgttaggtaaattattctgtggatgtctattaggtccaattggtcaaatgttgagtttaagtccataatttctttgttagttttctgtctcaatcatgtgtctaacattttcagtgtgttgttgaagtcccccactattttkgttkggcaaaatctttttataggtcaagaagaactcaycttataaatctaggtgttccaacatttggtgtgcatatattcaggacggttaagtcttcttgtcgaactgaaccatttatcattatataatgccctcctttgtccttcctaatcattgctggtttaaagtctgtttttatctgatataagaataaggactcctgctcttttctgtttttcatttgtgtggcagatatttctccatttctttgcttagagcctgtgggyatcattacttgtgagatgggtctcatgaagacagaagacagttgggtattttctttgtatccatcttcccactctgccttttaaagggggcatttagaccaaaaataaataaataaataaataaataaataaataaataaatwctattcaatttagtaaaacaaaacattccttctatttcctctctacccacccctgtcaacttagtccttgccaaatctgttgcaagagtctgctgatctccgttccacacccctactgaaagctgcaaagcaccaggagtagtcatagattacaacttacatgataatagccagagcccacatttgatgaacacctactaagtgccaatttctgggaaaggccttagacacctatgatgtctaattcttacctactaagcagagctcccttggctgccagtaacagaagcctacttcaacgtagcttagtggaaaaagaaatacacggaagggggaactagaatagctcattattctgtaggagaagagcaatatgagcttgataaagatctaaaacagaaagtagaaagataccagcaattaaggcagcttcagtgtctcctstgcttttctctatagatgtgcttccttgtttctgtttgtagaaacacttttgctacttcacatgcacatagtcaaacatagcaatcacagcatttcagggcgacattcccccttcccagataaccagtccaggtcaactagaggctgagtgagtggtccagaatgttggggtgatcagacccaacacaaggccgtggaggctacaaagtccggcggagtcaaaggaatcagaaaagacaagttaagagtgcataaggtgggtccaggggaccaacactggtatggaggctgtgaagaccccaagctctgggagcccacactatttattggtgatcaaacaaagaagcaggtggtgaggacatgcggatgtgggggtaaagaggtgaggatgggaggacatgggggtagaaaagtagcagtgcatcaagcataactgtgacggtttagcattttctttgatgcatatgtaatatgctctgctacctgagataatggagaacatatttatgagcctgggagagtagccaacaagtstgtgcacattccagaggccacaaggggttttatgccctgggcttagattatggtgcggcagggcagccttccaccctttggcacagagattggtgtcccaaaggccacaagggggtttaggccctggacccaggacatgttccaagactcttttacatcatgacagagaagccagtcctgcctcagctcttctaccaacacagcctaaggcaattgtctgtcaccaagtcagcaatccaactcactgtgcctggggtgaggttactgacacagacattgctggagtgggcctgagactttcacagacatgtaaagacacctgttggggtaggggcagtgggccaggggtgagagtaggacaaaaattttaaaagcrtatataaatgtgagatattaaagagatagaggctagagattgaaagctgattgggtctttatgaagggagggactggaagtagagctagatttgtccacaaatgacaattatatttcatcatgattctaaatggaatatatggacgttcccattttacagataaggaaattgaattacagacaaattaagtaacaggatttaaattaagatacccaaacccactttctcttctctttactgttcttcactctcttagtgtatctccaccctgatctgaaactcggaaagaaaacacatccagccaattaatcatgagtaccaaacattttagagtctaaataacctggctccaacttaccttatcttcctaaatttaattcttgctcctctctagtgggtctaaataaatcatattatttgacttgactgaaatgtttctttagctcctgagaccctatttcttgttatttcatctatctccaagagactcccactctccctgcctgtagacaccatatctatttgctaatgtcctgactaaataccacctcttccatcaagcccctgggacacacaactagaaagagtatttccctctcctgtgttcctacagaacttttgtacttcaagtatttcttatgacatctacccacttctgccttatcattcgagtcctgttttatcctattagtggctactcaccataggagttggaacgttatctgcgtttttgtatttccccaacagtacctgatgcataccatgtatgaaatccatgctcagtatgtgtgtatttaaaggattaagaaattaacaaatgggctcttctagtgggaaggtcagaactagactgctaataattggctgttagtttaaccttaactgtaaaaataaaatttcttctctcttccctttccagacattgttgaaataccccattaaccacttttggggggtatcatctatatatcgaatgattctgcagcaggatttcaccaggtatggtagaagtggcttgtaacaacatctttgggtaagattttaaggaatctgatacatcatggtctgtttttcttctggttctttgaggagtgtgtgtgtgtttgtgtgttaagtgttggtggcgatgatgatcaaaagttaattagttaaagcaaatccagagatccaaaggaaactcagtgagccttgcatgattgtgggttgattcctttttaaacatttcagttgtaaaataacaattgtacagaaaatgcataagacagaaatttacagattaataaattattgaaattaaaatatctgtgtaacccactcaccaagtcaaaaaaacataacattgccagtacctcagagacttccatctcccttaaaggaaacaactatcttgacctttatgttgttaattccttacttgcctttataatttacctcctaaggaactatccctaaccaaaattttattttacatgtgttcgaattttaarcaggtaatgctacattattatataataattgtgtttctaagatgtgtccctgttgttgcatattgctgtagtttatcttaattgtgtgcagcatcctattttatgaaaataccacaatttcttataccagtcctaccattaatggacatttctgtagttttcgctttgaggctattgatgtttaatgctacatagaatcctaggacatgcaccctggtgtgtacaagcatgcatttctgtagagtttttcaaggagaggaattgcgggtcacactgatacaacacaataccayactatcttccaaaccaatttatgcttctttatataagcagggcaggagaatttccattgttccatgttcctgccaacatttggtattgtcagacttattaatttttgccaggctggtgggtgtgtggtgttatcttaatacaactttatttttgcatctycctatgtttgagaattaattttaagctaaaccaaaacacactctttgaaacttatggatatttatgtatcttttagggactctgaaattgaaatggctagttcaaaaatcagagctaatatgttttagacataaaagttaaaatatcagagtttaatgattgcccttacagagctaactctgaattataatttgattttactcatgaagcttcagtctggctgtattctgtttccatctgtatttcaaagctcatatgacagccaagttttggaacattcctcacatgatggccttggtccaaacttggcacacatcttatcatggcataactaatgattccatctgagactctgcccactttatgtactttggtttagcttcaaaagaatgaggaagagatcctcagtgaacacaaccctcctatcctcactcttgaccctgtctgtatcaggagagggtagtgaggtggaaaagtggtctagatggtgccactttcctcatcaccaagagctggctgggctgagcctcatgctagatgcatccagctggctttcaaacttccatcacttttctccattttcttcagggaatctaattattattttgtgattgtttttgtattctttrggaaaatttcatgggaaaaagggacaagagactttatatcacatgctgtacataggaaactactactgttgatgaaaaaagtgaaactctggaaaatatttttagagatttattctgagctaaatatgagtgaccatgacccatgacacagccctcaggaggtcctgagaacatgtgcccaaggtggtcaggatgcatcttggttttatatattttagggaggcgtgagacatcaatcaaatacatttaagaaacacattggtttggttcagaaaggcaggacaaygcaaagcggggtctttcaggttataggtaaatttaaacattttgtcattgatgattagtttatctgaagacctgggatcaaaggaaatgttcaggttaagagaaaggattgtggaaaccaagttttattgtgcagaggaaactctcagatagcagacttcagagagaaaggttgtaaaatgtgtcttatcggacttaaaaggggtgcctggttcttagttgattatctcctggatatggaaaggaaggaaggaaaatgaaggggaaagtggattctctatagaatgtggacttttcccacaagagactttgcagggcaatttcaagatatggcggagaaacatgttttggggtacaatattttgattttcttccttgtctcgtaatgttatgccagagtcagattggaaagttaagtcacaatatacagggttaaataaaacccatctgatgagaatttatggtttgtaaggtatgactccccaggcaccttagataggaatttgggcaagattgtaaaaatcagagctyagtcctcagtccccgctcttggccaaaaagcattccatagaatgcacatgtaggccaacaaacagcagcaggtcccatggcactaggaagactcattcctagagttgtctgatttggccatctggcagggtcccacagtgctaggaaagcttgttcctagagtcctctgatttgatggtaatagttttaaacactagcgttttggataatggggggaagacctggagtttaaggggtgagatggagtcaggcttagggtttagtcttttacaaaaaaatcccagatcagatctatgttctgagttatcatgatctgagtctttaattgtgcctttcccttttgctgtatctggcataacatttacaagaaaatgtctatcataaagatagtgaagatttgggtatccaaggttataggtggcatcagagagcagaaagaatatttcagccagaataaacactgcatacatcatcatattctttgatcagactcmcaatgtggttaccttacttattaagggttatttcaaccctctgataaatcttatttggaaattacgggaccaacattaaattggaatttaataaatttaatctcttttccggccaatttgtctccataggtatagcatcctgaggagggtgtaaattaaatgcaagaaacacctgttcctcaatatctaaattcttatagccttgttaatatagacgaatctattcttcccaccacttttgtattgcaccatatactggtatttgggagagaaaaggttttgtcacaggagaagtcataattctgcaccgtcattttttccttggcaggactgcccatggctgaagaccttaaaagtcaaaagacttatagccaattaattgttctaggccagataggaatggatgtggacaggcattgattacttctagaaatgattttaagtcaaaaaaaaagaacaaccccatcaaaaagtgggtgaaggatatgaacagacacttctcaagagaagacatttatgcagccaacagacacatgaaaaaatgctcatcatcactggccatcagagaactgcaaatcaaaaccacaatgarataccatctcacaccagttagaatggcgatcattaaaaagtcaggaaacaacaggtgctagagaggatgtggagaaataggaacacttttacactgttggtgggactgtaaattagttcaaccattttggaagacagtgtgatgattcctcaaggatctagaactagaaataccatttgacccagcaatcccattactggttatatacccaaaggattgtaaatcatgctgctataaagacacatgcacatgtatstttattgtggcactattcacaatagcaaagacttggaaccaacccaaatgtccaaaaatgatagactggattatgaaaatgtggcacatatacaccatggaatactatgcagccacaaaaaatgatgagttcatgacgtttgcagggacatagatgaggctggaaaccatcattctcagcaaactatcacaaggacaaaaaaccaaacactgcatgttctccctcataggtgggagttgaacaatgagaacacatggacacaggaaagggaacatcacacatcagagcctgttgtggggtggcgggaggggggagggataacattaggmgatatacctaatgctaaatgatgagttaatgggtgcagcacaccatcgtggcacatgtatccatatgtaacaaacctgcacgttgtgcacatgtaccctaaaacttaaggtataataaaaaaaaaaacattgggcacagtggcttatgcctgtaatcccagcactttgggaggccgaggtgggtggatcacctgaggtcaggagtttgagaccagcctggccaacatkgtgaaaccctgtctctattaaaagtataaaagttagctgggcgtggtcgtgggcacctgtaatcccagctactcaggaggctgaggcaggaaaattgcttgaacacaggaggcagaggttgcagtgagctgagatcgcactgctgcactccagcctgggtgacaagagagagactctgtgtgaaaaaaacaaaaaacaaaaaacaaaaccaaaaaaacaaacccaaaaaaacaaacccaacaatagaaccaaaaggcaaagttacaagactggcttctttttaacttttatgtgttgagttactgtaagcttagtttctgttacatacttacagcaattagctactcaaaatataagcattgttctgaaaaataatttaaaatatgtatatatgtatagacatatttatcttcacaacttataactggcagtattatacccaggakggtttgttacaaggtactttatcctattagtaaatatatatattttttaattttataggaagcagaaaatgtttgtggttgggatgtatgcaaaagtgacacataatagtttagaagacaactaaacttgttttaccagctgtttaggcattttttttttttttgtaacctcttcttgatttggagggtttggtcttgttctaattttatccctcaaagctggcccttacaatcttacatgcccacctcttccgtgatagttcctgggcccagagggagcaacttgtatagttttggcagcagagcatttgcagtgaaacagatccaggcccagcgggatgtcaaatgagtttcatatggtcttcagagtaccatcatattggcttccttgaagtaaacaaggaaagataaataacattcatagtttgacagttaggagagttactatccttcattataaagcaactcttaaatgtttcttaaccaaaaagaaatttacattttttgagaattgayatctttgtgtttataaaatgttaacaaatgctgcatattttgtgcttctattattttaactttttagtcacccaaatttccactcggtggggtggggtgcaaaacccgagggttaaatcatgactttaagatttttaaattactggagaattttgagattaaatttaccaaattaaatttttaccacagattatcaaggttatgtaaattaaaagggcatctgagctagtttttgccaatctgacaggcacttaacattttttaaagttagttgattagaactctttcatgtagtttggaagtgaaatatcacttccacatgacacatataaatatagagatataacaggcatgcagaataaaagacatgctcaaaagttacttcacttgcctgttttcaaaaacaatttttctcccttactttatataactagtaaaagttacaggagccaacaaaaggtgaaggaaagagccgtccttcaaagccttttcaacagagaaagagtagcacttttaagatatcaacctgaagaatgttaaagaaacaattaaaaatttaaaaacttcttgcattaaaaataagtcagccaggcacagtgactcatgcctgtaatactgacattttgggaggctgaggtgtgcggatcacaaggtcaggagttcgagaccagcctggccaatatgatgaaactccatgtctactaaaaatagaaaaattagccaggggtggtggtgcctacctatagtcccagttactcaggaggctgaggcaggagaattgcttgaacccaggagctggaggttgcagtgagctgagatcatgccactgcactccagcctgggtgacagagtgagactccatctcaaaaacaaaacaaaacaaaataaaataataagacaatatttgtaataaaatcttgctttaaccaattagttttgtactactgcatttttaaaaatattaaagacccatctctagaaagattatcatgatttatttttagttatagacaactaaattacacaactcctttaaaaatttattttattaatgttattatgacttacatagttcattcacaagcrttcagactgttttatcttaaatatccctctttctttttttattttattttattttattttttattatactttaagttctagggtacatgtgcacaacgtacaggtttgttacatatgtatacatgtgccatgttgctgtgctgcacccattaactcgtcatctacattaggtatatctcctaatgtgctccctcccccctccccccaccccacaacaggccctggtgtgtgatgttccctttcctgtgtccatgtattctcattgttcaattcccacctatgagggagaacatgcagtgtttggttttttgtccttgtgatagtttgctgagaatgatggtttccagcttcatccacgtccctagaaaggacatgaactcatcattttttatggctgcatagtattccatggtgtatatgtgccacattttcttaatccagtctatcatttttggacatttgggttggttccaagtctttgctattgtgaatagtgccacaataaacatacgtgtgcatgtgtctttatagcagcatgatttataatcctttgggtatatacccagtaatgggattgctgggtcaaatggtatttctagttctagatccttgaggaattgccacactgtcttccacaatgattgaactaatttacagtcccaccaacagtgtaaaagtgttcctatttctccacatcctctctagcacctgtttcctgactttttaatgatcgccattctaactggtgtgagatggtatctcattgtggttttgatttgcagttctctgatggccagtgatgatgagcattttttcatgtgtctgttggctgcataaatgtcttcttttgagaaatgtctgttcatatccttcgcccactttttgatggggttttttgttgttttcttgtaaatttgtttgagttgtttgwagattctggatattagccctttgtcagatgagtagatggcaaaaattttctcccattctgtaggttaactgttcactctgatggtagtttctttttttgtgcagaagctctttagtttaaatagatcccatttgtcgattttggtttttgttgccattgcttttggtgttttagacatgaagtccttgcccatgcctgtgtcctgaatggtattgcctaggttttcttctagggtttttatggttttaggtctaacatttcagtctttaatccatcttcaattaacttttgtataaggggaarggatccagtttcagctttctacatatggctagccagttatcccagagccatttattaaacagggaatcctttccccatttcttgtttttgtcagatttgtcaaagatcagatggttgtagatgtttggtattatttctgagggctgtatkctgttccattggtctatatgtctgttttggtaacagtaccatgctgttttggttactgtagccttgtggtatcgtttgaagtcaggtagcgcgatgcctccacctttgttgttttggcttaggattgccttgacaatgcaggctcttttttggttccatatgaactttaaagtagtttttyccaattctgtgaagaaagtcattggtagcttgatggggatggcattgaatctataaattaccttgggcagtatggccattttcaygatattgattcttcctactcatgagcatggaatgttcttccatttgtttgtgtcctcttttattttgttgagcagtggtttatagttctccttgaagaggtccttcacatcccttgtaagttggattcctaggtattttattctctttgaagcaattgtgaatgggagttcactcatgatttggctctctgtttgtctattattggtgtataagaatgcttgtgatttttgcacattgattttgtatcctgagattttgctgaagttgcttatcagcttaaggagattttgggctgagacgatggggttttttaaatatacaatcatgtcatctgcaaacagggtcaatttgacttcctcttttcctaattgaatagccttcatttctttctcctgcctgattgccctggccagaacttccaacactatgttgaataggagtggtaagagagggcatccctgtcttgtgccagttttcaaagggaatgcttccagtttttgcccattcagtatgatatttgctgtgggtttgtcataaatagctcttattattttgagatatgtcccatcaatacctaatttattgagagtttttaacatgaggggctgttgaattttgtcaaaggccttttctgcatctattgagataatcatgtggtttttatatttgtttctgtttatatgctggattttgtttatagatttgcatatgttgaaccagccttgcatcccagggatgaagcccacctgatcatggtggataagctttttgatgtgttgctggattcagtttgccagtattttcttcagcatttttacatcgatgttcatcagggatattggtctaaaattctcttttttggttgtgtctctgccaggctttggtatcaggatgatgttggcctcataaaaagagttagggaggattccctctttttctattgattggaatagtttcagaaggaatggtaccagctcctccttgtacctctggcagaattcggctgtgaatctatctggtcctgggccttttttggttggtargctattatttattgcctcaatttcagagcctgttattggtctattcagggattcaacttcttcctgrtttagtcttgggagggtgtttgtgtccaggagtttatccatttcttctagattttctagtttatttgtgtagaggtgtttatagtattctctgacggtagtttgtatttctgtggkatcagcggtgatatcccctttatcatttttttaaatatccctctttcttgtgtaatcccatcatttttattttaggacaaaaatttaccatacaagattctttcttatataaaatatcttttctttaagactttttaaatttttttgtcaaaaatacctctttatttttataactttctttatattgctcttatttcctggtttcccttgtttcatatataacccttaaataaggttttaattagacaaagatattttaccttaataagaatgttaaaaaatttcttaaattggaaattacccagaaacttaatatcaaataataaccttaaatcctaaattatgacaagtgtgtttacaagcatttattccattacatgtacctgattaatttagtagtttacctaggttatttgcaaaaaattgatagccaatattttaagttatttttctattaacgatttttatagctgtgaatttgaggtgtttacttaagtaataaaacttatggttagttttaaggatatttataccaataattcagtatttagctgttttcatttaagccaacaatatttcataagcatatacaatcaaagatcactctgtcttgggctggattttatagtttataacacttatggcaaattttatagtattctgtgggaataaacatgaaaccatttgatcaatagatgcaaaaaaaattctaacaattctaaagacattgctgatattattttaccaataattttaaagctggctagatmcttactaaaataaaatcttatttagtaaagattttacttaagtcacatgaacttgaaaaagcatttgactagttttttttgtttagtatctgatttaagcactttttaaagccaattaattagagctcttcatatgtgtgtttgtgtgtatatatatagtattttattttattttatttatttgtttttttgagacagtcttgctcagtcaggcaggctagagtggcacaatctcagctcactgcaacctccgtctcccgggcttaagcagttctcctgcctcagcctctggagtagctgggattgcaggcatgtgccaccatgcccagctaatttttgtacttttagtagagatggggattcacygtgttgaccaagctggtcttgaagtcctgacctcaggtaatgtgcccacctcggcctcctgaagtgctgggattgcaggcatgagccactgggcccagcctcttcatatatttttagtcatgaaaatattgtatacacacacataaatatatacatgtattaggcatgctggtagaagcacatcacatagactcataaagatctttttgtttttgccatttaaaaaaatcttaccctaggcagttgtcagctaaatcgtcttaaatttgcatattaaaggcaactcaggtgaaatcagatagcaaaatttacatcataaggtatgaagagaaagtctggtatgctagagggaaattaattcaactgccaattgaacataaaattatagaaggctttaaataggcacacacatgcacacacacacaaaaagttcccatagctattacttcagtactttagccatgggataaatacaactttgccagcttgcaaaaagcggttagatccaaatggtggtttttatctcagtagaaaagtaacagcagctttaaagcaggcagacaagaaaatagaagctatgtactctatagtctgcaggtcgaccttaggaatcttcttccttaatgtaaatgtgcacaaagaccatattacttccattttatataaactctggcaagtggaggtgccataaaacctacagagtgcccaaaagagggtcattctcattctccttgtttactccttattcttagattttgtttcctgctttttttttttttcttaagaggaggaactgagctgtagcctagggcttttgtgtggtggatcagtgcatgctgcttgtgggcaggactccaccgtgtatcactacagagtccttcccrcctcctaggtgtctgggtttctctctccagaggtctatgacctctgagagggctcaaaatgctgggtaatcagccyttatatgcacttcctggatgagcaattttaaattaatttttgttgggratttccctgtagggccgctgcacgttgtggggggtcaagctcccagacactcccacgagtcccctgatcacccaggggcacctttttgactaggagaagcaaatgacctttctctttggagcagaaaaactcagtctctcatttatctrtgaaaacgacacttcagttcctcatgcaaatgcactgagatgaaccaaatcaagataaattttagcagaaaatgcaggagagaattccatttagaatgcatctcggaactagaataaggatcctgaaacaacaactacctaggagaaaaccaactcagaataaatcaaggactgtcaaccaaagggaagtctggggttcaggaggacttaccagttccaccagaggagaagctcaaaagaataggcttcagtgggccctgctggtaccttagctccaagtttgggcaactccttcaaggtcctgagtcttctctgaggccccacgtgtttgggcaccaaactattgttgacaaagagtgaatctctgtaaaatatgtttaaagatttattctgagctaaatatgagcgaccatggcctgtgacacagccctcaggaggtcctgagaacatacgcccaaggtggtcaggatgcagcttggttttgtatatttgagggaggcatgagacatcaatcaaatacatttaagaaatacattggtttggttcagaaaggcaggacaactcaaagtgggggcttccgggctataggtaaatttaaacattttctcattgacaattggttaagtttatctgaagacctgggatcaaaggaaawgttcaggttaagataaaggtttgtggagaccaagttttattgtgcagaggaatctgtcagataccagacatcagagagagagagagagaacaggttgtaaaatgcttcttactggatttaaaagagtgcctggctcttagtttattatctcctggatctggaaaggaaagaaggaaaacaaatgggaaaggggattctctatagaatgtggacttttcccacaagggactttgcagggcagtttcaagatatggcagagaaatatgttcaggggtaaaatattttgattttcttccttgtctcataatggtatgccagagtcagattggaaagtaagtcatgatataaagggttaaataaaacccatctgatgagaatttatggtttgtagggcatgactcccyagaccctttaggtaggaatttgggcaagattaaaataaaataaaataaawcagagctttgtcctcactaccaacattctgtgagggccataggctcttggacccctaaaggttcactataaaatcactgacatgagccagattgattaacaggagagaaagattgcaaatttatttaacatgtatacatgggagccttcagaatgaaaccccaacttctcraggatttacagaaattttcatactacaaaccaatactgagataagtctcaatcaatttagaggttattttgccaaggttaaagacatgcctgtgacacagcctcagcagatcttgagaacatgtgcccaaggtgattggtctacagcttggttttatatttttagggaaacataagacatcaattaatacacgtaaggtgtatattggtttggtccagaaaggtggaacaactcaaagcagaggcttccaggtcatagaaggattttctgattggcagttggttgagtttatctaaagacctggaatcaataaaagagagggttaggataaaggattgtagaaataaaagtttttattatgcagatgaagcttccaggtgcaggcttcagagataataaattatcttaaggtctctgttttaatgttaatgctggttagttttgcctgaattccaaaggaaggagggtataatgaggtacatccaaccacccatttccatcatggcctgacctcttgtcttaggataactttggaatgcaattgactgagaggaggggtccattctgttggctggggctgcttaaaatttcatttttggtttacattaccatcctgaggctacagtaaagaatgcagactgagagcatggccagaaacaggttatgttggtaaatcaggttgagtggcaagaaaggttaagagagagagaaaagaagaatattarctagcaaagctggccttgttaggtacatgaagactccttcagagagaatagatggtaaatgtttcttttcagacttttaaagttgtcagattctcagtctctcctggatatgagaaaggcatagaaatgttggggttatcaggcccaacaccaggtggtgggggtaatgaagtccggcagagtcaaaggattgagaaaaagacaatttgagaagtaaagtgggagsagggggccatcgcgactgtggaggctgcaaagttcctgagctctgggagcccatgctatttattggtaatccaacaaaggaacaggtggtgagaatgaggaggtcaaaagggcaggtgcatgatgaacagctgtgatagtttagcatttataaggaacgtgttctgctacttgtgataatgggaatacaatggatctaggagactaggaaggctagaagcaaggagccagaaagtctagacacattccagaggacattatgtcagacatgcaagccctgcctcagttttcttcccaatattcagctttttcccaacatgccccctttctcttttttgtaaaagagaaatgtcattattactatcattattactagatatcgtaattagtagcataaaagttggcctcttttaattgagaaggcaattgcaggctgtgaaggcttgaattgccagttggtcatccagcttcatttttcttagcccttattcaaactggagtcactctggtttgaatgcttcccacatatctcccctttcccttttacaagaggacccttaatcctaggggttacagaaggatgaaggtctatcttctgtaacttcatgctgaatagaggtgatgatattcctgcctaactattagggtctcttgtattcaggtagaaaagagctgagtcaggacgcattggtccattaagcatgcatgactctagtcggtcttcattccttctttgcattcaggttcagctggctcatggctcatactgggcgaacccggtccaaggttttaatccaagtgtccctccagtctcccattccatggtcatgcacatcttgagggcatccacatggttcatttatctcctgcaaaaacacaagcataccctcacctccatgttagtaaatctactgaaacagaagcaaaaacttttgtgtctgtagccaggaggccactgataatgagaaacaggcaccttctaacagaaggcagagggaaaggaaattgaggcttttcaaaccttcagtttgggtccactatatgctgtggctcatgatagatcttcagatgtttggtgggcacccacataggcacctgattgtcacctggagagacacaagcaaatgctcttccccataaaattatctttaggcaggaattggaggaagtatattcagaggtaaggagaattttggggcctaatggcttcctgatgtttgataggtgttccctcagaagttaggaattccctttctctccatattgctgtgtgggcatggaggactaggtaagcatasttagagtctgtatatatatttaccctttttccttctcctaattctagtgtataatggcccctgcttttgctaggatgtctctccctaacaaaggagtggggctttcaggcataattagaaagacatgtgaaaagagtaaagttccccagtcacaacttagtggctgggagaagtatctagtgactgtctgttcttggaccccttggatagtgacagatctggaggacagttgtctgggacaggagggtaagactgagaaggccgtgccagtgtccaggagacagttaaccccctggycctcaatggtcaagcatacctagggagggtgatggcatgggctggcatttgccctgggcaccctcagtcctgctgctggatcatctggttagtggcttctgactcagatgaccttcgtcccctcgggcagtgggccttccagtcattcccttgacataaggggcatggayaagggggtggcttatttctattcagacaatctttttaaaagtgtccttgtagactgcactggaagcaggccctattaggcatttgatttgcccagccttttcctttttcagagcctccaaagttcacttgcctgaaggctgtgactaaagtggtgtttttttttcatttttaatcctgtttgttccattccacctgctactcctgatctctattataaaaaactgaggttgccaagttcaatagggtttctaagttttgctccaggcctaaggcagacttttgaagtttttctaatgtctgcagctgactgagtgataaacttatcctttaagattagttagccttcagtagagtcaggtgacagagaggtatgcttcctcaatgcctccctttgtcyctccagaagagcagtaggattttcttcctttccttgtattatagtggacatcattgaataattcatagccttcttcctagttttccttagtccttccagcatgcaagttagcaaatgtctgcagcaccaatctccatgttctgattctgcgtcccaatgagggtctacactgggaactgcctgctggcctgtggggaattgttctctttcctctgttgtcatcctatcattgacctgactgagataccagagatcaccaaactctcaggctgcagtaatggcggcacttctctcatttggagttagtgtctgatttagcagtaatattatatctatccatgtgagatcaaataattgtcccaaccctcgtaaaacatcaatgtagccatcagggttatctgakaatttagctaggtctattttaatttgtttcaagtctgagagggaaaaaggtacatacactctgactggcctgaattctccagaatacatcttaggggtgtttttgccttggggggaacgtttcccatctgaaaaaagaacatagggatgacagcacccctagtcattttctgatgagtattagtcctagagcatcctctatagtcctaatacttcttcctttccagggtgcataaccacccatggacctctgcttatcagattagttatgctcaccaatgtagcagtcctgcacctgttttcccacctttcttgaccacaaagaaaggggtatgggctgctggattctagtggtcctttaccagcttacccaacattgcctttgcactcagaggtgagttctagagctgggctaggttcctgagtatttcataacaacccagcttccccatcaagatgcactcccataaacaactgttcttatgcaaattcatttcagagaggatgtaggcaatgttttgagtcaggattgagatagagtaatttatttatttatattttgaagataaccacttttccaaagggaacttcctttatgtctatggactagacataaggaaggccacaagactagaagttaggataatacatgttacaccgttaacttttagcaaattttacttttgtttaaacccttgtaagtttgggatttccattatcttttgctgtctataagaccttgtttagtctaaactaacttagaattggtatagatggttccttcctggctttgtactttaaggcttggctgagtacaaacagctcacatgtttgagcagaccaattattaggcaatttttctaactctgcttctacaagagtttccctatcaattactgaatacccattatgtgtgtgtgtgtgtgtgtgtgtgtgtgtgtgtgtgtkcctcaatcacatgggaggagccatctattgtcctgtcttgaatggagttcctcctaggtcttgtcggtcctctgtatgtaattaagatttaaatcccttgttaagaaatctgctgggttaagggaattttcagtggttaatgttaaatcaccttttcctcacagaatggccccatactttaagatttttaagttagtaagctacgcttttgcttttctcttccttagggtagctctgaactggtgaggtgtgctcacaattaggtttcttctaagttatttttctactttcttctgctagcgaagcagttgctgctacagattgaatgcatttgggccatctgtgggttacttggttaggatttttgatagaaaggctgctggctgtcagtggtcttgagagttgaagccaactgggcttctgggtcaggtggggacttggagaacttttgkgtctagctaaaggattgtaaatgcaccaattagtgctctgggtctagctaaaggactgtaaatgcaccaatcagcactctgtaaaaaaacaccaatcagcactctgtgtctagctaaaagattgtcaaagcaccaatcagcactctgtaaaaatgcaccaatcagtgctctgtgtctagataaaggactgtaaattcaccaatcagcactttgtaaaaacacaccaatcagcgctctgtgtctagataaaggattgtaaatgcaccagtcagcactctgtaaaaatgcaccaatcagcactttctgtctagctaaaggattgtaaatgcaccaatcagcactctgtaaaatggagcaatcagcagcatgtgggcagggccaaataagggaataaaagctggccaccagagccagcagtggcaacctgcttgggtccccttccctgctgtggaagctttgggctttcactcttcacaataaatcttacagctgctcactctttgggtctgcactacctttatgagctgtaacactcaccacgagggtctgcagcttcattcctgaagtcagtgagaccatgaacccactgggaggaacaaactctggacacaccacttttaagagctgtaacacccactgcaagggtccacggcttcattcttgaagtcagcgagaccaagaacccactggaaggaataaattccagacacagtttggcaaccacaaagggactatcacstatcgccaagtggtgagcaccatcggacccatttcacttgctattccttcctatttttccttagaattcggggctaaataccaggcacctgccagcgagttaaaagcaactagggcggctgccagactaaagacatgggtgtcaggctttctggaaaagggctctctaacaacccccaactcttcagagttgggaacattggtttgcctggaaccagcttccacttttcctgtacttctgggctgagccaagggtcaacagagaggaaagccattagctccagggtttgacaacaagttggttgaccctggggccatgagcagaactctcaaagtgaagtgctttcagattacgcccttgtttacactgacaacaaggcagtattgagtgttatagggtcatggagaataccttcaattatcaattataggttttaaatttaccctggttttaaaggaatagggcacactgctttttctttaactacttgtatatctctttctttctcctttgtaggtggattttggaaacacagtggaaggatttttacttgttgcccccatttgccactataggaatatgtgcctccctttaacttactcaattcattttcatcttgatctattacgttgtcatagacccagttccagttgttaaagtactgggttatcagttctaaggccctggccaaggagtcaaggcttggagattgtattgcacgggggataagctgggtagaaattggggaggagagcatcttaaaaggaaatgtggtccaattagctatattctgtcctccctgctggattatagttatgggaaattgccatgcttcaaggtctcccttggctctagccttctgaataraattttgtataccaccaycaattgctccaggttttaaagttgcaactacaggagcagtaagttttgtagctaattcatcttctcacccattaagaggagagagaggatgtggctcttcacttaattcagcacgtggggctgatgggttagtaaaacatgcttttttcagtttccctttcttttctttaatttcctccctttcctgttcctcacattcaaaatctgaggttagttttttacacttgtcctcctcttcctcatctaaatctgcctcatcatctgtttaaaatggctcaagagttgcttttattagtgcccacgttgaccaaaccaagactttaatttttgctccatctttatatactttttaaaaatctctgtcaatttctctcccattcatccaactccatagtcccttgttccagaaaccatgggcaaaagtgcttcactgcactaaagagtgataacaaattctgagtactaactttcactcccactcttcgtaatacatgtcttaggatatttaaataagcagaatgtctgctttcactttgtcccattgttaccctgattcttccgagcactccactttcccaccgagcttcttttacacgttcttgggtgtcccttgatgatgtgtcctctgctttcacatgatctagagttccttcaccagggtcttcatcaccccacattgggcacccaggaatgttgggctgatcaggcccaacaccaggttgtgggggcaatgaagtctggcagagccaaaggattgagaaaaagacagtttgagaagtaaagtgggaccagggggccatcaagactgtggaggctgtgaaggccccgagccctgggagcccatgctatttattggtaatccaacaaagaaacaggtggtgagaatgaggaggtcaaaagatcaggtgcatgatgaacacctgtgatggtatagcatttataaggagyatgttctgctactttagataatgggaatacaatcaatctaggagcctaggaaggctagaagcaaggagccagcaagtctagacacattccagaggacattacaccagacgtgcaagccctgcctcagctttcttcccaacactcagctttttccctacaaaaagagggcagggcatggctgcattaatagatattctctatagatgtacacttccccccataaaagatggctttgcaaggccacctctattagctagccaaatggcagccatttcaaaatatgtcaaagaaatatattttggggtaaaatattttattttttcctgttcacatcagccttttctgttttctctgaaattccttctgtcagggctgtaccctgtaatgcttctccctctctctttccctactcagcttaatctgctctgatgtcctgagcaattcacttccaatccctaacatgcattccccattcagaaatacaaaagccctttagttagcgtagtgtaagctccataaaagaatgtatagttctattatcaccctagcatgtccttaagatctcatcctttaccccattatgattataaaaatgtccttcttagctatacagaatgcttccccaagaggagttctgataaacacacagttctccctcttgttacactgatatccaaatttaatccaaacattcccaattgaacacaatagcctcaccaccacccatccaccgtctgccagaatagttcgcagggactggcaggaagtgagtgacatccacttggccatggccaactgtaaaatgaccaaaargtaaataagaaagtgaggaactagaaggatgaatgatctgggtgacagacttaagagctctgaatgcacagagccagggtggctcaccaatgcctggcaccttgtcttcctctaagcatcaggttccctgccctggagcactgctatactggcggggaggtcgtgttgcccaaggatcaggaggagtggaaaagacggacgggccttctgctctacgagaactatgggcagtcggaaacggtaggtggtgcaaaccagaaagtgtctgagacaggtctcaattaatttaaaagattattttgctaaggttaatgacacgcatctgggaaacaggtttgtgcctttccccaaagatgattttgagggcttcaatatttaaaggagaaaaggcagatattggggaaaaaggaagaaattttctaaaggtggggtagttacgaggcaaattgttgccttcttgtgagtctttgatcagctgtttacatgtgagagaagggtagaggaagagtcacttgtgcattcatctagatcagtgaatctgcatttttacataagataaacgtaagtcagagaaagcaactaggtacatatttgtctcaggtgagcagagagatgatttttgagttctgttctttgtcctatacstgtgaagatgagctataaatgtcagggtgaaatttagcagaactgtttgacagtaacgatcttggggcccacaaggaatttcttagtgggaaaattgtggcggaggcatgtagttttgttttgttttttatctttttagctcttgtttaggaataaaatgagaggcaggtttgactgatgcagttcccaacttgagttttccctttggcttagtgattttggggtttgttttcctttcakagtggaaaggtcccttctggatagtcatgatgtgctcagcgattgagcccagcagatgtgctgaattatgccacatgtgcgggacacagccccatcgcatgcacagcattgtttgatgccaaccagaggctctagagttctaggctaatttgtcccaaatctatctgcagaaagaaaatgtacaactcgtcatcttaccaagggactaatgtgcttaaaactcttggacaaaaccttaaaaaggggtctaagggcgttttcacactgtccctgttatcatcagctcagaggatccccagagggtgggtgggataggagactctctccagcaacatggagaccacctcctccaggaagtcctgtcaactccactaaccctccctagggctgcagaggcaggaggaagctggctcaaaaagtgcattgcttggggtttaggaggacaactcgcaggtttgactgtgggatactagcagggtgggtgaggagcagggactttctgtatatgccaaacacatgtacacacaaacagtgtcattccagagtatcactgagctgccaggtgagtggggcatttggagtactatgcatgtctggaagttcaaggacctcatcaattacagtgtgggtgagcatctcttccaacatatttgcaatccatttccaatgctggacagagccactttctccctctgtctccattatccctctagcacawaaaggatgactgctatcccaggccctgtgcaaaattattactttagtgccaactcacatactcagctgacattattttgtaaaaaatatatagcaattcagttaatttgtctgcttccagacctgaawaatgctgacacttcgggcctatgtttgaatggctcacaggtcatatttggacaaggaggagggtgggccaggaagacacactccacccacgactccaatatttgcagcactaggtggtgcttaatttctgaaaacactttcacatctgttcactcatgtgtgcaacgtttttcacatgcctacagtgtgagcagtgatgtggcagtgggcaaagatcttcctatcccaggagcacagacctgggtcyaagtctcagctctgccaattacagcttgaagaccataaggatattatgtatgctttctcacctcagctcccccacctttaaatggaaattataatgccaatcttaacagattgtgataaggtaaataaaaagaagtatataatgctctggctggtgtcccrcctgttgtatatgctcaccttgcagctgctgtggtccttgctatttttggtggctattgttccagattttggaagctcagggataaatagggcagtctctattcttgggatgctcattatctactgaaggaaacagacaaacaaaaataattataatgccctgtgggctgcaatggaagtataggagaaatgctgcagaaagagaatctttcccttgacttctcttgtagcttgagtaatagccagtagtcatcattcattgaacacgtggtgtgtgccttgtattatgcagaattttccatatgcttacaagcactctgggaggtaagtgttatcattattaccctttgatggaggagatcaagagggattcattggcatgcatttagtgtgtggtggagtcaagggtcaaaccctcattggtctgaatgtaaagcacgcagctacagaaataaatatatttgtgagaacaataaaggaggaatcaagttcatcaggaagaaagatgaagatagggcagtgctaacagagagaacagcacaagcaatccagacaacctccacacacactggggcatcctgcagggtgagattcacaggcctcttcctacggatcactgatgacaaaggcaacattctgccacccaacacagggggaaaagttggcatcaggatcagtcaagaagttgtggcagaatccctatcactgctcaacagccccaagtaaatgtttgttagatagactagtggtcttcccctagcaaactgacacatgcctgttcaatggtgggcatgccacaccccacattatatgcccacagccaggggaataccctgtttcttctttctttgtttccccattggattctgtagactccacttagtacagagccagaccacactggctgcagaaaatgactgtggaatagagttgggtcaacaccttgagcctagactaaggccttccagcttccctacgagggctctttgggcagcatccattgagaggaatactacatctctgagcagaggatgctgtgtatgattctgactgctttgtgatcagcctggcctctctgatcaacccaaatcttctttcttttgtgaacagggactaatttgtgccacctactggggaatgaagatcaagccgggtttcatggggaaggccactccaccctaygacgtccaggtctggtcctaagggcattggcagggagcagttagggctcagcgggggttggacaatttgacaccaggtgacaacaccagccgcacttccctgctccagtcatccttcctyctytcttytcatttatcccttcagtttcatatggaggcctcagttgaaaactgcattattgtgagcatgaacaccgctgaccctggcagccagggcatcacacacagtaggtaggaaagaatacctagaggctgcactgggagccctctctagcaagtggtgcttttcattttttttgatcactgttttccaacttgaagacacattggtgacatctactaactcatgaaacatagacccttggcttgagtttcacatttgcgtattttaaaggcttttgacagttttattccattttctgatgtttcctctgttatttcatccacactggtgtcccatgcataaaccagacagtgcttgggtggggcagaagggctgcggcctcctgcagtgtatgattcacaggcctcttgctacaggtcattgatgacaagggcagcatcctgccacctaacacagaaggaaacattggcatcagaatcaaacctgtcaggcctgtgagcctmttcatgtgctatgaggtaatgaccccccatctgcccccatcctggccccaaggatcccaacagggagctctgcatcctgaggcttcttcaagtcctcttttatttgctctaactcaatgaaatgaatgagttttcattcaactcgaagctcaccrtgcattctcccatcctttcctgtctgaacccacmtggaacttttgggatgttggggtagaatgaagactggcttcagaaccatcagacttgggtttcaatgatctactgtagtcaagaatataggctttgactggattcaaataataccatctcacttaccaacaacagagtgtaaacaaatcacttatcctcgctgagcctccagggaactctattatcccattttacagagagaaaagctgcagattaaaagccctgcacatcttctgcacatcraataaatggtaggtttaggattaaaaaaaagtaaaaaccagagattatagaaaactgagatggattacaaggaaacctgctgaaactcctgatcaaataagcaatggccctcccaggataggaatggccacaaagaggaaaatcttagctcccaatattggccatggaaggatgaccagaccctgaaattgatttcagacttcatctcctttctctaaagacactttcattggcggctgtcctggtgtcactgccatcctcacactgtggtttcaagggagcgatggttcctttgtgatacttttgaccaaaggggaacatacaggccttacttagcattaattctcagcaacacaacttaaagattggataaaagaaaattaggcagggtggggtggctcacacttgtaatcccagcactttgggaagcctaggtgggtggatcacgaggtcaggagttcgaaaccagcctggttgacacagtgaaaccccatctccactaaaaatacaaaagattagctgggcatggtggcatgcacctgtaatttcagctacttgggaagctgaggcaggagaatcacttaaacccgggaggcggaggttgcagtgaaccaagatcgcaccactgcactccagcctgtgtgacagagctagacaccatctcaaaatgaaagaaagaaagaaagaaagaaagaaagaaagaaagaaagaaagaaagaaaaaaaaaaagaaaaattaaacrtggggtaacacatatatyttatataatgtccaggcatctttgaggaccacagatatatatctgcatattacaatcatttcagragattttttaaaatagtagtacttggatgcaaccagagattctgattgagctgaaatggggataatccaaagaaatatatttaaagaaaaaaacaaggtcttgctctgtcaccgagctggagtgcaggagcgtgattaaagttcactgtatcctggacctcctgagctcaagtgatattcccaactcagcctcccaaggagctgggaccacgggcaggtaccaccatgcccagctaattttttgattttttgtagagataaggtytcactatgttgcscagactactttcaaactcctgggcacaagtaacccccctgcctcagcctcccaaagtgctgtgattacagatgtgagctattgcacccagctaatttttttttgattgagcatgacatattttattttccaaagaactcctaacatatacccacacctacgtatccatgaaatgtcagtattcctccattgggacttctttgggtttttttccctccttattyatgtaaaagaattacagaattaccatgagacccagcaattctacttctaaggctacttactaccaagaagtggcagcaggaacttgaacagatactttattttttactttatattttatttatataaaatgtaacataaaattactcttttcaccatttttgagtgtacaattcagtagtatcaaataaagtaacartgttgtacagccatcacgattacccatcttcagaaaatgtttaccatcccaaacagaaattctactaataagcaacatctcactgccccagtctccagcacatgataatctctaatctgctttttaaaatctatgaatttgcctattttaggttcctcatataagtgaaartatacaacatttgcccttttgcgtttggcttatttcacttagcataacgttttcaaggttcatctatgtcttagcatgtaacaaaatgtcattcctctgtaagtctgaataaaattccactgtatgtatacaayacattttgtgtactcagttgtctcttaatggacattttggttatttccacattttgcttattgagaatgttgcttctatgaccactgttgtttaagtatctgttcaagttcctgcttccatttcttgggagtatagacctagatgtggaattgctgggttccatggtaattctrtgttgaactttttgaaataaattaccaaaccactttcacaatggctgcaccattttatatacccaccagaatatttttgatccattttgagttaacttttgtatgtgttgtaaggtaacttcattattttgcaattgggcrttgaagtttcccagcactatttgttgacgactgacctttctccatggaatggttttggcacctatacttaaatcaattgacaatatatgggagagtttcttccaggactctctattctattgcaatgatctgtctgtctttatgccaataccacactgtttctattactgtagttttgtagtaagttttgaggtcaggaagtgtgagttttccaactttattctcctttttcaaaaatttttatttccttttatttttgaggccagattgcaagactggctaatttttgtatttttagtagagacagggtttctccatattgcccaggtttgttttgaactcctggcctccagcgatccacctgccttaggcttcccaaagtgctgggattatggatgtgagctaccgcgcctggcctttattcacctttttaaagattgttttggcagtttggggtcctttgagattctayatgcattttaggataggtatttctagttctgcaacaacaacamaaaaaccattgggattttgacaggaattgtgttgcmtctgtagatagctttgggcagtattgtcatcttaatattaagtctccaataaatgagtatcatatgtcttttcatttacttatctcttctttaatttctgtagtaacgttttgtagttttcagtgtacaagtcttttgcctccctgattaaatttattatgagtactactgtcttgtattctttttgatgctattgtaaatagaattgctttcttaatttcctctttggatttttaatttttagtgcacagaagtgcaattgagtttttgtgtgtgtatggattctgttttttacaagtttactgaatttatgtattagctttaacattttttttgagtgtgtaaaattcttcgggttttctatatatggtcatgccatctgcatgcagagataattttacttcatctttccaattcagatgcctcttatttttctttcttgcctgattgatttggctagagcttccgggactatgtagaatagaagtggtgaaagcaggcatccttgtgtttttggtcttaggagaaaatctttccaactttcaccattgagaataatattagctgttggttttttatatgtggcctcatcatgttgaggaagtttcctagtttatttagtgtttttaccatgaaagggtattgagttttgtcaagtgctttctctgcctcaactgagagaaaaccttgtggttattttcttttcatcctattaatgtggtttattatatttgttgacttttgtatgttgaaacaggaataaatcccacttggtcatgatgtataattcttttaaagtgtttctggatttggtttgctagtgttttgctgagatttttgcatcaatattcataagagttattggtctgtagttttcttctcttgcagtgtttgtctggctttggtgtcagggtaatgctggcctcatagattgacttataaaatttttccttttctttaattttgtaaaaagagttggaaaaggattggtcttaattcttctttaaatatttgtcagaactcatcagtgaagccatctggcctaggccttttctcttttggaaggtgttgataactaattttacctccttatgagttacagatctattcagagttctatttctttgtgactcctgtttttggtagattgtgtgtttccagtagtttttccattttatctaggtaatcaaaccttttagcatacaattgttcatagtattctcttataattcttttcatttctgtaaaatgttagtaatttaaattttcacttttttattaatcaatctagctgaagacttgtcatctcttcaaaagaaataacttttgattaagttttctttgttgtttttctatttgccattttatttatatgaactctaatctttatttcctgcttctgctatgcttgggtttagtttgctcttcttattctggttccctaaagtgtaaggttttcggcttgagatcttttttaacgtatgtgctaaagactgaatgtttgtgtgtcccccagattcatatgttgaaatcctaacccccaatgcaatatttggagatgattatatcgtgagcatggggtcctcatgaatggtgttagtgcccttttaatttttttattttagtagttttgggggtacaggtggttgttggctacatggataagttctttagtggtgatttctgaaattttagtgcatccatcacctgaacagtgtggtcttttaacccttaccccctgccaactttgccctctagtccccaaagtccattatatcattctttgcctttgtgccttcatagcttagctcccacttagaagtgagaacatacgctatttggttttccatttctgagttacttcacttagaataatggcctccagctccttccaagttgccacgaaagacatgatttcacwgctttttatggcttaatagcatcccatggtgtatatataccacattttctgtatccactcrttggttgatgggcactttggttggttccatatctttgcaattgcaaattgtgctataaacacgcatgtgcatatgtctttttcatataatgacttctttttatttgggtagatacgcagtagtgggattgctggatcgaatggtagttctacttttagttcttgaaggaatctctatactgttttccatagcagctgtactaatttacattcccaccagcagtgtaaaagtgttcccacaaccatgccaaaatctattgttttctgatttttttaacaatgacaatttttgcaggagtaaggtaatatctcattgtggttttaatttgcatttccttgatgattagtgatattagtgccctttaaaaagcaactccagtagggttctccagaagagtcccattctccatgtgaggccccatcaagaagacagccatctatgaagcctcaccagacaccaaatttgttggtgacttgatcttgcattcccagyctccagagctctaagagataatatctattgtttataacccacccagtttatggcattttgttacagcagcctgaatgggctaagacagtatgtgtgtaaattacctttttrgcactgtgtttgctrcaatctataagttttaatatgctgtgttttttatttcatttgtctcaagataatttctaaatttcctcgtgacttcttctttgattcattggttagttaagagtatgttgtttaattttgcaaagattgggaaaatttgtgattttttaaaagttttccttctgttaattcctttcatgtgacttgataagatgctttgtataatttctgtcttttaaagttaattaatacttctcttctggcctaatatatggtccatccttgagaatgttccatgtgcacttgagaaaaatgtgtgttcttctgccgttggatggagtttcctgtatatgtctgctagatccagttaatttgtggtggtgttcgagtcctccattttcttattgatcttctctctggtttttctactcgttattgaaagtggtatattaaattctccaactattgctgtagaactgtacagttcttccttaaattctgacaatgtttgcttcatgtattttggggctctgaggtttattgcttatatgtttatgattattatatcttcttggtgaattgacccttctattaatagacaatatcattttttatcttttgcaattatttttaacttaaactttattttgaccgggcatcgtggctcacgcctgtaatcccagcagtttgggaggcygaggcaggtggatcacttgaggtcaggagtttgagaccagcctgataaacatggagaaaccccatctctactaaaaataaaaaagattagccgggcacggtggtatgcgcctgtaatcccagctactggaggcggaggttgtggtgagctgagatcgtgccattgcactccagcctgggcaacaagagcgaaactctgactcaaaaaaaaaaaaaacaagttttttctgtcggatattagtataacaacccacaacccaagctctcttttggttacaattcacagggaatatatttttatccatcctttaactttcaacatatttgtgtctttttttttttttttttgagttggagtctccctctgtttccaggctgcagtgcagtggtgcgatttcagctcactgcaatatctgacttcctggttcaagtgattctcttgcctcagcctccccagtagctgggattacaggcacacaccaccacacccagctaatttttgtatttttagcagagacggggtttcaccatgttggccaggatggtctccatctcctgacctcatgatccacccgcctcagcctccaaaaatgctgggattacagttgtgagccaccacgcccagtggaattcgtgtctttaaatctaaaatgaatctcttgtagatagtgtatatttggatcgtgttttattatccacttagccaattccttcctttggattggaaagcttactccacctacatttaaagtaattactgataaggaaggacttctaccattttgctatttgtcttctgtgtggcttaatattttctggccctcatttcctttataactgccttcttttacgtttagtttcctttttgtagtgacacattttttcccttctgattttcttttgtttatattctacagatattttctttatgattactatattacatacaacatcctaaggttgtaacaatctaatttgaattaatacctacttaacttcaattgtataaaaaaaaactgtactcctgtatggttccatcttccatttatgttgttgatgtcatcttgtacctctcaactcagtccataaaggcactcacattgatctaatatcatgagtggaaaacagtattacttgccataaacagaaggcatttataaccataactataggcttaaaaaaaacaattttctcatagtctccctaaatcctattctcattggaagctctgatcctgaagcatgtcttcctcttgagacttccagagagttcaaagcatatcagcactaaactaagaatcaacttgatatactcagaacaatcagaagtgaatccaaaaagggatgtaatttgatgtttttaaaatgtttttttcgggtagctcttaaaaccatttcatgttccacaagagctattgcttaggggtcaagtgaatcggtcatgaagcaagaattaaattcaaatatcaaccctctcagtgagcagctgagtgactytgagcaagcaaatgtgcctccctcaagcytaggtttttttcttatttaaaatgggckacaaaaaaagtgccaacttcacacaaaaacatgtatgcaaatgtacatagcagctttactctaaatagtcaaaacctgaagacaacaatccagatggctttcaacaggtaaatggttaaacaaaaactcagctacatccataacatggaatactgttcagcaacaaaaaggatcaaaccgtttgtgcatgcaacttggatgaatctctgggggattatgctgagaaaaaaaaaaacagtcccaaacagttatatgctgtatgattctatttatataacattcttgaaacagcaaaattataaaaatagagaacaaattagttgttagcaaggggtcagggaaggtgagaggagaggaagaggaaatgagagggaggtgggtgtggttataaaagagcaccatcagagatcttcctgatgaggtggggaatgcacaaacctacatatgtgataaaactgcatacaactaaatacacasacacacaagtgaaatgggacatctgaagactggtggattgtatcaaggtcagtattctgcctaagatactgatcatatggttttgcaagatggtaccactgtggaaaactagtgaagagtacagggcatcgatccacattattttttataactacatgccatccacatttgtcttaaaatgaaaagttaacttaaaaacatactagactcataggctttctgtgaggatgaaatgagatagtatttagggaagaaaattccctcagcaaatgtttattgacccctctcatctgtccaggctctatgtgaatgctgagcttatagcagtaagcaaggttcacaccataatggaaatttcattctagtgtagtgtcacacaaaatgaatatatatatatatatatatatatatatatatatatatatatatatrtatatatgtatgtatacatacagagagagagagagagagagagatgaagtctcactctgttgcccaagctggattgcagtggcgcgatcttggctcactgcaacctccacctcccaggttcaagcgattctcctgcctcagcctccccagtagctgggattacaggcatgcaccaccatgcccagctaatttttgtatttttagtagagatggggtttcactatgttgggcaggctggccttgaactcctgacctcatgatccacccacctcagcctcccaaagtgttgggattacaggcgtgagccaccgcacgtggcagaattgatatttttaaacattgtcattgaaattggtttaatcacaaccactcatagagcagtcgcatgcatcatgcgctacatgtaatgaaaatagactcagaaatggcaaaacttgcccaggtaccgagtagaaacagaggcagaattcaaacccagattggaacccaaggttgtggctcatcacctctaaattcactgccttcaacaaaggagctctcttctttttgcagggtgacccagagaagacagctaaagtggaatgtggggacttctacaacactggggacagaggwaagatggatgaagagggctacatttgtttcctggggaggagtgatgacatcattaatgcctctgggtaggtgtggctgatgctgggctggctgttgttgccgtcacatgcctcayggaattttgcttacctagacattttttcacgcattggtgaaatttcagcctaaatctgaatagarccgtgtctatggtgccctgattccaggcttcagtatacctcccgaaccttctctgcacgcagaagaatcaagcaaaatgaaattcaagagggtctggaagaggagccataataagacactgtgcaatttacagtggggtggggggagtggaattgagaagggagactctgtcttggtctccataggttcagggagcctatttcatgtttgtgcccctctaatgcagcaccaaatgtcacaggacaaacatagtaataataatagctaayctttagctattgtttatttttattattatgaatatatttgttatacatctatgagcataataaatctattattataaaattatttattagtataaatatattatttactgtaactatttagctaacctggagtacttactatgtgaaaacactgtccttaatgctttatataacccacctctcaaagctggatgggagatgtgattattatccctattttactaacgaggaaagtgggtcactgaccggcaaggaaatttgcctaaagattcaaagatagcacaggatgcaatccagatttgaactgaggtagtctggctctgagtccctgtccctacccctacatgatttttaaaaaggcgcattacactacagtaacaatttcccttggatattttagagaaattgatggcatttttatttttttattttattttttattttattttattttattttatttttctgagacagagtctcccactgtcacccaggctggagtgcagtggcctgatcttggytcactgcaagctctgcttcctggcttcaagtgagcatgtccagctaatttttatacttttagtagagatggggtttcaccatcttggccagcctggtcttgaactcctgacctccattgatccccctgtttcagcctcccacagtgctaaaattacaggtgtgagccaccatgcccagcctggatgggattttattttaaatttctaaaacatgatgtactggaaatttgcacaaagagtagattttatgttcttaccacaaaagaaaaaaaaggcaattatgtgagacgatggatatgctagtgtgcttgagtgttttaatcgcgttactatgtatatgtacatcaaaacatcatgttgtaagccttaagtatatataataaaagccgaaaatcctgctgatacaatgggaaatagtatgcagaatttgcatgaatgtttaagaccaagtttgaggcttccaagagatttcgtgttgggggaagctgcttgggccaagctctgaggagacaaaacattagccgtcctccatcagtacaggcagtgaggcaagaagccgggagcaccgcagtcttgtatttctcagcctataatgtccaggtctttacactttgggcccatgacacagacaagtcaggggtccctggcttcctatgacctccaccctctgtgccaaaggaagctgtgactccaaagcaggagatctggggacttggttcaccccagccctggcatctgcctcagaaccyttcatcctccaggtatcrcatcgggcctgcagaggttgaaagygctttggtggagcacccagcggtggcggagtcagccgtggtgggcagcccagacccgattcgaggggaggtgaggagaacacagagatcatcatgtctgtgcgtgggcactaggaaagcaggtgcaggggaaacatccaggctttacctgtgcagccttggtggaagggcatagtgtgcatgtgcgtttacacggtatggcaccaggggacagtgtggactctctgtggctctgaataaaaggatgctagatactatgtaatgagcacttatatatgccaaatcacttaactctcacacaatgtagtaatctaagaacacttatgctttttatagatgaggaaagagaagcaggaggaggttaagtaacctctccacatcacccagctagagtaaggggtggaggcagaatggcatctcagcaatgtggctcccgaacatacatgcatttgtatattgaaaagtgttattaggccgggcacggtggctcatgcctgtaattccaaygttttgggaggctgaggtggaccgatcacctgaggtcaggagttcaagaccaggctggccaacatggtgaaaccccacctctactaaaaatacaaaaaaaattagccaggtgtggtgggggcaggtgggtggaatggggggtgggcgcctgtagtcccagctacttgagaggctgaggcaggagaatcgcttgaacctgggaggctgaggttgcagtgagccaagatcacaccactgcacgccagtctgggcgacaagaatgaaactccatctgaaaaaaaaaagtctttattaatcaccttctatatgtgagaccttgtgcaataaaacttggataacattgctaatctaaaaataataaattgccagtaattatggaatgcccattgggtttctggcactgaattacatatataataacagtaaaaatgatgatgaaaatattgatgacgggagtaataataaaagtaaactagctggatgttttatatgtattatctcatggaagctttaaagaaaccaaatgaagaatggaagctttattgtccccatttcacagaaaagaaaactgaggttaaggagaggtcaaataacttttcaaggcatggagtgggaattggaaacacagggatttacacctggtcctctccttttccaaaacactgtagggttcagtgtcaccttgttttaccactcattcaataaacattgactttttaagctatggagtaggttggcactcactgtgagcccatgacttcattmtgcaggtggtgaaggcctttattgtcctgaccccacagttcctgtcccatgacaaggatcagctgaccaaggaactgcagcagcatgtcaagtcagtgacagccccatacaagtacccaaggaargtgagtgagggcagatggaagggatctggtggccctgaagcgttccctgctaggacgggctaggtatcactggaggtaacaaacagccccaaacaatggaggtttacaacactgaaggctctttttctgctcatgcctcatgtcctccatggctctccttggccctgccckccacatctcctcattctgccaccagaataaaggagcagcctccatatgggacctgtcagctgctctaagagatgaaggagagggtggtcagtctcaatggctcccaactcttttgcctcaaggttacatsyttcacttccactcacatctcctgggtcaaagcaaatcccatgggtacatccaccttctaggggccagggggagaacctgaaatacttggggactccattaaggccaccatatggtgtcagcctgcatgggagactgtggaggggcagaggaggagagtggagaattgttaggaaatggcagcaggactcaatcactgtggatttgctttatcctcaaccaggtggagtttgtctcagagctgccaaaaaccatcactggcaagattgaacggaaggaacttcggaaaaaggagactggtcagatgtaatcggcagtgaactcagaacgcactgcacacctraggcaaatccctggccactttagtctccccactatggtgaggacgagggtggggcattgagagtgttgatttgggaaagtatcaggagtgccatgattccaatgttttccttcttttaaattaaattcagttgctctgcttcctccaagtcctctgtatctttagaatttcccaggtgagcactcataacgcaagtaataaaatactgatatcaacaataccctgtgttgagcatttattcagggaattaacctatgttaaatgccctccctctgtaattctccctaatctctaacctgagataacttgggaccagattctccctcctggcaccagcatctcagggtagacctaagcacccttcaatagccaggacacaggggtacaggagggatgccccatgtggctccaggcacctgcccatggtctggatgaggccccagcaaggccagggcaggacggatgtccagggtggtcagccttggtttggggactacatttgcctgccagaccacctctgccaccccacccaatgggcttccacccagtggtcttccactcaatgatcttccgcccaatgggcttctgcctttgtgtcccccaataatgcccatgtgcacatgcatcccaacctatggtgtgtgtgagtgagagccccaacctctagggacccaggactcctgcagccctgccatgggcctaggagccctgcctccagctttcccctgtaggaccctacatatcagatcttccaagtgacccaggaactctgtcccccagcccttgccagaggaccccactcattcaccctcccagggcctagggtccctgtagtccagaattccttgaccacagacaattttccttctttgaatgtaaccctgtccaggcatctggagccctcctcacatccttggcctggaattctgtaacctgacccttttctccatccctccttggggcctaagagggaactaccagggggccaacrgaggctcagaagagcaggggcagaaagggcctagcctgggaatgagaggagcacatattgtccccttctcacccacagagggccctctgtgactgccaatttcttaggtgtacaaacccaggaactcacaggtaaataaayagacaccacaagcacagagacacaaaggcacagaaccgccccagcttcacctgggcactcagcagtttggcccacagacaggcttacacacacacacacacacacacacacacacacaccaggagaccacagatacacaaggccatgagacacagccccacagggcagaccccacacacaatggacactcgtgcatcacacacacacacacacacacacacacagagtcacagacctacaggcagggaaacagacagagaacacagacattaagagaaacataaacaaatagagacacaatcagggatgcccaaaggagaggcgaattcacacacacacaacacacacatacacacacacaccaaacaacacacacagatacagaacacaggcatacacagacactctcacaggggcatacatgcccagagacacattacacagtcacaaacacacatatttgtacaacaaacacacactcattcaggaagaaagacacacaaatgcatacaaagatagagaaaaacagagctatccagagacagctacacggtgacatactcacagatactcagacgcacaggtgcatacgtgcagattaacacatccagacatgcacacagtcccagaccccagcccacaggacaaccacacggcgatggcactccacagggcactcctaaggcagtggagagaacagacccaggcatgacctggccctcctgagctctcttggaaggggatatgttccaggttccaaacccagggctgggtgtgtgccccttccagggccttcagaagggctgttcctgggccctgagatgccagagaggccagggttggtgactgtggggacaggggcacagggttgagcctgggaccctgtgtgggtatgtttagacagggcggtgttgcatggcgcttagcagatctagaagtcaagagagaaagagaggtgtgccccccaggaccctaccctgggccagagtgggctggcacccagaaatcagaaggtctgcgaaggttccagagaggacttgtccttgggttgggggtgggggttcaggtggggggaggggaccttggaagaacacgagcttcttgtggattgtccactgtgaggcaccaagtaccgggctggggatttgtgaagagggagtataaagcctcaggatttgctaaggcagcttccagacaggagaaggtttggcggaaaccagagtcctgctcctgagcctcccactcccctgccccaagtgtcctgctgcttcactgatagctgatcgcctttctctctaacctgtagctgaatctcccaccggtgcttgaggacttagtttgaaccagatcctttcccagagccccttgtcttcctcctgctctgggtgcccaacagccctcccttcccttccctccttttccctgccctccccctccctcctcaactgcaatcccacccccatccctatccccttccttcccccagtcctaagccactcccacctctgtcctggccacctcagggtgccctgagaggaccaggacatacctgcgtggtggctgctgttttggctcctcctgcaggggttttctagccatcaacccacccatgtaagtagatgctggacccatggggtttcttcctttttgttgggtagtgtcaggcggcataaaactacacagcctgtactcctcacacactgtgggggccgaggtgggcagatcgcttgtgtccaggagttcaagaccagcctaagcatcatagcaaaaccccgtctctatgaaagattaaaaaaaaaaaaagttggtctagcctggtggggcatgcctgtagtcccaggctgaggtgggcagatcgcttggacccaggaggtggaggctgcagtgagccaagattgtgccactgcactccagcctgggtgacagagtgagaccttgtctcaaacaaaacaaaacaaaaaagtgaaatgtcatttgagttttgtgtcatctggtttgatgatttgtttagaaactttggagtcatccatgtgttctcctcttgggagctgcctccagggcgtctatgtccaatcggtgtgaaggtagcctgagaagccaatcagatgggagaggaaagggttgcatcctgctgggatgtttgcaatgcgggagtcactaggagtgacatgaccaggatgtgaatgagaactctactgacctttgttttgtaaaatgtgtcttgtgtagatcattgatttacccaaagcagaaagagtcttaaagtcctatgagtgtccaaacataaagaaatgacaggtttttactttgaaagtttccaccctcacattataagcctcaccactaccctcaggagagggcaccttatagagatgagagtatttgttctgaccggcatgcaccagattcttagagagggatctggaaaagtctagtgatggggagcaaccactgcatcaaggcagaatcacctcgcatgagtacctccaaccaaagaagaatttgttgtttcttttgaggttatgaagaaggaaatgtcttgataatctttgttggaatttttttctccttacctggctgcattttcatagatcagttaaactctctttccctacctcacctttgaagacttggataagttttcctcattgcattttccaccttcacccttgctcatggccgtcgactgtcagaacctaagctttccttgcccctttggacctaatctaggtaggagcccactactgataagctgcatccagatagttgtcagatgtgacaagagtgcccaagatgggggwtgttttcctggtcaatgaaaagatggcctttgtccttctcgtgcatttgatccacatctttaaccattgtgcccagagctcctggtccctttcagacagaggctactcagaaacagtgtgtccttcccaggagcccaggccgcactcacctccactgtgaggctgaagatgaaagtgctgcagagctcagaggctgctttttagagatgttttgtttgcacaaaagtgagtcttggtatgtcagttggtctgaattacatttcgtattcattttctcccccagtactcataaatctagtgtttgtaaaataatatgtgtgccttttgtggcagtggctatacatcccagaaagtttttattgctttccatatggatttccaaggttgctactgattgctttctttatgtgcaatgctctaaaatatgaaggggaactcttgttattggtgtcttggtattgtgtttttaactaacttcaattctctcggtttgaattataattccaggaagactatgttatgcaaatctttatggactttgaaaatctgacatgaagtgcagctgtttcagcagcaaagtgaacattaattttcaaaagttaatgtttttataaacttgggctaaacaacagtctgtgtttattttgttgaaatataacccaggtattattattacagcagctgtcctctctcagttttgtgtatatataaacatgtctttatgtaatattttcatctataaccgtaagcctttttttcttatatttttcccattcttccatacagtgtggacatatttttggacatattacaaatagtgtaatgcaaatttataaatatttaaaaaaagatcttggcttcctgaccattgtgagtttgtatttttaatctccattttaatttgaattacagatttctaggtaaagttttgtaattattttaaaaaatatttgcaatgtttttgttacataagggaaagtgaatcctgagtagagcagggaaagaataagatgctctgctccggatcgggaaggagcagggggtgaaatgttacaaattctagaacttagagaactgaagataattacttccttttcaaattgttaaacattttaacctgtggtaaaatattcataataaaacatttataacatgaccattgccgtcttaacaatgttgaagtgtacagttcaggtgtgaggtattctcatgtcatttttcagttatttcctagatgtcttttcccaagtctatctcaaagtcatgaaatgtaaatgatggatccacagatctgcagcagagagcttggaggtccaacaagcatagccaggaagttatgctgtctgttggagtccccatagtatggaaatgagtttgccctggaaaggagaacagtttcttgccttcaggtcaatgacaagagttccagtcctgagtcatggaaacatgctgtagtgaactgcagggttaaggacatcatgtcctggaaggatctctcaaaggctaattgtctgggttctggcatcagcctgtaaatgagaatcaggtcttcctatgggaggagtcagatgaagagtgatcccctgctccatcttgatggagttagttgtgatgagttggtgagatctgattttccacagtgaactaaaatgagctttcagtgtgtcaagcacaagactgaccccagaagtacacatagcacatctcatagaagcttctaatggtccttatttacttaagaataggactatggagacacaaagacgagctggaaattacaggtgacttgctaacaggccagagtgttgtttttttttttaaattctttctgtctgtcaatgggaggtgtcaattcttcctccccagtgttgaatatcagttgtttcatgtatgggaaggcagtgggggacctttgaatcatggccttcagatgccagaatggcagaaagaatcccacatgggcaagtggatcatgtgtgtgcatttctctccgttttcatctcaggaagctgagaatgaaagaatgtgagtgagcagaaaaagagaggcagctgtcagaggtggaggaaaaagggaaattggttatggaaaaaattcacacctacaagtgagttcagaaactgaacaccagccacatgggaaacttccattggagtattttgtttttaacttttgtacaatgtttagacccagttaacacagaaatacaaacaaatggtcagaagacatatttagagaaagagagaattcacacaagagaaaacaaaataccttaagatttatcag

SEQ ID NO: 94182 - DNA, 25977 bp, Homo sapiens
  misc_feature (1)...(25977): n = A,T,C or G
agtcatcacagctttgggcattaacatatatgaatattgatagttctcagggcaagaaaacacacagaacatgcatctctatggaggccactctattcacctggatgcttataatgtaatctgtagtttgagtttccagggctctttccagattataattcaatcttcacttttctgtgtctaaatttttacattgctttctgaatcatcttttttcccattttattcttaacaggctaaaggaaggcttaatagagtagccctaatgaataggatctgggtttataatcgggcttttgtgatttgaatcaaagaaatgcaaaaacttagtgtttatcagagtgtgctgcacttattcctggagttatgcaagatcattttagatggcacacaaactaaaaaccacttatagaatggctgtttatttattttgctgtgtattagggaaaaaacccttactatcaagtccatggtttaatggatattacctgtgacaacgattgctggcagtctgttaaaatctgtcccaccttccttggtacacagccagattacattttccagccttcattgcaattagattgaacacgtgaataagttctcaccaatgtcctctgagtgggagtggagagtgccacagccaggcctggcccatacaaatgctccatggtcacacttctgctcctgcctcttccaggtgacaggcaattgacacctatggcaactttagaaaccatgagtgaaggaaggcaaagccaccatagcctagatcaggactgagtaaactacagcctgagggccaaatctggcctactgtctttttaaaaataaagttttattgaagcacagtcatgcccattggcgtaggtattgtttatgggccgccttactaccacagcagtcgccacagacagcccatggcctgcaaagtccaaagtccttactctctggccctttatagagaaagtttgctgatatcctaattttgatctctgaatgaccatatggacaacagccaccttgttgacctgaacaacgttctagtcctttacctatgcgaaaaataagccgttgaaattctgggcctatttgctaccatagtttaccctactctcactaataattcttgctcagcagtcacagggtgattgactgatgaatgtacatggcccgatttccggttgtttgcgccattgagggtgactagttatgcccatgggagtacagctctctcctctaagacccaccaccaggccaaaatttcttccagatgctctgaccagttagtcctaggacctgattgaccccaggtagtctgaccccctaaatataacatagcatcatgggcctgggaaggtgtaaacataatacaatttctgcccattgaactgaatgttaacaggaagacattccctgaagcagaagaaaatgaccttggtgatgatgacccttgccaaaggtaggtgacccttgccaaaggtagttaacccttgccttgtcacctacctggtggtcctgatggtgatcagttctttcatgtaactaactggccttcaatggttcacttttcccattgagtgacttttttcaattatatgcttttgtaaattagaagtgtttttactggcatttctttatgcacgtttttatttttaccatcrttttaatttaaaaaatgcagttacacattttccatgcatacctctaatttatggcaggttatacaggtcttgcagttatggaaatggtataaagtctcctttttgagtgagcatgttaaagtaaaaagagtgcttcatttaaagaaaactgttcatagaagtacagacgatatgctgatgaggcaaaaaaccatgatattagtgtgagaataagtgaggttccagaaacactgcatatgtccaggctgcagtggagaatgtcgtagaatcctggattcatagagtgtggagccacggtgaagggtgcrtgagagagcccctcccccatagccaccccctgcctttccacaaggaattcccaaatgtcacccagtggattctcagacttctgtctcccatttcagtgttctccaccacaaaatctacacctgatcgatcccacagttcagagacaaagctgagtgaggggctcagcaggacatgggcttgctgtgcccaatgcctgctctaatattagctttccatatatctgctgagtaaactgatggaggtggagaggtttgggggagttcatttgaagcccccagatatgccccctctcccaagtcctaccccctgcttagaagttaaggccagttcctcagattttactttccacgtcatatagttccacatgggaaaccagagggattccccagggaaaagcaatgacccaaatcaactgccgcttaaacaagagacgtactgcttacagctgaagtgatgcaggggagttatatgtattaagcaaaaatgagatctactggaaggcttggtaggctccagcttcacccatcacaatctgcagaatcatcatgaaccagaaatgggcagtcccaggagtggccaaaaaattctctgtttgcacaattggctggtgtcacaagcaggagtgtgattgcgcagtggttcaggagaagaactaatccttacatcttatattttgtgaatacagcaccacaaaatcttcataggcgaagagccaggactgtttctcaggttgcaaaggtcagctgactaaggcaacagggcaggatggttaacaggcacgtgcatgtgtgcacatgtgtgtgcgtgtgtgtgttgtgctgagtgagtgggactagctttgctttctacttaggaggaccacccagattgtcccttgtggatagagatagggatgctttttattagcatgcagtttatcaaccaggtttctgtcctggataaaagtaagggaggaaccctaagctcaggtcaacttttgtagagtcggttagttctggggactgattctcatgctgtcagagcatcctcattcccatcacagaatgcccctcaccagcctgcacgtggctagaatgagtgctaatgagcatccctttttgaatttgggtctccagaagcttcatttcagatacaactcacggccttgggcaagaatccattagcaggtctgggactgtcatgtgctttatggctgctcgttgcccaatctttcctgatgtcaatcgtggtctggactggacaagggcaggcttgccaagtgacattgggaaagtagaacatggctccccaagtacctggtacctggctctcatcttcctctctttttcttcttttcttttcttttctttctttctttttctttctttccctttctcctcttcctcctcttcctcctcctccttcttagtcttcttcttccttctttcttcttctttcttccgtctttctttctttcctcttcttcttctttcttcctccttctcctcctcttcttcctctttttcttcttcctctttttcttcttctccttcctctttttcttcttcttcctttctccttattcttgtagagatagggtcttactatgtttcccaggttggtcttgaactcctctctcaagcaatccccccaccttggcctcccaaagtgctaggattaccaagcgggaagggttgccacagtgcccagcctcccctggctatttctatcccttcagccctaccatgctcagcctgggtcaatgagctgacaaggcaatttgccttagataaggctaccaattagaatatctccctgatgtataaaagcaagagaaatggctgccagccacactgtgctggaaggcagaaacctcaagtactggttctgactttgccactgagttgctgtgtggccttaggcaaaccctccccatctctgggccttagtttcttttgggaataaataacggaattgagttgagcctatgtattagtctacttaggctgccagaagaaaatatcacagactgggtggcttaaacaacagaaatcaatttaagattgtgagacagcattaatctcatggggttattttgagaactgagactgagttcctgcatacaaaactctcggcatagtgtttgccacacagtaagctctcagtaaatatttgtcaatgaatgtatgaagaaataaaagtggaaaatgcaaataagtaaaaacactgacaagattacagccaggaaatggctgttgtaattctaattagctatatagccttccaatattttcccatgcaaataaagacatatgttactaccaaaacgggaccatattatacctatctagattttcaaaaatatttcattattttattgaaatataagtcacatgtcataaagtttacctttttaaagtgtacaatctagtggtgtttagtatattcccaaagttgcactaacatcatcactatttaatcccaggacatttttaccacccccaagataaaactcatgcccattagcagttattcctcatccccgtctctttccccttccccagaccctgtcaaacactttctgtctccgtagatttgactattctggaaattacacataaaaagcatcatatgacatgtggccttttgtggctggcttctttcctttaccataatgatttccagcttcatctacattgtagcatgttcttcttatggctggatgatatgcctctgcacgaatacaccacactttatttacacattcatcaggtcatggacatgtgggttgtgcccactttttgactaggatgaatgacactgctctttgtgtacaagttttttatggacatgctttcagttctgttcggtagacacctaggaggggaattgctgggtcatatggaaactctatgttgaatttttggaggaactgcctacaccgcacaacagtttataacctgttattttttcctttcacaacgcatcctgtcttcattgttaataagtagctgtgcacatcactattttgagtgaatacatcatatttccttagccagcggtatcacagtgtgtttagtgaattccctattgttggacatttaataatcccatgaaagaggtttgagtgacttccttgtgtccccagcagcttgtaaatgacagttttccaggtgtgcccagagcactctgtatccccttaatttggtgatttcacattgccttgacatcacacctactgctcctccaccctatatgtgttgtctacaatggtgaaccccttgagaagctgaaccatgtcttgaattgacctttgtatccattatacatggccaggtgcctggcattttggtaaatgttcacagaatggatgggtacatgaatggatggatgattaaagccaggagctattgagagatggaatcatttttacattctgtccaaaaattcctgctttggaaggtagtgatttacctgagattggaagtgtgtgagaaggcttggctagttggcaggatactgtgaagctaattcaggcatcagaaagtggactggataaaatttaggatcgcttccaagcttgaaatcctggaacgctatgaaacacaagccctgggagctgcgatatgtcctaacttacccagctgagctgtgaggtgtgagtggctctaacattttccagttgtttctgaggacctcagatcaaagcttccctttgcctaaaagcatctgcctgctggtgcgggcctttgggggccctcagagagcactaaggttagagtcctgcaagggtgacaccgttatgccacaagcagttgggcgagtttacagctctctgtaatctgagagtagagtccagattggtttgatgaaagagggtaaactgtgagtgggcgtggcttgaggccccactggaagcccagggagatctggggaaagggagggcttttctgatctctcccaattagaggattaggcaattggcagcgcagggcggtaactctgggcggggctgggctccagggctggacagcacagtccctctgagctgcacggagacctcgcaggcccccggaactgtcgcccttccaggatgtggctccctgctcttgtcctggccactctcgctgcttccgcggcttggggtgagtccttctgaagtcaaatatgcggggcactttttgaaatccttgttctgggccgaactgggcgcagatgcgtagaaaggcaaagacacaaaaggtccggctccgtggcrgggcgcgacctccgtacttggaattggacttggagcagctgagcccagcaagcctggcccgcgcggagacacagggagggtgaacatgctgagaccgccctgcactgcttgccccaagaaggccggcagctggcccacctcactccgcacacaagagaaattttggcagctcagtttattgtcccataattcgtcccgttatggctcgataacggatagcggctcaggagaacattaagagcatcgactctggagccagagtgcgtgggttcgagtccccgctgggcgcttcctcgctgtgtgtacttaggcaagagactgagctattctgtgcttgggttaccccctctctgaaacagaggtggcagtgctacctacctcactgggctttggtgaggaggaaatgggtggttgtttctaaagcactcttggaagcgcctggtatgtagaaagcatgaaaaaggggtggataaatttaaaggcgctgtttaaaaatgtagtgtatgaatagaaaattcgagctgtggtcaggccactatatcaggacctcttgccattaaaaagacagtttcttactcatgttctcaacaggagggggacaccagtgcgcggggcacaaggggaagcagcagagcctggggaggggacagggcggatctgaggccaaggggcttttactgtggcttccaaggatagaagaggaaaggcagggcaggcaggctgaggactggcaagttgggatacttcaggggtgctggggcacaggggctgttcctaattgttttgtacctagccctggcatgattagggcaggtgggtagtggccagggcatggcaacccgatcaaagaggcrgttggagtgtgggctccaggttggctggaccctgagagggagtttctccaaggtcaacaaggcctcagatgccagagyatcagaatacagaaagcaaaacacatggtacatagaggggtgcagcgaggggcctcgaaatacccccatgccattttatagacagagaaactgagactcacacagggaaatgtacttgcccagggtcaacccgaaaatcacgcctaggtctgtctctgggtcctgaatcctgacagcccagccccgtctgcatcctgtcttccttctggcagcctgacactgtgggagctctggaactgtggggaagggcagagaagagaggaagcctatttggaactgaatgttcctttacctctggttactcctggcaatgccatccatttccttccttaggaagaccatacaggctgcctccacttcctcagtttcctcctctgtaaaatgggcatgttgatgcctacccagcaaggcttatttgaagattaatttaaaaaactggaatgcatgcctggcacatagtaggtgcccaccatgttcgtgcttcatataacatcagcagcaactggtcttgttctcacacttgtttctgcctccccccattcacccactttttcacccttggcaatctggctgccatccacctcatcctgttgaagggaatccctgagctgagcatgaccagcccagtggtttcttctctgacttgactctcctccacctccctgaagtcctcagcaatcttagctggttcctcgccctcttgctccctgggcttcaaagacatgggaacgttctctctcccctattctgatggatctttggtcttggccgtagtggtccctgtgtttgacctttgtttttttttctcttccctctcacactggcatcttcaatgaagccatacacatccaccgtatgtaccctcacagtccaggagaagattctgccctgctccctcaccaggcttccttccagctttgaagtgcgctcatcctgtggcatcatcttgcctggatatcccactcacatctccaccgagcctgtgtaaacagggatccagcattacaagccagctctttggtcttctttcccttccatttcccccacctctggtcagggaccaagtcttttcttttcctttcttttctttccctccctccctcactcccacttgcctgcctgcctgcctgcctgcctgccttccttccttccttccttccttccttccttccttccttccttccttctttccttccttccttctttccttccttccttccatccttccatctttcctttccttctttccttcttctctctctctggaggagccaggattacaggcacatgctaccacacccagctaatttttgtattttcagtagagagggggtttcaccatgttggccaggctggtcttgaactcctgacctcaaatgatctgcctgccttggcctcccaaagtgctgggattacaggtgatccactgtgcctggtctccaagtctttcaaaataccttttagacatcatcatatttctacatattttttctttttttatttaaaattttaaaataattaagatgggggggaggatttcaggtgaagaccggaaatcccatacagtgctgaaaaggtggaaatcaccaagaaaacaggccacatgtaatgccaccacccattgctatgtcgataaacatgcttccaaggaagttcatctcagtattatttgtaattagcaacaacaaaagaaaagaagctaaatattgacattgcagggttggctattaataagatgagacatggatgctgttgtgtaactgggctttccataatgggtttccattgtgattggatattcccctttaagaccaaatctgaattgttctgttctgctctagccccacactttgagggaggtgttgacgtcttgtctgtatccaaagcagagcagctgggaggacaagaggctggaaatcatttcctaggagggaagctcagagaaactgaggtgactggagccagataggacctgaggggtgggcagcaagatcaagtgtctgaaaggccacaggctgcagatcagatcaggccagtatagtcccatgacaggtagaaccagaactgatgcggaggctgtgggaaatgaatttcagctcagtgaggaaacattgtccgtgctgcaagaatggagcagacctgcccagggccaccagaagaatcttccttgacctgatcacatcctttatctggaacggttcctgctgcttatttgtcagtaaagaaaactcaagcgcttagcctggcattctaagccctccctgacatgtgcggtctcattccaggaatattttccactccccccagactccacctggtgcatgtgggccatgcccccttccccaggcaggctctgcattctgctgctctgagcctcagcaaattcccttctctctgctgtgtaccactctctgcttctcatctcccctcattcaatcctcccctaccgcaagtcccagctcctccatgatgcccgcaatcagaaggccttgccccctcttctaattcctagactgccttatgggtacctctcccaggacacggccacttccttcccagctgtagccccaggtgtatatgtgacccttccctataatggtcagtgcttgtgagaatatgggtcaccccttgttcatcctctcatccagcatgcggctcagtgccaggattctaatggataaatgtttccagagacttctaagggggaagctaaatgtcttgttctttcctagtagctctccttcctgcatttatttttggctggatgtttttttgcctccaattctaatttgctccttaaaccagcttgatgagttaggaaggacattgatccctcatccctattgtacatgaacagaaactgaggcctagagggtttaggtgacttatttaaggtcactcacttagatagtgggaaaccccacctggaatctgggtccagccttttgcctctgatgcatcctgatttcttctccatgtccagcagtgcatccgtcctcgccacctgtggtggacaccgtgcatggcaaagtgttggggaagttcatcagcttagaaggatttgcacagcctgtggccgttttcctgggaatcccttttgccaagccccctcttggacccctgaggtttactccaccgcagcctgcagagccgtggagctttgtgaagaatgccaccttgtaccctcctatgtaagctgcggcatgtgtccttggggatgttcacctcaaagtgatgcaggaaggagtcaaggcagtcccctgatgggctgatcctttgatctggaatccttaagatcattgtagatccttaagaacattccagaactctcacagcattctggagtccattatttaacacgtttattgagcacctactgtgtgccaggcatgttctgggttcttgggatccattagtgaacaaagcgaagatccctaggttcatggagcatgcattctagcagctggacagataaaaacagcatgcaaattactccatgcgtcatgtgatatgttagaacgggataagtgccttggaaacaaagaagcagttgagcaggtgagggagttcaaaaggaaggatctcatgcattccgctgtcttgaactttcacatagttggggagagggctgggccaggaagtactgaggggtccacttggcaagtgctcaactctcaggtgtgccaattcctgaggagaacaatggcaggtgtgcccattcaccctggccaatctgggaagaaaagcccaaaggttctaattggcctcatcaccactccctagggtaccaaggtccctacaggcatcagagcagaccctgctcatcttggtagccaggtgttcggaggctttccagcagcccgcatctggctgccttcttttctttgctattttttaaaaaataatgtttactgtttttattttctgattgcaaatgtaatatatacttattacagaaaattcaggaaatacagagaaggaaaggtaagaaaattaaaatcacatacaatatcccaccacccaaagagaacaactatcaatattttagatagcaaagttttatgatataatattttgtttgtattccagtttttttgcctgttgctatactttcttcctttaaaagggaatgctatattgagataatttggatgcctgctttgttcattataagtaatcatgagcatcattccatgccattaaatagcacagattggcattaacagctgctttacattgtattgaaccataattaatctccacaagcttttacttggggtcattaagtgacatatgatgttttcaataatataacatcatgaatgtgaagccttatgcacatatatgaatattttaggatagctgctcagaaacgacatttctgagtcaaagagtatatacctcttgtttgatttccctcccaaaatattccaactacactcctcccattgatgtatgaacatctccatttggcagactcttggcaatsyttgggattattaaaaaatgtttttggctattggataggcaaaataataataacaataacagcaatattattttcctctttaatttgcatttatctgaagactagtgaagttgagttcttttccctttcttcacattggaatgtctttattattattattattattattattattattattattattgttatgcctcttgcacttggtgatctgtaggaaaatttcccaggttggaaatcaagaagtcatctttgctggctctgattctgtcacttgacagctgtgtcatcccagagtctgagtgcctcagtttcctcatgtacctagtgggggcggtgatgactgccttttggtacattgaggtctgggactgttgcttataatatacttgtgtataagcaccacatggcatggatcttcttggctatgtgatgttggtcaggttctctaacctctctaggcttcagttttctcatctgtaaaatggaaataatagaacctacctaatgggactgttctgaggcttaaatgagttaatatacaaaaggtacttaaaacagtgcctggaacactgggagaactcaataactgttaccaatgttcatctatgttgtatcctcaagatctttcatcagggcaaccacagcagcacttgcctgggataggcggatggtagaatcttggcatgtcagggctgcaagacccatgtagaaatcactgctctcacttagacctggcagatttgggacccagaatgtgaaaggaattcacccaaggtcatcccgtaaatgtgtgggagagacaaaactagagcacagttctcctgatgttgtcccaaaaagattttacccctaagacattgcaagaaatgtcacctcccagggaagatcgttgtattggttttcttccctccttgatgctggragtcccraaggctccaggaagggaagaggtgtgaagccctyctcactctgcttggtcttaggagaccttagtgagtcccagcgyccccacctgaagcccctgatagcctccyacccactacaatgtcgtgagtctgtaaatatcaagtccatttccaggcttgaacctcccagtccaaggcactgccctagaacacacctcgcttagatctggctgaacttcaggggttcttctttccccctccccaggttcacccaagatcccaaggcggggcagttamtctcagagctatttacaaactgaaaagagaacattcctctcaagctttctgaagactgtctttacctcaatatttacactcctgctgacttgaccaagaaaaacaggctgccggtaagccatgggatcccctggtcaaggcgtgtcagcgccagtaccctgcatcttctggggcagaatggaagggagtgaaggcagcttggggagggagctgcacaggccaggattgtttcagagaccccagggcctccacaggaaacactggttttccacacctcagtttcccctcatgacayagggactctgggggagtttgctgtgcatctttaatgaacatcttaattgttscaagttccytcatgctaatagaaggatgataatgattacttttagttactagattaaaaatctgatatccacagtgggtaagacatgattttcaataatgttagtggtggaaggaacttagagaaaagccaacaccccaactcttctttttcaaatagagaaactgaggcccagacagggaaggagaggtcacacaatagggtagttttggctcaagtcttctgatcttcaaatcagtgctttcgacagggattagggcattgagcttttatgtggccttctccagcacatcaacattcatctggggtaactttcactgtccaggtacaggtgttgagggaagaacatgggacaatcccagaagcatttccttttgcctttggccaaatatctggaattttttttacctaatttccctccttaattgtcttggcaaatgctgatgacccagtgagttagcatttcccaaataaatgaagggcaggagatggggcaggctgccagctgcaggttggagggtggggagggtctgctgtcaaaggaggccactccagggtgtaaaaagaaggggtgttgtgtccagccagtctcccaggggcaccgtggcatggtgcctaggagtgggggagcaggtctgcaaacatgggactagaagttggccctacgtgtactttgtaagacaaaggaagtgggagaaacgtttactcattcattcattcattcattcattcattcttctattgtgtactcagtgccccatatacacagttagacccagggcttcagggaaaggaggaacatgaatccactccacgcagcccctgccttcaaagatcttgccatctgggctggagagacatattctctcttcagcaggttattgcaggccagcccttgggctcagccttcacacaaagatgaatgcacactcagtccttccccaggagccagccatggattagatgtgtgggagaaacaggggctctgggaacctggaggcaggagaacctctaggaatggccacaggttctagaactacacagtctaggtttaaatcctggttctgcctttgagtagctgggcatttcttaacttttctaagcctctgtttcctcaaaatgagagtcaccacatatggtcagtcaagggtgaccactaagcttgatctcggaccctggctaagtaggcagaggtaggctcatacccctgccctaacagtggactcactgcactgtggccggcgcctgcagtatgctgggcagctcaacatgtgaactctggagccagaccgcctgggttaaagtcctgctgctaccacttttgagttgtaggaccttgggcaggttaagtgcctccattttcccacctggagaatgccacagtatyagtatctacccaatggatagtttattttactgtgcttagaacagcacttgggacatagtttatgttatgagttcttttatatttcatgaataatattattacaatattattattttagccactctcacttcttccccactatgtggacttttaaaatgcaagaatcatgcatgaggaattgtatccactctcatcctccagtattagcagagtccctggcacwtgctaagttctcgacagtgttagtccattgactgaaggcatcctgaagtgggtgggttttaggctgggttctgcagggtggataggatttggggatgcagaggcataaggaggcatttgaggaagagacaccatcacaggcacgtgtgcttctcgagacaatcattcatgcacagagaagtttacttcaccaagagatagttaactgagatgaagctgagatacaagggctgccccatgggtacgctgagtgcatgaatagtcyaggyttgagggtgatgggagtgwgggssagaagaggacatcyttagcctttgctatgcccatgatgatgttctcagcatcaagagcctttcggggaggaggcaytggaggctgggtagaaaggaagggacagccagggtatgtgcagtagggtggtggyttgggtcccagttgggagaattatgcaggagagagattgccttttgcaaagttgctgggagctggtgaactttggatagcatcctccttcagttgtaaccaacaggtaggtcaccaaacaagacatcttctgagtgctccctggctctgtgtcctgtaactggtatgttgcttcctctctgcccaggtgatggtgtggatccacggaggggggctgatggtgggtgcggcatcaacctacgatgggctggcccttgctgcccatgaaaacgtggtggtggtgaccattcaatatcgcctgggcatctggggattcttcaggtaagaaattggactctcctcactgcactttggcccccagaacgaggatgctaggacccagctctggtcatgccagccctcaggggagcttagctaggttccacagtaaggcatccaagccccttcgtaattggacactacctaccctctcactacccagccactcatccacttgcctctgagcttttgcatgtgctgttccctctgcctggaatgcttattctatccgaagaacacctcttcatcctgcaagacccagcccccagttgcctccactsaaagactcatctcctcttcacctatgtttctccagcacattgcttttctctgtcatgacacttagcaggcagcccagcaggtgaaagttgacacatctgacttctcatggaaaggagggaaggggcagagtcacagagggagctcagggcatgttgtgggtgaaggaatggggcctgcagatggtggggtgtgggagcatctgaccccttcctgtaggagtgttgggacccactcaccccattttctgcttgaaatttggcaagcacgggaagcaaggatggagtcttccccatcaggtctccatggggacaggagtcagatctccttcaaggtgcaattactatgaacmttttctaagtgttaacatcccagcacctcaatcccgagtgagtgatgcgagggttgtgggagagattccactcactgatgagaaagcctagggagatggaggttgagttctggtctacccatcagcaaggyatcccaggccagtcttggtggtatcaccttcatccctgtcagccacagcctgtgtctctgctccccattacaataaagctgcttcatgatctctctccacttcctctcctccgtgtgtctcctccacccatgccagtcaggtttcttcctgaacacaccactaggctgctctcattgtggtcaccaatgacctccccctgtgctccacccaacctcacaggacttcccagcagcagcagrtggccgctcagcctctgtgacatgcttccttcccagcccctttcctggtcccccctcctccctgtccacaggcctatcttgtctccctctccctccctactaattcccagtgatcccagggagcagcccagagcccctgtttccagtccacctcacctttgaagcccacaggcgtcactcactgcctcttccctgcccctggctgtttaaagggtgccccactcttcccatggacaagctgaatccttgactcccactgcccctccccaacagagaccccctcctcctctcaccacacctccactcagctgctgctgccacaccctcccttgggctcaggagaaggccttgtgggcagcctggactctctcttttctcacaaccctcttggctccaccttcagaatccactcagaatccactactttgcacctcttccctggctcctaccctagccaaagccttctgtctgtcaccttgattatgatcttaagacttactttcagatctctgccactttcatactgaggctgagtcgcacagtaccgagagtgatcacgtaacatgtgcgttgaatcatgtgatgcctctgcacaaaaccctgcaggggcttcccatgttccttaccatggcagccgaagttcttgccagggccccagggctctctctagctgcacctcctgacctacattttctttcactgggccccaggccctttgcacttgctttttcttctgcctggaattcctttctktggatatttacaaggttcatgtgctcgttgtgcttgttttatgaaggtctttgcctccaaaacctcaaatgccactgcctccaaaaggccttccctgattgggatctgaaatggcaccccctgtcccacccctgtttttacccttgttccattttatttacctcaatgcactttgactacctgacatcattatattctctctatatatctgtttatctgcttgtgatctgtagtgggagctcagtgtcatcacaggttttgactgttttgctctcaggtgtgctctagctcataggacagtgtctggcatataatagatgctcagtaaatagttgccagttgagtgaatgtagaaccatgcatcaccacaatgctgtactaatgaaagcagggtctcagagatgctgaagcccagccttattcttaaaggcttattgatagcccccagccgcatctgtagtcctgaaagtcctgccatgatatctcggctccccaccctcaacctgttctcttccttacagcacaggggatgaacacagcccggggaactgtggtcacctggaccagctggctgccctgcactgggtccaggacaacattgccagctttggagggaacccaggctctgtgaccatctttggagggtcagtgggaggagaaagtgtctctgttcttgtgagtattcctggcaccgggcccaaccccaggcttgatgtgatgctgatgagatctcttggacacctgtcaatccagctatgcacacttctgattacagtctcaggactggccctactcactgcccaatcacggggtggnnnnnnnnnnnnnnnnnnnnnnnnnnnnnnnnnnnnnnnnnnnnnnnnnnnnnnnnnnnnnnnnnnnnnnnnnnnnnnnnnnnnnnnnnnnnnnnnnnnnnnnnnnnnnnnnnnnnnnnnnnnnnnnnnnnnnnnnnnnnnnnnnnnnnnnnnnnnnnnnnnnnnnnnnnnnnnnnnnnnnnnnnnnnnnnnnnnnnnnnnnnnnnnnnnnnnnnnnnnnnnnnnnnnnnnnnnnnnnnnnnnnnnnnnnnnnnnnnnnnnnnnnnnnnnnnnnnnnnnnnnnnnnnnnnnnnnnnnnnnnnnnnnnnnnnnnnnnnnnnnnnnnnnnnnnnnnnnnnaactctcctcccctccactactgctgtcaggttttgtctccattggccaagaacctcttccaccgggccatttctgagagtggcgtggccctcacttctgttctggtgaagaaaggtgatgtcaagcccttggctgaggtaggtctccggctggtacgtctctggctggacacccacacctccttggctctatgctcctgaatcctcagggatctctcttgtggttggttgtagctaatgttctcctagaatcactgaggcaccaatggctgagcaggaagggcgaggagacaccttgatcagcgtcccagtttcacagccaggcaaaccgacacagggcttggaagggatttgccaagggcagcaggtgatcagggcagagctgggactccagctcatggccctagcagccagtacagtgccctgtctgtgaccacactccacctatgtgccagggcctggtgccatgttgggcagtgatggtgtcttgtgtctctcagggtctgagttctgtggacccacttgtgggctgtgggcctgaagcagttccacactgagcgcctgataaccagggttggttcctggagaattcactcattgattcatttgttcacacaacaaaactaggtgactaagtgaaggcaaaaacaagaaatgggcagacgtcatcctttggctcaaagccagatgtccgtgtggaggggacatagacactgcatggccctatgtggctctgcattctagtcagacayctaacacctccccaagcttctgctataatgtagggaatagatgaatagctacagaatcacacaactagaaagtgtcacctatgacaagagcagtgaaggtgaggtacttgctgccacagcagaatctaaagaaagcattgagtcctggggctggamgaggttaccagggaaggcttgctggaaaagtgactaatgagtcaggagcaaggaacgtccagggagtgggagcagcacatgcgcgtgctgtggcaggaggacgcatcccaatcgggagggagagacagagacagagccgatggggccagagcaggcagaacaggcggagcgcggcgagtactgacagaggggacgttgggaggggccaccctgcacaggaccctggcaaggattttgtcatcatctggagagtggttgaaagccaaaggaagaggtgatcgataggaatccagacctaggctgaggatcgcccactggagccagtggcatggaggatttcggtagatttgaaagcttgtttggggaaagcatccaaatttaaagggccggtacataggaggagagaaaatggggatgccaagaatttttagaatttttgagaattttttaagaattcattggttataagcaacagttgcccattgaccagacttaagtcaagaaggagcattagcctggtgtggtggctcatgcctgtaatccctgcaatttgggagaccaaatgagaaggattgcttgagcccaggagtttgagaccagccagggcaacaaagtgataccctgtctctacaaaaaaaaaaaaaaaaaaaaaaaaaattacgctggtcatgggggtgcaagcctgtgggcccatctacatggagtctgaagaggatcacccaagcccaggaggtctaggctgcagtgagctgtgtttgcatgacggcactccagcctgggcaacaaagcaagatcttgtctcaaaatcttgtttataaacggagaattaatttttcaaggaagtagaggtctgggatgaggctgggctttgtgaaaaaaacacgaaacagaaattacaaaatgatgggaatcctagactctcttattctttttcctctttctctcctctgtctctctgtctttctctctctcgccctctacttctccctgtttatttattcgagaaacaccctgggtattgattctgtcccagatcctgcacgaggctcttggggcatgtgcactcgccctggctcccccaccatggagcctgcctgctctccctctgtgcccttctttctggctgcactttgcttccagtctgcatgagcaccctatctgcccctgagcttaaggactctcctttggttccagaaagtagtcaggctgtcttttctgttgtgaaaaatgagcgtttttacattagcagctctccaccctgattccaggtcacttaggagagaggctcactgtctcgtctgtgcttcagtgtccctggattcttagaaaagaaggaaaccagagtgtgcttggcagactgaccccaatccccaggacaggcagaaggcagcctctccctcaggagggctttttttattttaatattttttacattttttaaagttggaaagaggttcttggtgcattaattggtgttgctctgtggcttcacttaggacaaaggtgaacagaccatcactcatggccaaatctggatctgtgcctgcatggcccttgagctaaggatggttttttaaattttttgatgattgaaaggaatcaaaaggagaataatatttcatgaaccataaaattatatgaaattcaaatttcagtgtccataaaggaagttttctttgaacacagtgacactcattcatttacctcatgtctatggctgtgtttcatgtcaacagcagtgttgaagttgcagcagagaccacgtggcccacacagcctccaatatttactatttggcctttgatgggcacattgccgacctgtgccctaaagagtcgtgcttgattgctgcttgggactctagtacacaaatgtgcaggtggaaactcctggccgtgaaaccccatctatgtcttgcaaaggatgacaccctggtttttttcagaactcacctgtaaatcacattcgctaccttctgaagcacctctgtgtgaatcatcttgtctaggcctcctacaattctgcacatgtttattgtgtgggagacatggcactctcccacatgtgttaactcatgaggtaggtgcagtcattattcccatccatgagtggagaaaccaaggcccaaagaaatcaggtggactgcctgcaggctaatggctggtaagtggaacaaccaggatttgaaagcagacaaggaaattcaggattccatgctctctatcccagctccaccttgcctttcatgacacattcagctggagatgattatgtccgtttcaatggagataaggtagcagagatgagagattacataattgacccatgttacaattgagattagtaacagaggcaacgatctgtgggacctggaacccacacccatgggtctacagtatcttctgctgccccctgccactggtacaagttgggcttgggatagaatgccactttccatgttgatggagggaagggacttcgctcttgaactctgttgcctgtgatctttgcagcaaattgctatcactgctgggtgtaaaaccaccacctcagctgtgatggttcactgcctgcgacagaagacggaagaggagctcttggagacgacattgaaaatggtaggttgcctgttcccgtagcccaaacactgtaaacttggtcccagacttcttcatttcagcggtcctcttgccctgggacagttacctgggacaatttctcaagtctcgggagtctcagtatctgaatggggaatctaatttgtcctttttaatcgtaaaatggcacaaatgtataaaaagaaagtcaaaaaataacatgataaagaattgaccaaatttactatttgatgaaaatttaatattttgccattcttgttttcagatgtatttttgagaaactaaacattacatattcccaggggacaccatcatgctgaatttgggggatggagatattaagctcaaagattttcagaaagatgtcacaatttatcttggttgacttagaaactgtctgtattagacctggtggtggtccagttatatatattttctgagactctgactcatttactgttctaggatagtcatttgtccactcaatcattaatccatctactatgatcttcttatccatctgtgtgttcactaattcatcgctttcacttatctatttttatcaatctaatatcaacctgttcgtaactttttatgtatctattttcaatccatccaccattcatggatcatccagccaccttatatctcaactccatcacccattcctccaaaatcaacaatccaattatcgcctgtctgctagttttcacccatctattcatgtatccattcaattcaactgtactccatgtattgaccaactccatccatccctccattgatccatccatccatccatgctaaatatgtaggggtgggtgttagaggtagcaaaacagacatgaagtggacatagtccctgctctcaaggaactatccaaagagaaacacattcatatacttcgcaggttgagtatggtggcagcacagaggggaagcattcattgtagtaatcagggatgcttcacagagaaggcggaggagccagatttgagaccagacagtggaattcaggagttcatgcccttaaccctgactccaccttatctttcctgagaaattcagctttcagatcattgtgcccattttaacagaggtaacaaagacagataaattttgtaattgccccatgtcacagttctaattagtcagaggcaacactgtgggacacagagcccacacctgcaggtctagagtatcttctgccttccctgctccctgccatcctcacatattaggacctggggacctttaggattgatggatggctgtggcagtctctcatcacagggaagcccagcaggacaaacacccagatgacacagcacccagggccgttgggaactattccctttgagggagaagagtgtgaattccaagctcaggagtagcctggactctctctttggacctgaggctactcctgggtcccagggccggcctctaccactggactctgcttgtgtttccatgggttgagtccaatgtggtcttggggcttaggtcttggttcagtctctaagtgaccaaagtgttcaaggaattaaaacacagctgttttctaatgccaggaaggaggcaaatattccagcaattctgcatgtggcatcagaggacccagcttaaaaggggagagttgagtctttgggaaaacctatccctaagatcctggaacatccttttgagtttttctgagatcttgtggaagtgcttccatgattacgcattgcctccagtatgcacacatgcagacacacagacaaacacacatagacacacacagagaaacacatacaggcacacacacacacagagacacacacagacacccacacacacaaagagacacacacacacactcttggctagtgggacttcaatccttaatggagggacatgcactggttacgtccggagcacaggtcagatcttggaactacaatgcaacactacagtcactgcaatcttggtgaacacacaccaaagagaagcatggggtagggtgagtctcagtgagcttgcrtgagtcagggctttctgataggagatgaggaaactcccttaagtaccttgaacagaaaaagaaatgtgttacaatagcatcctcatgtaaactgaaaatctcaggagttgatggcttcaggcatggctggatccagatgatcataggatattattgagaatctaccattctctatccttcagctttgcacatttctgtattggtttcactcttaggtagatgtgtctcctctgaaggttaaagacaacagcactctggacttatgttctatctgcttaaaaaccctgtttctaaataattcctgcaaaagttttggggtaaactattggattgacatgggtgtatgcccatccctgaactaatattcatgttcagggagatggagcaccccaggtcacatatagatatatgaattcatggagtgatgggagaagaaggaggtctctgaaggagaattggtgagttcttcccaggtgaagaggaaggggagagggatggggggccaggcagcctcaaccagcgggggtcctctccagagctccatcgaccctggctcagagtccccggcctgtcttccccatgctgatgcccacccctccctgctatgccttcaccctgtgcttaggcctagcagagccagagtcctgcccacttcctttcagcccagccagcttggcaccaggagggagaacctgacacccctgttgccccactyacccagctcagtgttctcctgggaagcctctcacccacatcctctgcttttgtcttcacagaaattcttatctctggacttacagggagacttcaaagaggtaaggaccttttgtttctggattacgggttttgagtcttagcacctttaagttccaatgaactgtgagtgaaagaatcccctctcgggtggttatagtaactcctgtgtgtttgttgccgaggcccagagaggggtagtgactcacctgggtaacacaaccaggaagactagtggctggcctggaacctattttcctgactcccagtccagtgctcccaggcatcacctctgtgtgccctgggctctgcccactcccctgcttttttacattttctactccccaaaatggcactatggaagaaggctgaaccagaatcttccactctcaggaggcagagataayagcgatgattagccatggagggaggaagcctaaatctcagtccaaggacactcgcctcctcccagcacacaggaaactccaacagtatcctcctgatctcctcacccccacccccacctcccaatgggttgacagtttctggtgacatcacctctgacgaatcttacaatcctgtcctctctgctgcctccctggaggccgcagcactctcctaaatggtcatgggcggagtacatgagattcattcagcaaagataataaacacttcctatgtgccaggacttgtttaggagctggggatataacagtgaaaaaagaaagactccctgccctcttgggaccttccattacagtgcaaggacagtgcaataaaaaagcaaatcaagtatgtattccgtttgatggtgtgcagcattaggggatagagtttgcgggtggtttcaatttaagtagcaggatcagggaatggttcaatgagaaggtggcatttgagccaagctctggaggaggcaggaagccagctgtcaggaaacctggagaagcctattccaggcagagggaacagccacggcaaagaccctgacagaaggggccagtctggctggagaggaccgagtgtggggacagactggcttgaggctaaagaggtaatgggcagtgggagagagatcaattaaagtacttggatttggattcagagcaagatgggaaacctttggaggttttgaacagaggagtcacatgttcttagatctcacaaaggtctctgcctccggtgttcaaatagactgtaggaaaggggcagagtggatgcagttgaccagctgg

SEQ ID NO: 94183 - DNA, 879965 bp, Homo sapiens
  misc_feature (1)...(879965): n = A,T,C or G
ttcaaaaaaccagctcctggattcattaattttttgaagggtttttgtgtctctatttccttcagttctgctctgattttagttatttcttgccttctgctaccttttgaatgtgtttgctcttgcttttctagttcttttaattgtgatgttagggtgtcaattttggatctttcctgctttctcttgtgggcatttagtgctataaatttccctctacacactgctttgaatgtgtcccagagattctggtatgtttgtctttgttctcattggtttcaaagaacatctttatttctgccttcatttcgttatgtacccagtagtcattcaggagcaggttgttcagtttccatgtagttgagcagttttgagtgagtttcttaatcctgagttctagtttgattgcactgtggtctgacagatagtttgttataatttctgttcttttacatttgctgaggagagctttacttccaagtatgtggtcaattttggaataggtgtggtgtggtgctgaaaaaaatgtatattctgttgatttggggtggagagttctgtagatgtctattaggtccacttggcatatttatctttttgtgactggcctatttcacttagcataatggtcttcaagaacaatctgtgttgtaggaagtgtcaggaatttctttcttttttaatgttgaataacattccattgcacatatatgccaccatttgttatttgatgggcatttgtgttgcttgcaccttttggctattgtgaataatccagctatgaaaatgggtacacaaatatctgtttgattctcattctgttgcatttctttccttggggtatatacccaaaagtggaatttctgaatcatatgttgactttatttttaatattttgaggaactgccataacattttttcatagcatgtgtaatatttagcattcccagcaacactacacaaggattcaaaactctccacatttttgccaacacttgctatgttttgctaatctgattgtactcatcctaatacatatgcagtaacatctcaatgtggttttgattttcatttccgcaataattagtaatagagagtatattttaatgtgcttattagccatttgtgtatctgtctgaagaaatatccaaagacctttgcccatttcttaatctggttgttttgtttctggcgttgagttcatatattctgaatattaacctcttatcagagacatgatggcatatgttttctcctattctgagttgccttttttactgtgttgattgtgtctttaggtgcaaagaagtttttaattttgatgtaattcaatatatctttttttcttgaatataattttggtgtcatatccaagaaatcattgtcaaatcaaatttcaggaaaagtgtttcctgttttcctctaagagttttatagttgtagctgttacattgcggtctttgatgcattttgagttaacttttatatatgatatgatgtccaactttgttctttcagatgcaaatatccagtactcccaataccatttttgaaaagactgtccttttttggttgaagtcttggtattcttgttgaaaatcatttgaccatatacaaattacccctgacttacaatattcagacttacaattttgtgactctgtgaaggtacaaaatcaatatgcattcaagaggaactgtactttgagttcccaactactggtttttcaatttcagtatagtgttcaataaattacgtgagatactaaacactttattataaaataggctttgagttagatgattttgtttaactctacgctaatgtaagtgtcccgagcattggggttttgataagtgttctgagcatgttatggtaggctaagctgcaatgttcaataaggtaggtatattaaatgcatttttgacttacagtattttcaacttaacaatagatttattgagatgtaaccccatcataagttgaggagtatcagtatgcaagtgttttgggtgggggggctctctattctatcctattgttttacatgtcagtatttatgccagtatcacacagttttgattgctgtagaattgtattaatgttttaaatgaggaagtgtgacatctccaactttgaatttgttttccaagattgtttcagctatttgagatcccttaagaatctgtatggattttttttttatatttctgcagaaaacaccagtggtattttgatagtggtgcattgaatctgtggattgctttgtttagtactaacatcttaacaacattaagttttggaatccatgtacgtgggttatctttccatgtactgtgtctttttaaaattatttcggtaatgttttatagctttcagcatacaagtctttcaactccttgattaagtatattcttatatttaatgtaagtctatactcctcttcatgcaatgctttcagtttacaaagatgttctacataaactacctttattaaaactgtcgtaaatatttcgtatcttctagacttacatcaattttatttatgagcaggatgccatgtcgatgtttgtcttattattccttaatttggcaacgttgcaattcctcctcatgtagtcaagtcagtctccccaataatttttaaagacaatgttattaaaaataaagaaatgtatacatgatgaagtgattttgttacaaagcaagccaaatttttgtactgctacagctactataaaatcaccccaagagtaaataattttctaaaattatatataatgaataaataagtaaattttatttattattgctatttaaattgagtgataaaattaattgtgttgtactattaagactttcaatattttagttgaaactgcaatttgaaaaagtattttacaaaagaacttgcagagatctgtgagtttagtaataacagaacataaatatattttaatatatatatgtatattatatgtagacctataccacaactacacaatgaaaatgaaatgcaatccctttttacaacttaggtcttgcatgaagttaattgaagataatatgaaatgggaatgtacattaattgacgaaatatttgaagtgtttttctaaaagttagtaagatagttttatgatcttttggggaaaaaatagtacatagttggagtaaagaaagaaggaagcagaatgaaaacaacattctataaatttatggtaaaatttaataatgtggcttactagttttcttatgaagtatcaatttaaaaagttatacagtcagatcttgcagatcattttaaggattgggaacattaatttccaggtgataatgagtaaataaactgttgtgagcaagagcatgattatgcatattttagagagagaactggcagctatgttagaattgatggagaaaatgactcaaaatagaaagatgaaataaaagattctggccatcatataagtaagagatgatgaaagctagaaataatgagagaaatagtataactactaggcatctggcttggctaactaggtatgtggtgatgctttttaactggagcatggcataaaaattgatctttctaaaattctctatttaagagctctcagtgatttccaattcaaagataaagcccaatctcattaagaaagtataaaagactcattttctccccagactcttctctttccatgtccttcatacctcactctgcaaccaagccatactgagctgctttcacttatgcaaatgtaatacgtatatttcccttgggattttgttcccactgcctagaaatatttctcatccttttaactaaggcttacttggtctattttaaaaagttacttcctacaaaaacaattttttatgctccaagaatagtttacctatcactctaatgtaattgcatgtggtcctgaattcaccaatgggtaatcatcattgcaatatagtgttagtaaaattggtagattctaggtggagatagacatctgagacatcaaaaaaaaaaaaaaaaactcattactgctgtagttacttattatgttaattgaggtactcaatgcacattagtgcaatgcagttagatattcagtcaactgtcaattattaaatagacttttatctttttacatttttgtttttaatatcataggcgctgaacaccatggacattttagaaatagcatttgaggccaataaatagttttgcttgcttgcttcctttctttctttaatggtcttttaaaatatgctggataattttagtttccaactgaaatactgaagctgcttctttccaatctccttgtgtttattcagaaatagctacagtgatgctacttctcaagaggtagaaggattggaggcatcttgctgtggcgtttcgttttgtttctccattttcttttcctctgtacctccttgagtgaagtggtcagctacagttatagggtgggtagagaaaaaagggaaattcttgtttacttttttgttgactgtcaggtgattatattgtttttgtttctctcacagtgtggaaaccccatttttgtcatggaagcaacaatttgcttaaatgtcaaatagacatagagcattacagatcatcatgttgaaagctatggcaagcatgagattgtttttatagccagcagggattttttaatgtacatattctcatggactatgatgcttttaagtgtgctttttgattatgtgaaaatcgttttgtgtaacaaatacaagtgaagaagtagaataaaacattttgataaactttcagtgtttgtgtattgccaatacatctattacagtgtatttgtgttatatctcaaatccagaatattatgaaaatgctaaaagaattttctaacttagagaaaaaactgtcatatcggccgggcgcggtggctcacgcctgtaatcccagcactttgggaggctgaggcgggcggatcacgaggtcaggagatcgagaccatcctggctaacacggtgaaaccccgtctctactaaaatacaaaaaattagccgggcgtggtagcgggcgcctgtagtcccagctactcgggaggctgaggcaggagaatggcgtgtacccgggaggcggagcttgcagtgagccgagatcgcgccactgcactccagcctgggcgacagagcgagactccgtctcaaaaaaaaaaaaaaaaaaaaaaagaaaagaaaaaactgtcatatcacaacatgtcactgaaatgaaatcaacagaactcaaaatggctcatttttatttagaagagaaatgatttatgaaccttagttttatttggaacatcatattttcttgaagaggatattcaaagagttaatattcacttctgtggtcacatattatgattagaaattcctcttttctatttctatataacttctgcattttgactgacatctaaaaatgataactcttctctgtgaatctgcattaaaataagtgattggtaataaaaatgcaagaattcatattgaggtactgcaacttaaaatcttctgcataatataaaatacaataaactgtcttttggacccaaagagaaaatttcctatacatagatgattaataaactgaaaaaaaagagatatgatttaatttgtaaagagaaaacttcaaatatttctgtcagatagaactgtatatagcctgatagtgtggattctagactagtttgaaagaaagmaatagtgaaaatgaatttcatgccagcagacactttaaaaactagatttagtagcagtcacattagcttagataatgggagaatttttcttcattgaaaatgctctctgtcgcttaagaagaacttactgaggcagcctgccatctagctttttcacagaaaaacaggcttgcagactgcagatgagagagtctggagcagagacaattttaacttagccattcctaatttatctcaagcgttttcaattcatcttcactgctctatgcacacaggaacaccagattgccatccctggggaacagaatgcaacccgggatctagagagctgtcacattccaagaaatatttaaattgtgctgattttcttctggagaactgagcccagggaatgaaactctccatcaagtcatggctttgcgggcaatagatcagaggatattgccagttttctaatggattattgttatcgggcaggttttctctgaaggtacgtagttattttctcaattcattaccctctcttctttatcaggtaatagtctaatgagctagggatccaaacctgtaaaaagagaaagatgttaagtagtctgtatggactgaagaatgacactttattgctgcatgtttataggtgaaataatctgctccctttactgaagattagtagaatatagtttgaattgcattgtcagcaaaaacagaaaaaatcacaacaaaaccgtgctgcaggctgcattatcataagttcatattaattctcttgaggattttccttttgtagctgcaatatataatgaagaaaaatatgtactttggaaactcacttacccatatgtatttttgaatcttttaaaacaatcatagtattttatttatattttccaaaatacaaactttgtctcaaatgcttgtatttattttggtatcatggatgcgtatgatacataaatatttgaatgatgaaagtatttaatttaaagaaacttcagtataagtctttttgataatattatgtagatataattgtttgccttacagatatctatttttgagtttgaaaggattttactaaaattgattgctacagtttcagttaattatgctacaaaattattatttaactttgttctgttagtgaaaacctcaatgcctttcatagaagtacaagaaatgtttagcaaagcaaaatgctaaaaactgaaaaacttctgaatatcaacagaaccgataaaatgggagaaagccttattcgaaactgaaatttatcccattatacttatgatatcttaraacagcaaaggtgacttccgtgtctgtttctgaaaagttaaaggtgtgtgtgtgtatgttctgtatcagagagagaatgggagtgtagaatagaaaagaagcatatagtaatcacagtgatcttataaacatgtagtattagggctcttgagctttttttaatgttttattattgtgtgaataggctcaatgaaatctatcatattgttgctgtttttctgtgttaaaaatgactataaaaatggttagaatagcaggtatatttgacctggagcatggtgtatatttgacctggagcatggtgtacctgctgctgtatggactggaacacagagtttgtgttcccttcagtgggttaatacaggctcaagagaggaagtggtggctragcttcacaagagcacttgttaagtgtattctaatttctttggagcatttgaaagactattagaacaaaggaaagagggaaggattgagtcacccaaatcgtaactttaagtgcattttctcttttcctcacagggattgtaaaaggcaaaaaaatggaaaagagaaaagagtataaagtcctcaaagagacttttaagtacttcttttttcatgaactttacaggaattgaggaacagsgccttaaattaaaatttccctacggattcctccatttggcaagctttctctcctttgtggaaccttttccctccactcactttaaagcattaaaaaagtgagattgctcccagtctggtttctcccccaataactcacagctctaatttaaacctacagaagtgcactctctgaaactacatacactcctgaatgtsttagagttttacaattcgatggcttatgactttcagaggatacagtgatttaacatcctctctctctcttttctatttttaaaaattacaactgactcttccgaaaatctcaaacaatgtgctaaaggaggcamaagtaggaaaaaaagaaagcatttcagggaacatatttcatgttcttccaaaatcataccaatgatgataccaatggataatgaaatagtcacttcatgtttgggtatggaggagctagaatagaagtttagcaatatattctttaatttgccttttgaatgtkagatgaatataacatatatgaaaatcaggaggggcagctccaattgtcaaagtgcaataaaaattttatatatctgacctcttattaacattctctaccacaatcatgttagtgtctcttgcctccccataggattcattcacctacccagccattgaaatstgctcaacttccaggtttagtactaaaacttactttgcctcatcttatggtgagttcattacaaaatatattaccataatttcattttattagttgtcgttaaataacatttactgagtgcccatgatatgtttgttgcttccaagcaacatgtaggacaaaaaaaaatgtaatggtattctctcctaaatcagccagtttattaatatttcaggacctctaattggtacacacagagggaggaaatgaagcctgactctttagttgctgcttatgtgcattataggtatgaaacatcctatattcagtcaatgacttgaatttatctttacagaggattccagactgttcatcaagttgttttcaaattctcctttaactatatttcacatgtcaaagtgttatagtagacagaaaataggattggtgataagacaaactaagtttaaatccgttaagctagtttgtttaattgatctctatacacctctgtctcattatatgtataatggcactagtggtatctacattttagattcttgttgggagtgggatcacatgaattaaataataaatacgtagtttgtgcaccgcatatgctcaataaatggtacatatttttgcatatattttctcacatattttcccataaggatgttctagttgaaattaatttgactctttaatgatgtttgtgtgtgtgtttgtgtgtgtgtgtggaggggggttttggctgtgtaaatgtatattatcacatgtctattttgcagtttcagtaataaaaataatgcattgagcatgtgagtactgtttgcaattaaagaacctgtggatacttacrcatagataaaattgaaaagtgactagtttgggaaatcacttggcatattctatacggttatctaatagctaaattatcaaccataatttgccagagaaagcagagagaactattcctcatttcccacttttacattttcccaaaggatatggaaatagaagacaagacaataaatcctcttgctcattataccgtgccctttgcccttttcatttgcattttattttgctacgtggattatctagtgatatggccttaaattctaactgcacagagtagttcaagcgtaccaatccatccctcaaggaacaaagcaaatatatgaagacctttattaaaataaaagacagcttctgctttgaaaaaatgctaaacattttttaatgagagtaaaactgtcaaatgtgaatgttaaattcagccagatgttgaccttaactgtgaatttaaatctttacaaaaatagtatctatgctagaaactgtttttattgggtctcaagactactgaaaaattctacatctgaattcctcagatgcatctcatattaagtttaaaatatacagaaaaactccttaagattctgagttatatggggaaataaattcaacataacacatgtctgtctttactttttgtattgatatttggaaacacattgatatttggaaaattttggaaacaaaattttgtacgtttccaaatattaacacaaaaagtaaaggcagacatgtgttatattgaatttatctgtgtacaaaagggagccaccaactaattgttttgaaggtgctttacaggaaagtatctagcatattctagctaggtcaaaatgtggacacaaaagcaagtacttgctgatgaaccatttgagtttgtttttgttttctttagagacagtgtctgttgacagtgccaacccagtcttaaacctacaacccgcctacacaccaatgaggagacatgttaggcatctgacttcatttataaaaagattattgaagttcttgtattatttttggatattttgacccaatgcttaaggagattaaagcctatgttataatttcagctgtgtttcctaatctgtaaaggggtgtgtgtgtgtgtgtgtgtgtgtgtggtggttgggggaagtagacagtaggtaatcatcatattcatttggtgatatggatcaaatgacaaaatgtcacaaaatactattatatggccttgtaaagcagtaaaaaatattaatggttattgttgtttctgtcataacatcaccacatccaggtccaccccgatgttgagtttgctgttatttactttgattttcagacttcctttgtggtcacagatttgtgctcacctactttcttcttctgtccatggctaactccaggcaaatatttccataatattaaaccctgcccctttgacccaaagttagaattaaatggtttggcttggccactaattccctgaggcatttttccctcagcaaattatctatctacctatctatagatggacctatatctatatctatatctatatctatatctatatctatctatctctatctatagatagatctgtaagtatatagacagatagagatagatatatttaaattttaagatttggaagcaacctaggtatccatcgttgaatgaatggataaagaaaatctggtatatatacacaatgaaatactattcagcattaaaaaagaaagaaatttggtcatttatgacaatatgggtgaacctggaggacattatgctaagtaaaataagccaaacaaattggtaatgggaaagcaaatctctaaattgagtgattctctcaatttatatataatgtcagacaaatagtaaaggaggcactaggaaactactggttcccttgtcaggtgtacccttctcaggcttccagaacacaggctgctaactactttttgtaaaaacaaacaaaacaaacaaacaaaaaaacagacagaaaatgtggtttgaattgcgtctccctaaatttcatatattgaagacttaacctccaatatctcagaatgtgactatatttgtagatgggttcattaatgagggaattaaattgaaatggagtcattagagtaggccctcatccaataggactggtatcctaagaagagggaatttggacacagacttacacagaggaaagactgtgtgaagacacagggagaagacggacatctacaagccaagaagtgaggcctcagaagcatacaaccctgctgacaccttcatttcagacttgcaacctttcaattgtaagaaaataaacttctgttatttaagccacccagtctgtagtacattgttatggccgtcctagcaaagtaatacaataaatgttttkactttgtaggccacataagattctgttgcatattattctgtgttctctttctcctccctctctttcactgttaaaaatttaaaaattattcttaggccaaatttggccaaggaacataatttatcctctcctaggatatccaaggactttcaaagcctttcaaagtttgatcaaatttcctactttggtaaggtgtttcctaaattttctaaacttccgttttrtggcacaagatagtctaatatacaaatgtcagcagttatttttagcctaaaaaatgtaactagaccaatttcttctaccaatgtacatccgacaatctcaatttgatgtaaatgtctacctcartattttaagttcactgttaatggacacttaaaagcttcagtgttaaaacgatatatgaaaaaaaatcataacatttttatgttgaatacattctgtggagtaaagactattactaaacatgtgttttctcatgtccattctactagcaaccttccagagtacttgctattatgatcattttactaatgtggaaatcaagaaagatgaagcaactgtccatgattacgtagcataagtagattacgtggttagctaaggtttgggtcagaatctttgtcccacaatatcacatttaatcaccatactataatggctctcaaaccatggcacggttttatatttactatgagaaaagctataaaaatgtagaaaaatatctattacatagcactgtaagtgaaaaagaggagagataatatggtgcttattttaatcttatttacaggtttaggtaaatcgcaggtatgatgctactctagttaattatgtgatttctgtttgtcttttctcatagagtatgtgacttatctttttaggactttttttcttcaaaatattttgctgaatgagtatggataaatacgtcagacttatagaaaatctaaagaacaaaatggtataatttgaaagttacaaaaattttgtgyttaattttgcaagtaaataagtccatgcttagtttaataattcatattatgtagagaaataatgaataagccaaactgacaaatagttataaatattctaatacacagggagtagacttgaatggttttgtggcgggacatgcttgagggaaatctttgccaggtggtaattctgctttgtttcgaagaagtatatgatgttgtgtaaattcctgggttttcctttttaagttcagtgatgcatctgatgtgcctacagtattttttgtagaactgagttatattttattgccaaatttgaatttgttagaacatccttgaaaagtaggccagcacccccatgcaatgttaagtacagttgatctacttcataaattattcttctatcacctcattttcacaacagaatctttgtgatattgtcagattcccatatacaatacaagaaatataatcatcataaagagaaaggttgtcaatcacctgcccaagtcaagcaatgtaaataaacaggcttaataattccaggttttaattataatatctatcatgcaagtaaaatatatgcttgtgcctatgtagaaccttaatacaacattgttattatttagaaaattcttttattaggccctatcatcttagtctttagtagactcctggacacaggagaacaataccaaagcaaaatttctttagctatttttatttggacacctggataactacgtacattacattgcattgaaattatttttatttaatatgtctttagatttactatctctagaaagattttatgttcatatgagtagggatgtaaatgtgtatatgtgagagtgtttatatacacattggtgtcatgtgtgtttgtattttttccaagccttactcgcaggagattgaaaagcagatttttagtctacaggaagaatattgagaagcatcttcttatcccatcacaaatagaccctgaagtgtataggatttgtaacattaaacacccctgtggttcatctcgtagctctctgacaccctccctctacatagtattgttcctcccagaatgattcgagcttyagaaaatgatctaccagggatttttctttcttcttttcgattatcattgtgggttcaaggttgggaatattcaaggaaaatggatatctttatgagaataggtagaatttacatgtagaaatgaagattaacatggcaaattattgaaaaaaggtatactcttcatgggtttccaatgggggtcggcagggggtgggctggatcttgaaaatcaagttggaaaaggagaaatgcccataaaataactttctgagcatttgagttattatatgttctcctttgaccttgagatcagttgtatttagcatttgtttcatgtcttgtttttattttaaaactccttctagttatctttaaacctttagtaaatgcccacataggccatgaggtagaggttctttggaaatgtagagtggggctacaattgcacataaaaccttcacagctcctctttaggaggagggtaactagaaagcagaggcctgaggtgtagatatccacgtctacctgtgacaagtttgtttgtttgtttgtttgtttgtttgtttgtttcattaggagccatcttgtaatatagaggcagaatgcaatagagcatggtcttaaataggctaagagaagctgactttcraaaaacatgagtaatctctaggtcctaccattatgtagattggacctatagagttggcagttgcttgggagatagatacacacacaaacaatactatacacactcatctcttaagaaacaataatgatttttaaagatagtattcactaaatctacattaaaggaaaaatcttcacatatgtacacatagagtcatggatagacagacacttaaacagataaatacatacttagagaccaatacatacagccttacaggtaccgaaacagagacaggctgataaacacatgtggtgacagaataacagatagaaattaaaaatgggataggaatagtcagaycccatgacaggggcaggcaaactgaaagacagtgtgaaacataccacagagagagatggatggatagacaggtagaaaagcacaaacgggcatacaggggcagaaagagatggatggactgacaagagggacagtgagactcaggctcaagctcaaacatgggcaggcagttccagtcattaataggcaacccaacatagatatagacatggacatatgtgtatatacttgcattgttcttacacaggaattttaccctatatgttcatgaggtaaarttcagtaacaaaccattttcttttgtttattaaggatacttctaaaatatatccagcaatgcattttttattatataaatgtaaaaaaaacatcgatatgtatgtaaacatgccttgtaatttcccttcattttatctagtactgctgtctttgggtaagaaaaacaaataaaatagtcaagttattgtgaggttgctgttgaaatgttaccttaaggtcttttcaagctctgtaatgtaagagacaagtcagaaaagaaaatgatcaattttctttctccagtataagtaacaacaattataaaagaaacaaaagaacaaaacacttatgcctccaaaacattattaatgtcaaaaccattattgcagttcttagtctttttgctataggtcactgaaatcatttctaagttatgaatacacttgattttttttgtttgaaataagatgaggaaaacaaaaaatatagaatactcctaagattgtatgaaattttaaagcttgaatgaatatatattggaccttaaattttgtagaaagttttaagtattgcattatatttagctttagatttacttgaaatagttactcagtcttccaaatgttttacagttataagaatatttataggatgacaaagcctaatggttgtttaggagctacttttagaggcttggaaggatgtatagactatataattaaatgcatatgttaaataatattattagaaaatatgttgcaggtagtaactacatggtatttgtaactatcctttcttttcaatgatatgtgaacataatcagccagtataaaacaatttytcatattattttaaatctactattgtgtattatatatgatacttgaaattaaggcaractaagaatggggatttgtgttttgctatgaaattactcttcggtgaggcaacaaacaaagttttccattttttattaatatctgaaaagtataaatgtgtatataatgcaccttcctttaaatagctgtgttgaggtataatttatataccatagaattctttaagcatataagtcaacaacttttggcaaatttatattgtgtacaactatcaccgcaatccaggtttagaatattttcatcatcccagaaagaatccacrtgtccacttatagtcctctcatttgtcacccaaggcaaccactagtctcctttttttctctctatctttgcttttttggacgtttcacataaatagaatcatgcaatatgtagtcttctgtgtcttgcttcttttgcttagcataatgtttttaggatcatcatactgtagcatcatttctttgcccaatagcatcccattctttgtacataccaaattttcttcatccattaactagttcatgtacatatggtttgttttgggggttactttttgtgattgtgcactctcaaagagtgaagatggtactcattttcctagaatctctattcacattatgaatgtgtgtttcaaaaccaactaatgttcaaattaatttactctgtcggtatttataaaagtcatttttaaaagctaagaatacagcacacaaaacaaatttttaaaagtttgttatgaaagtatattaaggttatgcataatgttatactctagcctgataagattagattacttattttagatataaattaccttacttgtttaacatatctcggagtaaaaatataaatgataaayatataatatagttaaaattatttattattttccttgtttcctgttttamakgaaaaagttattttctcttaaaaatgtgatgttttctgattgaataaactattatagacaaaaatctacaaataattagctttaccataatattttattcataacagattttacattttaaatgcatttgattctatttctaaaaattttctacatttaatttttcctactaccattaattactaagtgaaagctcaagttagttttctaagtttttatctttagagattcctaatctaatgaaaaaaatgggtatatatttccaaatcatgtagacatctgaggctaattataagttagactacttattgatagggtttctatcatgttttaagttactgatttcccagaaagcatacgaacttttttcaagtttatgcttcatgataatttttccacttatttatttacttatgattaattaacatggtatgatgcctttatacatatttgactttgaaattgtcaagttgtgtataaagcaaaacttatttggcttttaaatggctttttttctgccacattttttgtctgtatcagacaatcaaacatatgatttactacaacactttctttctatttgtttaagtatgataaatgcatgtctttccaaggcatttttctttcgttgaactcttaagtatacatttctctaagtgtcattgtttgcttttatttttctatatttgctctatctggacagtttcattcattgtcacattttcgactccatctaaatctacaagtatactcatgactttttccttttgattctgacctggtagttattgttcaatatccaacagatattttgtttacagaaaaatactattgagaaaaactcagtaggaaatattcaggaaagtgtaaagaaaaaatagtgtctactttgtttgttgagagaatactaatatttttccattttataaggtttttgaccatgtacatttttgcaccaggagcaaaaggattttgcattctaattaaatgctccatctcctatctttgttctcatggatgccataaaatcaacatggtctctccctgctgctaatatggccagcctttacttggttcaattaaaatgattttagatgggggatctcatactaaagcagttttacartaaatagaaataaataccttgtgtctgaaatgtttttcttgtgatcctctaagtgatatcattcaatttttctgtgtgtctattaatatatgaattgatttttctaaagaaaattaagtaccatgttatttctgttatgttagaagtataagggattagtagcagagatgtctagaaagcttctttaattggctttacaatcattctttttgaacaaaaaaawttttatttttctttgtattttagacaaatatacatagactaaaattataaaagcacaagtataacattatacttgagaatatttggtggaacctccccccatttcttttttgtttcagtttaactagatcgctaattcctaggaggagtagaagagtgctataacatattggcctaaggagaatcatatgcactcaagtacatgaactctctcattcccagtcatgcctacccccaacgaaccatgatttctgttggatttttaaaattataactgttacattcttatggataaaaaattcaatgaactgttttgggtaaaaagacatttgctatcagcttttgttttgcaaggtgcatttaaacaaaaatattgtgatggcatcattgaaacatggacatatcaattaatactttgggtataatttttaaattaactttaataatgatttaaattaccatatttgtaaaatggggtcaacacctacactagacttttgagagtcctcaattgcagccagtttttataacctaatcctgccctgtctcctaccagatcagcatgaaataaatgtgacctcatgacmtaaactaagccctggaatctggagtagcatcatgaaaactctaatcagttttatttggatgcctatactggggagtcacataacacaggaagtcgatagcgatgaatggcttatgtgcaaattaggcagggcaaaacagtttaaagagagcaatagagtagagggaagctcaagaaggaggttgatgaggtatcccataattatggagctgtaaggtagatgcagtaataatgtgaggagcttgttgggtcctggatacactcactttctgctggattcctggagacatctagtactctggtgtcaccccaattgatctgaagtaggctcttagcactattgccaatcacagtaactgtccttatactacagtctcttttggagaaaattattttattctctytcctttttaaatctccaagaccccttattttcatgtgtttcttgttttagtcagaggagatattttttatttcacctccaaatatataaatttatgttcacttgcatcagccaaggggcactgtagtatcacactgttgtatgctggtaaaaagcttagtttctagagccagtgatgataagtttaaatctagctccatcatttactagaactatatattttatgtctttaaatattctgtcaatgacctagataagtaaaattaaatattcttcattaatgtgtttccatttttccttgtatttcctacaaatgtatctgtgtatatcgaagctcttatgtgatatatagccattactattttgtcttcaatgttattggtacccattaatgttataaagatctctgatttgtctcagttaatagttttggcctaaatatatacttgtttcttattgatacagtaaactctgcttctttatgtttaaattgtctatatctctgcacattaaaaaattatatgaatcactttgcgtcaggtttatctcgtatatagcaaagatttaggatggttttgtaatatctgaaaagttttcttttttaaaattatcttactcacatttatggatttgagaaatgttcatgaactccatcttttttggatattggtaattattagaaaagtcagtattccacatacttcctgatttcttaccctctttcctcaaaccttggtgtttatatcatttctatatttaggcattaagtacataccttctatttcttcacccgaaacctcacattagtttgaatcttacatctacagataaatgtataaattccttcctactctagcggtttttctagtcatttttgattgactcgtgttgaccttttctacttagatcagaaacagttcatgaaaatatttcttgtgtattcaaaaccttttattgcttttattcttaaaagattatttaactcaatataaattcttttggtcataattccttcccttgagcactttgaaggtatttttccattttaatctagcagtaaaggctctacaaaagaattccaagattggctttttcccctcttgttaatttcaatataaaaaacttgtattttttcttttcttctctctctctctctytttyttttttttttttggcctggctgtctaaagcattttctgaataagaattcatgtttgatatcaagtaaacttactgagataccttcagtgttgacagtctgggaccattttttttcctctgggacatgacaccatcttttcaagatgcagattcaagtctttttttggattacagtagttccatctcatctgcagggaatactttccaagacccccagtagatgcttaaactgcagatagcactaagccctatatacatgccttttccatcttaactatcatgtactgtagccataacttttgcagtttaagaaaactagtacaaatttatttttttccttattcaccatctccaaatagaagattcattcttaacataaatcttagcaacctaaacatacaatttatttttttcttataaagtagataactttgacattttccctttaaaaatcactttacagcttccttttggcatagccaaattaccagcatcgctactcttgtgctttgggactatttttaaaccaagtgagatttacttgaacacatgcactgtaatatgccagggtcaatctgataagatttgactgccactgagatgatctgagacagccactcagggactaatgggcaggtaggcataggtaccttgaactaagggatgatttatgctctgggtaggatggtgcaggacagtggaagatttcatcatgctactcagaacagtaggtaatttaaaacttacaccttgtttatttctggaactttctatgtaatatgttcaaaccgtggttgcaactgaaaacctgcataagggaggattactatataaactttttaaacctattagttttgttttattatttctgttttattccatgggaatatacttatacaaatgttagctctccttatctatgtttcacttctactgttttctgcatatcacttactagccttttttaaaaaatggataaaatgttttctttctttcacctgtattttattttctgtgtttcttttgactawtttttgcttctctttttttatgtctcattttctccttaatcccttttaactctctttaaaaattgtcttttttattttttgcccattttctatcctggatatctttttttgatagttttatgattgtattttactctttccctgagctttgccagacaatgtgacaactatcctcatcgttttcttatgtgttcctagagatggtgaaattctgatttgtgtttatgccctgtagacgtaattatctgttaattttttttccgtaaatttagatttttctgtaaaaattaacagataattacatgaaattcatggaaattatttggcaaatctttttaaatctaagtatgtgccagtttcctttattttttcaaaaagccaagacccaatttcattaatttttttctaccttttgcgtttctattttacttatttctgtttgaatctttgttattttcttccttatgctaactttgggctttgtttgttcttttttgttcttgttccttgaaatgtgcaatttgattatctagttgatctatttcctttttttaatgcaggtatttatctcaataaactttcttgtaatacttagttggtgcatctcattagttttactgtgttgtgtttttgtttttcttgaagcatttttctaatttcttttttctcttacccagtggttgttacagtgtgttgttcaattactacctatttgggaatttccagttttctttctaaaattctattgtgatcagaaaagacttggtataatttcagtcttaatgaattattaagacttattttctaacctaacataatttgtcatgaaaaaaattctatgtgcactggtgaagaatgtgtgttctgctgctcttaggtagaatatttagtatatatctgttaggtccagttagttgatagtgttgttcaagtcatctactgattttttgtgtggttactacccattcctgagtgtgcggtattgaattattccactcttattgcatgactctgtttattgatgtttgctgaacatacttaggtgctatgatggtgggtgcacatatatttataattgttatattttcctggcaactcttttatcgttatacactgtccttttttgtattttgcttctgtttttgacttaaagaagtctattttgtctgatataagtatagctgtccctgctttctttttgttcccatttgcrtggagtatctttttttcatccacttaccttcagcctgcatgtgtctaaagagagatttttgtagacagcatttagataggtctattttaaatattcatttggtcactctgtatgttttgattagagtttaattcatttacattcaaaataacttagtaagggaagatttcctactgccattttgtgatttgttttgttagtcttgcagtccttttgtttcttccttttccactgtcttcatgtgtgttttgttgatttgttttcagtgataaactttgattccttcctttgacttttttgtaacttctataggtatatgtatttttttctttaatgtgtgtggtgaccttggggtctacatcacatatgttataacattatattttaagctgataacaacttaaattcaatcactatcacttataaaactctacactttaacaccctcataaacattatattattgttgtcataatttatacctagtcgtattgtgtctttaaacatatttcagttatcattatttttaatacttttgtctttaacttttttactacaattaaaataatttacctaccaccgttataataatatagctgtagtgagtaagcaatggctagataaagaatcacaagcatgtgtcagttgtctttctcatattatctccaaaccaaaaaagacagtaattttaaacctttgtcagggttttattgtaactctccaaaaatttttgattagacactactaaacctaaatgtcaagtatccaaaccgtggctgatatttttattttttaacaactgcagcaaacagacagttctaacctataatgaaacctccctggtgcacttgaaaaaggctttaagaaaggatgatcaatgggtacaaaaatacaattagatagatggaataagatatagtgtttggtagcactatatgataagtatcattaacaataacttactgtatatttcaaaataactaaaagagtggaattaaaatgttcctaacacaaagaaatgataactgcttcaggtgatggatatccaattaccctgagttgattattacaaattctatgcttgtataatatcaaaatattgcacatactccataagtatgcaaaattatgcatccataaaaatttaaaaagattaaacgttgcttaactttgtcctcaatattttgtctatttttttcattcacttatcagtgcaacctatatacatttataaagtacctggacaggaacttttatagttgctgcagctacatcactgtgtagaatacattgcaaggtctctaagggtttatattctgttaggacatttcttaccttctaaaatttctctgcatgtattacatacacactcattctttaatgactaagctaaataaaagtaattttcttgaatgccttgtttacacaaatttttaacttcagttatgctttgccaaagagattacacaccttaaataaaggcttccagcatgggctaagaattgctttctgtttcttatatactaatacactccaacatgattgaggatattccaccattgtatactctcattagttttacctattgccctaaatagggtggaactacatttgacatgctatggatgcaaaatagagatacatgtaagataagtatttaaaagtagtaaccaaataactccactgtgacttaatattagttttcaacattatatatctatttcctcaaatatatccttcacactgaactcaaaatctaatcttactaaattcaagatattgtatctctctttcatcttcttataaaccaatctgtagtggaacctttgaaaaatctatgtatcactttattattaaattctttaaaaagttaaaattgaaatgacatattaaaacttttataaaatagtttcaaataactattgatcatgattattagggctatccacatatactgtgattcttcttcttacaggcaaattattaggttggaatttactaccactttaagatagaaaagaatgctagatttgttttagcccatgaaattaaactaagtctcataagtcaatcgaaagttaaaggaattgattgatggtgtcaaattccaacttttctttccttgttgtagaaatgttatttgtgtagaaatgaagtctttgtcatactgagtcactgaaaaaccattataaatggggtcttcccaccaacccatagtggacatatacaacaagtaagaaataacctttgaaatattgatccaaattttgtgttctatgttataaaagtagaaaattgcccattataataaaggtagaaaaaatacatatatttatatttgttgaattacagacatttctttttatgatttatactttatcttaaatcttgttagatgatgctcagattaaaggcatctttattttttgtaatatttgctttccatattgtaaacaaaaataaaaaataaaatatatttcctcagaattatctatagcaaattatcccattatagcctaatcttcacaacaaaggatcatgcttaaataatgttttttgtttgtttactttttgaagaatttcttcttcatggacagctttacttatttgttaaatactcattcttattaagcattaccctccatrtttggaactagacatttttggtttttgttaaataaccttttaaaatctaagccttaatagtgcaactttaatcattattataattatgatttagagcaaactgttgaagatattctaattaactctaagttagtcctgcaaattattatacgaaaaaagttttctgtattaaaatacatataggtattgtttactactgtacattgtttcagaaatgtacatattatttggcaaaataaaagttttaaacattttccaataaagaaataacttttatgctttttatcttaacttttcccaaatgtatttgaccacagtacatatttttcatacaccacttattgactgcctctgaaactactattttgcattggataatttaggaaaaatctattattacaagtttctagagaaagaataaattatgtacaatttgcagtayagtttttttcttttttgcatttgaatccttagaagactgaaaatctatgcagctggcaagaatttgattaaatatagcaacctatactacaccacagtttagagaaaaaggaagattcatatcatatatgaaccacttactagctgtgagggcttagacaagttattttagcttcagttttttatttctcattttaagtagttgatgatgatgatacttaagaaactgagatataataattgacttctttcatgtaaatctcttatttcaatggctgccatgtggaaagtactaaataaaaatatgcaatttcctcatttacttagaaaagagaaaattactgtaaatcttacatttttgtttttcatagtggttataccattttgcatttgcaccaggaatgtgtgagattatattcccatctctgactttaagatttttaagttgtcacccttctartgggtatatagctgagattttaatttgcatgctggtagtcagcatttattcatatgcttatttaccattcatataattattttagtgaagtggctgtttaaatatcttktccattcgttaagaatgttgttagacttcatgttattcttattattgagttctaagaattcattactgaagttctttatcatatgtgtttctgttctagcacttgagatgacaaaggaaatccaattgtccttgctcttaaaaaagtactattgtcgttttttctttagaagcttcaaaatgttttatttgagtttatttttttccctgttgaatgtatacatgtggatttattccacacgggagccgttgtgcttcttgaacttgaatagacaagaattctatcaattctagaatcaccttaattacctatttaaagtcagctctctccactttgtctaattctgtattgttagacatctcactacagtttccatgcctctaacaattcactctgattttctattaccttatccctctctgcttctttataattattgagtagttcactaattatcttttaatctgtgcaaaagaatggtttcacctgttcactgatttttaatgtctttttaatttcttcatgttatccaaatttgttatatttrttctgatttgttattttataaatttgcttatttttaagactattttttatgttcttgatgattaatattctgttattggtcttggaaatgctaattctcttatgttttgaattcatgatggaaattttgtcttatgttgcataacttaaagagtgtatctttattggcacatttctcccctgtgtaaatttcattcagttgcagttgtggcaatatctggtcaaagtagttttacattaatttatttaatagaccttttgctgttaatattcatttctcaccttgtgcaagtagggtactaggtttatagttcttcaggtaagttatatttatgtattgtcttgtttgttttttaaaataagaattatgccagtgccacttctggaaggaaccagttcaaattcctgctttaggcagtttaaaaggcccacactctatcctagtgtacagattaaaatcaaagccaatgcatattaagacatatttcctctctcaaaatctttgcaaagagtactactgtgattttcaattttggctttatttctgccacagtaatatttctattaattttctgagatgacaaactttgcagaagaagtcattgtcaaggataaaaatggacatttctaaattatggaaggagaaattcactgtgaatataaaatgattctgaactttaatgcttatagcaacaaaggttcaaaatatttaccaaactagtaggcctatttctcaataaatgctagattaaacagaaagaacaatttttaaaaccatagaaaaaaataagtgagacaacttcatttataagcttgatttgatggacttttgtctgtacccaacagatgtagaagaatacacgtggaacattcatccaaataggaggaaacaaagcaagtctccaaattactaaagaaacaatatgaaacaaatatcaagaaataaattacaatgtaaaaacaatacaaaaagaaacaaaacaatttttaataatttttggattatgttaaaataataaacaatttaaatattctatcaatcaaaagtgaagtgaatgtaaacttaaattaaaaatatgtagaactgaatgacaacaaaagtattaaattcaacaattgtgttgtatgaataaagtagtgtataaattaaaatatatattctatattttatatcatgaaaaaagaatgtttgaaaataagaatgcttgaaaattaatgtaacatgtataattcaatggtttaataataggaaggcaactgaatatactgaaagaaagaaaaaaaggggcataagaataagaatgtaaaagaaaaatcaagaaaccaaaaatgaaagcaatatattatacatcaaaatacttgtaacaaaataagaaataaagtaatatcaaattattagtgatataggattatacaataataataacagtgagaaacaataaaataattaaaaataaaaataagcaaaataaataataaccactgattagttcgatcaagacaaaatgtttggtacaaaaataaaagtgaaaaatgattgctaacaacagatattgcagggacatatccactcaatacacagacacacacattaacacacaaaaatattcacactaatacaaaacccactgttgttctaaaaaaatttttagtggcacatgttagcaaattctcacataaaagataatttttatcttatctaattttttttaaccagaakgtattaaaaaatgacaaatttctagaacacttaattttgctggtacgtaaccttcatattaaagcttgtttaggtcagtgtgagaaagattgaaggttaatgacattttcaaagattaaaaatttttttaaaaaaatttgaaacctataccagcaatgtatacacaaaagtaaaatattctgataaaatatatgttttctcagaaattaagggatagcttaccgtcaactaatttaaacaaacttgtaacgtatttttaaaaagttataagtagatacacaaggtttatctagtcaattttgacacacaattataaaaagaaaataaaaacataaaaatatattccttgtaacctacaaatataggagatatgaaagagaaattcatttacctgataagactatctaatgaaaacctgcaaaaatatatcatgtttcatcatacaatcttaaaagcaggccctttaaaattaagatcaacaaattttctactcaaaatcttattgggggacatggtcaggaaaataaagaataaagatcagagaaacaataaaattatttgttctttttttctcacccttakkattttttaaataagttattggcatacaggtggtatttggttacaagagtaagttctttagtggtgatttgtgatattttgctgcacccatcgcctaaggagtatacactgctccatatttgtagtcttttttcccttgccccccsaccactcttccccccaagtccattgtatcattcttgcctttgtgtcctcatagcttagctttcacatgtcagtgagaacatatgatgtttggttttccattcttgagttacttaacttagagtaatagtctccaatcccatccaggtcactgcaaatgctgttaattcattcctttttatggctgcatagtattctatcatataatataaattatataatattatataatatcacagtttccttatccacttgttgattgagttggttccacgattttgctattgtgaattgtgtcactataagcatgtgtgtacatgtattttttttttttgaataatgacttattttcttctgggtagatacccagtagtgggattgttggatcaaatggtagttctacttttagttctttaaggaatcgccacactgttttccacagtggctgtattagtttacattcccaccagcagtgtagaagtgttgcctgtttaccacatccatgccactgtctactgttttttgttttttgattatggtcattcttacaggagcaaggcggtattgcgttgtggttttgatttgcatttccctgatcattagtgatgttgagcattttttcatatgtttgttggcaatttgtatatcttcttttgagaattgtctatttatgtctttagcacactttttgatgggattgtttttctcttactgatttgtttgagttcgttgtagattcttgaggaagtcaaactgtaactatttgctaacaatatgatcgttaccttgaaaacyctaaggtctcctccagaaagttcctagaaatgtacatctgacaaaaattttaaagagtctcatttttttcattttataattgatttcttaatttactcaggatgctataacaaaataccttagactacatactttataaacaataaaagtttatttctcactgttctgcgagctggaaagtccaagatcaagttcaaaataagcagcagattcagtgtctagtgagggcttatttcctggttcatagaggccacattttctctgttcttcaaatggtggaaaaggtaaggtggctctctggggcctcttttataagggcactcatcccattcaagagggcttcttcctcattacttaatcgcttcccaaaagctcgaccttggaatatcaccacattgtgattagatttcaacacatgaatttcggggtaatacaaacattcagaccatagaaacgatttcagaaaacatctaagtaatcttctttggaattaatataattataagagaattggaattaatgtaattgtaagagaattggaattaatataagagcattggaattaatataattataagagaattggaattaatataattatgagaattcagtaactttatttgctgaaagaacatgcctttcatatatatatgtatatgtatatatatgtatatatatacgtatatgtatatatatgtgtatatatatacacgtatatgccaaataattagataataaaagcttaaaaaataaataatttgcaaaagccatgggagataacagtgcttagaaatatatctatcagcctgaggtcaggagtttgtgaccagcctgggcaacacggtgaaaccctgtctctactaaaatacaaaaaaatttgccaggcgtggcagtgtgcacctgtagtcccagctaattggaaggctgaggcaggagaattgcttgaacctgggtggcggaggttgcagtgagccaatatcgtgccactgcactctagcctaggcaacagagcgagactctgttccccatcccccccaaaaaaaagaaagaaaaaggaatatttatatcaaaattatgcaaaacatttacagagaaaattttaaaattctataggaatagaatgtttaaataaatggagaaatacattttatggaagagaagatttgtaaaattggaaaatctgcccaaattaacctgtaaagtaaatgtaatttcattcaaatacacaacatagttttggatgaaactgaacaaggtgattttataaaagtgtaaagtgttaaaacctaaggcaatttttcagaaatatgtagtgactcactgtgtcaattaaaaatgaattattatggttataaaaaatattgtcatattatcagggtgataaataaatatattaccataaaattatagcctagaaacacatatacattgcatatgcattgaaacctatatgaaaaaaatgtgtttraaaagcatatgttatatggtaccaggaaaattcactagactatgagaaaatttcaaaattagattatttctttagagtaaattaaatcaggtagattaaagatcttaatgtctaaaggtaaaaacgcacgaattttgacagaaaatatgtaatatcatgtgacgtcagtgtagggaaagattcttgaacaagacttgaaatgtataaatcataaggaaaaataatgataaaattgatagctctaaaattactattttcaagatgtccaaaaacagcatctttttcagtctggatatgatatagaactatttcttcttgcttctccctgctaagcacaactataaactctataaactactcaagaggcaagcaaaagacaatgctgacaactggtttggaaccctggatttgagaatgtggcatcagcagtatatgtcttgcatatacccacaaaacagaagaagccttgcaggcatttcttgacctgaaacctagtaaaagtaggcatcctatctaggctaattttttcaccatgttgaaatgaataccctctgatatcaggtgagtgcaataccaatggcaaatgaatgatcagaaattctggcatcagttagtgaccagaagaagtgctctccatcccatttaggcctgatatttccttactccactgggatagcccagtaaaggttggcaaaaccarcaaaagagacccagtctcaagagtcgttcttagtagacctgagactcttcccctaagaaaagtgaagacatacacttcacattcaacaacataggtaggctratagttaaaggatggaaaaggaaatgctatttaaaacattaaagataaaaaagcatgtgtgactttattaatatataatatatacggcctaataaagtagacataaaatccaagaaaactattagagacagaaagaagtttaataatgacagaagatccatttaacaagatgacctaacaatcccaattgtgtcctcagtaaacaagaaagcttcaaaattcatgaagcaaaaatgtctagaactgaaaaaagtaaaaaacaaatccacaaatataattggaaactgtatctcccacttaacaactgagagaattactagatagaaaataacaaaggatatagaaaatctgaacagcacactcaaccagtaggatctaactgacatttatagaacccctcaccaaacaatatcagaatacacatttttcaacaatcaacagaacattaattgaaatagtctgtatgctaattcataaaataaatctcaataaatttaaagtaaatgaaatcagacagaatgtgtcccctgccaacaatgacattgaagcagaaatcaataatagaatgaccacaggaaaatctctaaacacatgaaaattaaacacacactcttaaatagtttatgtcaaatataaaatmttttaaaaaatgtagactagaatgaaaatacatatggagcatacaaaaatgcaagagatgcagctaaagcaatgctgagagaaaaatgtatagcatgaagtgcttacattgctgacaaggactagtctcaaatcaaaaatcaaagtttctacatcaagaaactagaaaatagaagagcaaattaaactcagagcaaaaagcaggaaggaaatattcagagcaaaaatcaataaaattgaaaattggaaaatgatagagaacattgatgaacactggttcttcaaattaaattaataaactggtaagactagcaaaaataataaaagaaaacacaaattgtcaatatgagaaatgaaattggggatataatataaattttacagccattaataatagaatactggctgggcacgttgggtcatgcctgtaatctcagcactttgggaggctgaggcagacagatcactttaggacgagagttcaagaccagcctggccaacatggtgaaacccagtctccactaaaaatacaaaaatttgctgggcgtggtgtcaggtgcctgtaatcccagctactctggaggctgaggcaggaaaattacctaacgtaggaggtggagattgaagtgagccgagatcgtgccactacactccagcctgggtgacagagtgagactctgtctcaagaaaaaaaaaaaaaaaaaaaaatactatgagtgccttggtgaacatcaattagaaaaaaatggaactgttcttcagaaagcacaaatcactgaaactcaaacatgatgccttatagtcgatcatttaaaaatgaaattattaatttaaaagctcccagaaaagaaatcaccaatctaaaattgtttcactagagaatcacaacagaatgtgtcccctgccaacaatgacattgaagcagaaatcaataatagaatgaccacaggaaaatctctaaacacatgaaaattaaacacacactcttaaatagtttatgtcaaatataaaatcttttaatgacaaggactagtctcaaatcaaaaatcaaagtttctacatcaagaaactagaaaatagaagagcaaattaaactcagagcaaaaagcaggaaggaaatattcagagcaattgctaattgcaattgctaattagcaattttagaagagggaatattcattcattaatcatttcactaggctagtattaccgtaataccaaaattgacaaagatagtacaaaatcaaagaaaactatagacatatatctctcacaattttgcatgcaaaaaagttgatatataaggaatctcaaaatattagaagatcaactacaatatatatgaaaataattataggccatgatcaagtgggatttatttctcggtgcaaggctggttgaacactcaaaaatcaataatgttatctaccatatccactaactaatgaagaaaaatctgttgatcatatccattgacacaagagcatttaacaaaatccaataaccattcatgatagaagctcttaaaaagttagaaatacaagggaattacctcaacttgaaaaataacatcaccctaagcttatarctgatataattctttatggtgaaagactgaatgctctcctatatgagattggaaataaggaaagtatatctgttcaccctactcttattcaacatagtattgaaaattctattcagtgtaataaggcaagatagagaaatacagattgaaaaataaaaaagacaaaactcaccatttgtagactacatgattatttcttataacataagaaatcacaacaagtcaaattccccaaatgcctaaatgttttaagactcaggatcaattttaaaaaacamatttcaatataaaaaaatgaaaatgcagaaatttaatggaaacacaatactacatgcaattactccaaataatttgcaatactgaggtaaacacttaaaagactctgtatggatttttacaatgaaagttacaaaatgctgatgaagaaaatcaagtaggcttaaattaatgaagagacaacttttgttcatgaattggaatcaatatagtacggatgccatttgtctgcagaattatctaaagctgtttaatgcaattttagtaaaggtgctagaaagaattttcatagacatagacaagtttattccataatttaaatagaaatatatgggctctgccaaagatctataaagaaaataaaaagattaacaccagacaaagcaaaaatatttgccaaactcatatctggcaaagtcctgtgtctagaatacacaaaaagaaaaatcaaaattcaacagcyaaacaagccaaaaaatctaattataaaatggcccaaattatgaagaggatataaaaatggcaaataagcacatgaaaagctattcaacattattatgcagcaggaaaatataaatcaaaaccacaatatcactacagcagaatggcaaataaatttttttttaaaaaataggataccaaatgcaggggaagatgcaaagaaactgggtcaatcatatattgctggtgggaaggtaaaatggtggatatactctgggaaccaatttgtcaatttcttgtaaaagtaaacatataattactatacaaactaaactatcatttgaaaacttatcttctcaaaaaaacttgaacaaaaatattcatggtagtttttatcattagagctcaaactggaaatagctcagatatccaacaggtgaacaactaaactaactgtgtatatacatagcatggaatactactctgaatggaaaagaacaaactctatacacattcaataactcagatgaatcttgaaaggattatgctaaataaaaatccacattcatcctatccatgaacatgggatgaatttccatttctttgtgtcctctttgatttccttgagcagtggtttgtagttctctttgaagaggtccttcatgtcccattttagctgtattcttaggtattttattctctttgtagcaattgtgaatggcagttcatacatgatttggttcttggcttgctggttgttggtgtattggaatgcttgtgacttttgcactttgactttgtatcctgagactttggtgaagttgcttaccagcttaagaagcttttgggctgagacgacaaggtttcctagacmtaggatcacagtatctgtatacaaagacaatttgacttcctctcttcctatttgaaaagaggaatttttatttctttctattgcttgattgtgctggacaaaacttccaatgctatgttgcgtaggaggggtgagagagggcatccttgtctattgctagttttcaggaggaatgcttccagtttttgcctattcagtatgatattggctgtgggtttgtcataaatggctattatattgaggtatgtttcttaaatacctagtttattgagagtttttaacatgaaggaatgttgaattttattgaagtccttttytgcatctaattaaataaccatgtgtttcttgtctttagttctgtttatgtgatgaattacatttattgatttgtgtatattgaaccagccttgcatcctggggatgaagccaactggattgtggtggacaagctttttgatgggctgctagatttggttttccagtattttattgagaatttttacactaatgttcatcagggatattggcctgaagttttccttttttgttgtatatctctgccagattttggtatcaagataatgccagcctcatagaatgagttagagaggagtctctcctttcaattgcttggaatagtttcagaaggacggatgtctgctcctctttgtatttctggtagaattcagctgtaaatccatctggttctggtcttttatttggttggtaggctattactgcctcaatttcaaaacttgttattggtctrttcagggctttaacttattcttagttcagccttgggagggtgtatgtgtccaggaatttatccgttcatcagaaaaggtctaatatccagaatctacaaggaagttaaacaaatttataagaaaaaaaacccattaaaaagtgggcaaagatattaacagacatttctcaaaagaagacattcatgtggccagcaaacatatggaaaaaaagctcaacatcactgatcattagagaaatgcaaatcaaaatcacaatgagataccatatcatgccagtcagaatggcaattattaaaaagtcaagaaacaacagatgctgggaaggttgcagagaaataggaaaatggtttaacactgttggtgagaatgtaaattagttcaaccattatggacracagtgcggggattccccaaagatctagaaccagaaataccatttgacccagcaatcccattagtggttatatatgcaaaggaatataaatcattcttttacaaagatacatgcacacttactttcattgcagcgctattcacaatagcaaatacatggawtccatccaaatgtccatcagtgatagactggataaaaaaaatgtggtacatatacactatggaatactatgcagccacaaaaaaggaataaaatcatgtccttgcaggaacatagatggagctggagccattatcctcagcaaaccaacgtaggaacagaaaaccaaacaccgcatgttctcacttataagtgggagctaaacaatgagaacacatggacacacactggggcgcagcacacactggggcctgtctgagggtggagtgggggaagagagagcattaggaaaaatagctaatgcatgttgagcttaatacctaggcaatgttttgataggtgcagcaaaccaccatgacacatgtttacctatgtaacagacctgcacatcctgcacatgtacaccaggattaaaataaaaataaaaactaaataatatccacattcaaaaggtgagcaacttatatatagtttcatatataagacrttttctttttttgataatttatttatttwttttttatttatatatatactttttattttaccttaagttctagggtacctgtgcacaacgtgcaggtttgttacgtatgtatacgtgtgccatgttggtatgctgcacccattaactcgttattcacattaggtatatctctagtgctatccctcccccgctacccccaccccacaacaggccccagtgtgtgatgttctccttcctgtgtccaagtgttctcgttgttcaattcccacctatgagtgagaacatgtggtgtttggtttttttcccttgtgacagtttgctgagaatgatggtttccagctccagaaaggaagacattttcaaatggcaaaattttagaaatggaaacaggttagtgcatgctagtggttagggacagggactgaagtggaggtgatcagtggcagagaattgtcaggaagagatgggcgtggtaatagaaaggtgacaggagggatccttttggtaatggaactgttcagtaaatcttgagtgtagtagtgtatatatgaacttacacacgtggtaaagttatatagaactacataaacacacatatactctctctctcctcacacacacacacacacacacagatgtaagtaaagctggataaatctgagtaagatccatgaattgtacaaacaccaatgttagttgttgttttataatatagtttgcaaaattttaccattgtgagaaactggataaagtgtacacaggtcttctctctattatttcttatagtagcatttgaaactacaattttattgataaaaattctaataaaagagtacataataaatgcaataaaatatatttgcaacccatatatttgcaacaaagcattagtatagagaatatatatattctatacattgataaataaaaataagaaaatgaataaaaaggtttttttttacaaaaataattttaaggacaactaaagaggtagaaaccaggattcttaactgataaagcaaaagttgttcaagacacttctcaaaagaagagatacaagtggccaataaattgatgaaaaaatgtttaacatcactaaatcatcagagaatgcaaatcaaaaccataatgagataccatctcataccagtcataatggctattattaaaaaataaaaataaaagatgctggcaaggctgcagggaaaggaatgcttatacactgctggtgggaaggtaaattagttaagccactgtggaaatcagttcagagatttcttaaataatttaaaccagaactaccacttggtccagcaatcccattacttggtatctatccaaaagaaaataaatcattctaccaaaaacatatatgtactgacatgttcattgaggcaaaacactattcacaaaagcagagacatgaaatcaacctaggtgcctatcaatagttgattagataaagaaaatgtagcacatatacaccatggaattctatgcagccataaaaaagaaaaaaactatgccctttgcagcaacatgaatgatgctggagaccctttatcttaagcaaatttacgcagaaatagaaaaccaaataccacatgtttcactcataaatgggagctaaacactgggtactcatagacataaaggtggcaagaatacaaactggagactactagagggattaaggagggtagggaacaggggttgaatacctatcatatactatgctcagtacctgggtgatatgatcattaatattccaaacctaagcatcacacactatacccaggtaacaaatctgcacacataactgctgaatctaaaataaaagtaaaaaacaacaaaaaaagaaagaaatagttgttcaatcccactagtaatcaagacaattaacattaaacaaacaatatcatattatatcacagtcattgaaaactagtattcataaacaatattaatatggatacacaaaggacaaatgtgcatttctgataacaatataattggcaacaaacactttgtagagaaatttggcaactcctatgagtgttgaaatgtgtataccataaattccagtaatcttacttctgcaaaagtgaagtttatacatgtatcagttaaatgcttaaccaaaattttaatcacatccaaaacttaggacgccacctcctgcattacttaccaaagttcgtcaagtataggttttctaaagaagtaaacattgtgaatttattctcaaaatttttctttaaaaatgtgccataagtttgcctttctatataggtaaaatagctgaactgttgagaaatgtgcaaatttctttgatggcttagataatttagggatctgtcacttaacaatttgacttagaaattactgtaaataaatttagttgaaatcagcattgtcttgtcaatgaaaaatacttatgaagtgttatacatataactgaagaatatatgtgtgcatatgaggtattatattttgtcactgacaaagacttatttcaattacaatatagcacttataatgagaaatagccaaatataataaaatgatgtagctaattcataaaagaaaaatatatatttttttcttctttctttctttatttatttattttatttttttatttttttattatactttaagttttagggtacatgtgcacattgtgcagcttagttacatatgtatacatgtgccgtgctggtgcgctgcacccactaactcgtcatctagcattaggtatatctcccaatgctatccctcccccctccccccaccccactacagtccccagagtgtgatattccccttcctgtgtccatgtgatctcattgttcaattcccacctatgagtgagaatatgcagtgtttggttttttgttcttgtgatagtttactgagaattatgatttccaatttcatccatgtccctacaaaggacgtgaactcatcattttttatggctgcatagtattccatggtgtatatgtgccacattttcttaatccagtctatcattgttggacatttgggttggttccaagtctttgctattgtgaataatgccgcaataaacatacgtgtgcatgtgtctttatagcagcatgatttatagtcatttgggtatatacccagtaatgggatggcwgggtcaaatggtatttctagttctagatccctgaggaatcaccacactgaattccacaatggttgaactagtttacagtcccaccaacagtgtaaaagtgttcctatttctccacatcctctccagcacctgttgtttcctgactttttaatgattgccattctaactggtgtgagatggtatctcatagtggttttgatttgcatttctccgatggccagtgatgatgagcattttttcatgtgttttttggctgcataaatgtcttcttttgagaagtgtctgttcatgtccttcgcccactttttgatggggttgtttgtttttttcttgtaaatttgtttgagttcattgtagattctggatattagccctttgtcagatgagtaggttgggaaaattttcttccatgttgtaggttgcctgttcactctgatggtagtttcttttgctgtgcagaagctctttagtttaattagatcccatttgtcaattttgtcttttgttgccattgcttttggtgttttagacatgaagtcctttcccatgcctatgtcctgaatggtaatgcctaggttttcttctagggtttttatggttttaggtctaacgtttaaatctttaatccatcttgaattgatttttgtataaggtgtaagggagggatccagtttcagctttctacatatggctagccagttttctcagcaccatttattaaatagggaatcctttccccattgcttgtttttctcaggtttgtcaaagatcagatagttgtaggtatgcggcattatttatgagggctctgttctgttccattgatctatatctctgttttggtaccagtaccatgctgttttggttactgtagccttgtagtatagtttgaagtcaggtagtgtgatgcctccagctttgttcttttggcttaggattgacttggcgatgcaggctcgtttttggttccatatgaactttaaagtagttttttccaattctgtgaagaaaggcattggtagcttgatggggatggcattgaatctgtaaattaccttgggcagtatggccattttcacgatattgattcttcctacccatgagcatggaatgttcttccatttgtttgtatcctcttttatttctttgagcagtggtttgtagttctccttgaagaggtccttcacatcccttgtaagttggattcctaggtattttattctctttgaagcaattgtgaatgggagttcactcatgatttggctctctgtttgtctgttgttggtgtataagaatgcttgtgatttttgcacactgattttgtatcctgagactttgctgaagttgcttattaaaatatagaatagcattattatttttgatgtattatatattctgctaccttgctaaggacacagaatgcttgaaataattagtgaataaattaatgaatgatcattttcaaactgtaggcctaatacagtactatgtacagaattttaaaagctttaaaaaccataactaaagcacctcaaaaggaacagaatatttagttatatttttggactttgagtatctaacacagtatgcattcagtaatcacagactgaattaaatgaatcaaataaaatcatacctgagtagcaaatctgcagatatcccatttaacccaggtactgacaaaaagctggcaagtttaaggttattaaaatactcactcttcactaatctttcaacaattctaaatatatggcaccttgtgtggtataaagctaattataagtttacacaggtgtcaattatactttagagaataactattgaccatgatccagtgccagtcctgaatttcaccatgacaagttcctaatagtggctgacagcatttaggaatgcaaagaaatgaggaaaacaattgtagttagtggctggtagaaaacaatgggccagtttgatatttacataaggtttaaaaaaattcccatggcaaatcactaaaatctgccactccattaggtgataaaataaaaatatttcccttaacattttgtattacctatttctggaagaattagggttaggtatgatggacatttctggcttttctggataacttgtaagtattaagaaattgatcctgtgtgggaatgggaaaataattccattcgaaaggtaatacatgtcagatcacaaccaatgtaatacctggaaattgagaggaaaagaatgactcattccaactttataagcaggagtaacatgtccaggagttcttagtcatcagctgcccatctgtactccccttcaccttagccctcattatcattccaagacataatactatcatctgccttgtaaccaacagaaaaaatccctacctgccttcaacaaactcagaactttctaytgatctcctatcccctggattctttttctatatgtctatatatctgcttttatcactcatattcattactgttcctaaattttraatctcttccactgagtccttggggattcagtccatacattggtaaaatcacacacattctcaacacgctctcgatattctcctcccttttttattacttaaaaaatgttctcccttgaggacactgcttttcttgaagctctctcaagttgtggttgttttctttcctgcaaatatatgacgtttagacaaggagagctgtcttctgttctttccattgccttttctagaccattctcttctttcctaaacaatgtcctccctaattttaaatcaaatgcctttacaccacacgcttatgttgcaaccataagtgcagccataaagtcagtgaatgagaaacagaaaatatcaaggctggaggtcaaggttctagttaaacagacctaagaggatttttgctgaaggcaggccagagtgataagatatcacctgaaggatggtaggtgatgaggattttaatcagatattgtggacaattagatatagaacatggggattctggctaaaactgacttagcaggatttcttcctaaaattgggtaaggcaaatatagataaagaaatccagaggttggggcctagtggagaaaattactcagaaagcctgacaaaattttggtcatggagaaagtctttgtcaggctcttttcaatactctgacctctcagttckaatttgttttctcttacaatggcactttcctcccagtatcttggacattaatttctatggttaaacktagttattattaataattgtaaatgcaatatccatttcaaatatcctattgtctgaccagttcctctcctctggtttactccctctgatacctaactccaacaattcatctgcatgagcaggacctatatccactgatcctggtatttcattgtcttttcctatatctaccagagctcaatatgaaaacagaaaccattctgggtacttaaaacagatggaatttaattcaagtattgattataaagtgatggagaaggcaagcaggtcacaaatcaattcagagattaccaacagctggaggctatgaccagatggaggcacaaaagaaagaagctgccttacttttgtgattaaagacatcaggatccagaatcactcagtggaacctggtttcatgagggagtttctttagtgagagttggagccatatatgtaaactagcactgtcagaaatgctgccagaggctcaggaaaaggagaaatactctgctttcttcctttatcagtgactggttgaaccaagccataagtcagctgaaatggtagtctaaggaacacatcttccaacgttaattgccctgaagtaaatagtaggaaggatggaaaagtcaatggctgcatctgagggcaaatgggcactgaaccaaagattttacatttgtgtcactcagcacccattttcatgttttgactcatatttaaacaactcaatgcatctgcctaacataaaacaattatatataacacaaaggaagatgctctcactctcaaattcaagagagacacaaaatccatttggtcacagtgtctacctcatgtcactatctacaggcaatatatagtcctctccattaggtacagatatggttcttaatagtctgatgacctgcaacataaactacaaagattaacactacccgcaatccacaataaaaatagtaagagaaaaggaaaggaaaataaatcattaacaatcacgtatctacattagggtcaaacattgaaggccataaaaaaagtcacatagaacaaaatatgagatatgatttactattaagtagcttctagtattgttctctcttctgacaaattcctttcttgaaatataaaagctatttgtgcatcataaataatggtttaaaagaaaattgacataatgatagcttaaaggagaacagctgtgagatagaaagtatttgtaactaaaacctttgcagtatccacataggaaataatgcatgtcagagaatattcttcctaaaactgagattttaaagcactatttaaacctgaaaatttttttctattaatgttcaaagcagttttcaacatgaaaacctagagaaaatagaaaaccagagaaattatgccttaactaattaagaaatattttgagagttcaaaatgtcaatgtagtttataacaagcagaaaccactggaaaaatatgtaaagagtaagagtcttggtgattgtgctgatgagggcaaaagaaggtaagaaaatgttgggaggaataattatctcaaataattaggttaaatttatgaaaatcaaatccttctcttcatattgatttttgtatgctgaatttcaccttaatatataacagactttgctaatttgtaactggttcttttaactggtggccagatgctagaaggcaaattaaattatttaagcaaaggtcccttctataaagtggccccagtttagtagcttttgctcttgaatgaaacttattttttaagacatggcaactcttacatcatttgcttcttacagaataataaaagatgttatatttaccttgatttttacaatatattttattttattcatgttgatatttcttcaagaccttacacacactttttcatggcaaccaattgaagtggataacagttattccatgttttaaacaacaataaacagctggtattctaaactcccagcattcaagcattattacaatggcatacttcattcatttttcacatatattgtttggaattagaaggctgtaggtattgagcacctgcaaaattgtatacaaagacaaagattgataaataatatggaattactgcccccaaaggaatttggagtatattacagaagactctcttataatcagattgttataaaatagagaagtgaataagaaaaagagatgcacataatgaagtttgtgaatatccaggtttatacagttgtgcatgtgcagggcggggacatgaaatgattcctgaggtagtaacactcgtccagatattaatctagaacattaagtcgaaagtagattcattaaagaggaagatgggaagaacattcctggcagaggagacaaaacaaactaagaaaatgatgaactacaaagtgaattataaataaaattttacaatactaaacaaaatgagtaaattatggtgaatgtaagcagtatatgctgtttgatcataacgtgaacaaggctggtttcatgggtgtgcaacctgtgatggcttcacgtgtcatggaaaggatctggtcagttaatctcacacacaggggaagtcaacaaagggttgtatgtagggaaaatatattatgtgatatacaccttgacagcaactggtaagatggttatggatagttataggtaagatatgtaagtaggtgtacacagttaagatataaagaacacaagttaatgacatgattataaacataaagattaggaaatcaactcaggagtatataaacagaaatgtatatgaatttaacaatcaatcaatgaattgtaagattaaagaaaggcagactttattctaagatgctggtatagtgtcagtaactacaataaagaatatcagaagaagagaggttcaaatatcaaagatttcagacttgaacatattatcaataaagtgccttatgctatttcaggacaagttacaggattgattttcattagctgaaatcaggagaactgtttaaattacccraataattagaagatggctacataaaggatataatgctaaggaaatgaagataaaacataattaaagagaagcagatagagcaggaagtaacagctgcctgtggtctccatggttgcaatgggtctacaaacagatagtaaaaacatggcwaatccttctggggtatttttaatagttgaattgaaaaaaaatatctgttacatttggcaattattgactttcatatgtttatatatagtcatgtggtggatatagaagccagtggtattgaaatgacagttcagttgaatgtgaggaagtagaaatagcaataaaaagtaaaaaaaaaaacttgaaagaaaaatagaagaataacattgaataatatctccagagattgtaggatcatggcaatggcttttattgttatttatttttttataatgggaaggcgcttgaaattgcttatgacttctggagagaaggcaataaacaaaagggataaaaattatagaacagaggagataaaagtacagcagaatttataagaatgatggagaaaggaaagcagcagtttcaatggctgtaatttttctccagctgctcttaattctccttgtattgggaagatggaaattaaataatcatactcattctggatgagatattcacccagtgtattagtcaaaaagataagccatccatccctaccacctggaggcagagaaccttttcatttccttatcatgttctttttaaaaatttcaaatatttttaatggacagatacaattgtatgtattgtactaagtatgacatgatgttttgaagtatatttacattttggaatgactaaatctaagtaattaacatatgcatttcctcaaatagttatcatttttgtggtgagaacacttacatccatgatgttttgaagtatatatatattgtggaatgactaaatctaggtaattaacatatgcgtttcctcacattgttaccatttttgtgctgacaactggtacacccattctcttaacatttttcaagaatgctatatattgttaactatagtcaccatgttatacaatagctctcttgaatttcttccttctatgtaactgaaattttgtatcctttgaccaatgtctttccagcccctggaagtcatcagtctactctctacttccatgagacttcacaaaggagtgaggttatgctgtatatgtctttccatttctggcttatttcacttaacataatgtcctccaggttcatccatgttgtcaaaaatgacaagactttcttctttagaatatgaaccttgctttggcaaacactgcaagggcatgttgtatgttatttcccactgtacatctagcacaaagactgacacttaataggtgctcaagaagcattagtaaagaaatggaaaaggaaggagtaaagaacataattgaagcacagtagtaacacacaacctggcacgtgcagaagtaatatagtgtggctggtgacacatcaagtgtgagacagcagacatgaaaaaaaaaaaacaagtcacagaaattcttaaaggttaggtcaagttcaggtgctagaaacttttctctatatcagaattattgtattttttatgcttaggttcagctcagcaaaggatatttaagaaagcgtgtaaattttttgaagttcatgtgaaaatatgtatttccatgctcttaaaaatcaccagtcttacgttgctctctttctaattttccatatggcagcatatgattttgctttcaaacctaattctgacacactttacaggcattcataaaaagatctgcagaaagcagtaggattcaaaatctactaatacatgaacaactgtgcgatcctggagtcaaaaatttcagagcaagtaggcatcaaatttttctagacaaataattcctggaacaggtttgtggggaagtagatggatagaagcaggtttatatcaagcaataattgaaaataatcagaaacagcttagatgtatccatctctcttcttcttcctgtacctctccctccatatttctctctctctctctttctctctctctctcctttctctgtctctcatgtcctatatttccaaatacattgacttcaatgccgtttttaagcttgagtacatataaataaatgaacaaagctgaattttaaaacctgatgtcacttgtggaggttaaagacaatgaaatgctaaagatgaaagaaattttgctacaatatgcctaatattgtagatatcactcaggtatttgggaatggcaatatgggcagaaatactggaaagtcattgagagctactgtcttaaaatttcacaagtgtaactacagcagttgaactaatcaatggtacacaggttatttttctccactctttcttaattatgacatgggacaaaattgttatttctccattattattacacaagaaccagaacaataagattgtaattagaatataataaatgcagagtttctagtagaaaataattttgtctttagtaataaaggaaaacacagacttaaaaattaaatggtttatgtattttgaaaacaaattcatatattaaatgctgttaaacatgcaaattattataataaattagttttaaaattgaacattatgcttatatcattttaaatatatttctatgatttattgtaaagtaattatcagatcaaatatgtttttgaaacaagtattcaaacagaatggggtgcagtggttccatttttatagaatactgctgattttcacaatgatattggcttttgtgtggctaaaatatagctacaaccacaacaatgaaactttataaatctgagtcatattttattatatcaataagtcatattttattgcatcaaacaaaaaaattgatttctgtttgtactcagttaattaattttgctttaacttctgaacaaatcacattatgctctaggaaagcgaaagaagagtacaaagttccctcagagaatacttccaaacatgtatttaaggaggaatttctcagataataatattattcctctttgtgctgctttatattaagaacatttttctatcttgatttcttttcttaacagcagtattttaaggggagtaaaaatgatcagtatcatagtaatatattctagatattaactaaatgctaaacattaatattgagttgacttcctatttttagaaaacagattggaactgaagcatgaaatctgttgtggaaatgagttaatctcatcacttttactttttcatagaaaagaaacataaataaaataaaatatttctaaaagttagttttattaaaatttctgatgatatccatgaatatataaactaatttctagtttatttgagcaagattattaaacatattttaaagcatccatttttaataaaatgttaaaaagaacatacagtcacccacaatataagcattttaataaaaaatgttttgatgtctgaatatatttttataaaatctattataactctaaatattaaataaatcattggtgatgtaactatattaattcatcattgtattatgcaccataaagtcataatttctagttacttatctgtaaaaatgtatatgtactcctttatatatgtttgaatttagagggctgtatttgtataaaaatattaacccaaacattcatgcatctcttacttgctttccaaattcttggcctatttatttatttgttcacattttttattagtaatgtgtggaagagttattcaaatttttgcaacatttaccaatatcactgtttcagtttttcaattcagcttaatctataaaatataattgtcaacaactaagagttacagattgtggctggtggcaggggaatctctaatcatttattgttcacaatttaatgagtaatgtttgaacaataaataagtaaatttaatgaatacattaataattatgagagaattcttatatgctatatagaaacaaatatactattacataggaaacattgccaggtacatatatgtgtaatcagaaatgtttaactggaaacaaatgagcgtgagagtatatgtgtgtaattgtaactctattttattcatagttttaaaatcatctaggttttatctggcactattcctagttttagtaaaaatgttcattcattttagtatcttttacttagaaaaaataaatataaacaaagtgaaaattaaataaaaatatttctaaaacccaggattattaaaatactaatggcaacaataaatattttatgtttagaaagagtagagaggtcagaccaagtgagcattcacttacaatttacacttggttactgaagatttcgtttgctttaattactccataaatcacttcttttctgagtaatgatgccctcctgtgaacaaaagttgcatctttaatagcacgaagcaagaataaactaaaaaaatgaatccctgcataattatcttaaaataattgctaatcaaataaaaaaatcactatccaattgaatgtcagatataaatgattaaaaatgtaaagacaaaatgtgagatgagatagtattttctagcaaataagctatagggtattgtaaggcgtgaagaaactgcactatttgaggaatagaatagtctcaaaatgtacctattaattagatttcttgggtaattaaattttagccaaaaggatgttatttcaactagttttgttttcttttgttttgttttttcactctgttgtccaggctggagtgcagtggcacgatctcagctcactgcaacctctgccctccaggttcaagcgattctcctgcctcagcctcccgggtagttgggattacaggtgtccgccaccacacctggctaattttgtatttttagtggaaatggggtttcaccatgttgtttgcgctggtcttgaactcatgacctcaggtgatccacccgcctcggcctcccaaagtgctgggattacaggtgtgagccactgcgcccggccacaaccaggttttaaaatgcacaagcttgcactagtttgtatgagtccatatatttactcaatagtttattttttttaactggggccttagcattctatcaatgactcgaattccagatattgatatttttggggtaatatgtgtttatgtggatatactaggagtatatgttagctggatataccaggaaattttctcttttctgataaaatccatgatagcagtgctttctttacctgggtaaaggctaaggtgtattggctcatctttctaggcaagtgtcacctttccctcagcctcaaattttggctcaaggatacattttcttctatatttaacattttaaacaagtattggttattgaatatcttaattactgaatgtctgtaaatttaatctatcaattcaaaactatcttttaggtagtaagtatgaatagtttatttaggagtacaataaatttgacgtaatttttctttaaattgacctaatttttgactggacttttgattttacctractgtaagaaaatactgccttagttgtttgtagtgccttcattaggtttgaaagcattatgctatttttctgtcaacgttgtacacctgtaagtacaaattgttatcaaatgttattgttaataaagaaaaagttaggtgcacatgcactgatttcatttgggaattttgccccgtctcccctctgctgctgaggacccacaatgcctgtgtctctcctgcttacaggctcacaatcactgcgcttttccccagccatgaagttgggttcttctcttgctattaggcaaattccatctggatgcttcttttcagaggtcttcttctttgcttacagtttcctcagagcactctgtaaaatttcctcaatgagtttacacttctggaactaatgctgagaaagggatggttctaggcaaatgccttctttccagtcacaaacccgtccagaagcaaagatgcagagtaattgctgttagaatgagagaagaaaaaggtcaaaaaatgtagggagaataaaataggatatgtgaaattagaatttgtgtgtcaaaaatgggcatactatcacctaaatatgcaaaggaaataaagctttttattctgtataatttatgtactttttctcttaagtcccacaacctgccctcactctttatcctgatgtgggttaagaggaaaaaaaaaaaaaacaaaaaacagtttaaagcagcatgtttctttgcattaaaaattttttttcttccgtgtaaatgctcaaataccaaacctgtatgatatctggtcctttccaagatggtgtttggatatatcatgggaacctcaaatacttatgatattctagttgttgttgagtagctcctttgtttttgagcctgcattggtgactggatacttgttctttctgacttttcagagagaatttttggcacctgtttttggcatctgtggtcttggtcatatttctcatgtataaaaccccaaaatacaaaggtctcttggtcttaaccatcacccttgaacctctcagcacctacatgtccccttactagagcacaccgaaatttctgaattcattgttatctatgtttagagttgggagagtcagaagagcttcttcaggcttatttttctggcaacttcccaataacccagtgatgctgttgcctacacaatgggagaattggttatacagtgcttttttttctagagcagtatttttcaacattgtctgaacattaaaaacactgggtatttgtttaaaaatagggatgcccaggccctagattccatttttttataactgaacctagagttaggattagggtcagaaaatttgaacattaacattgactctctgaacgcagagattcaattttattagtctataatggggcctttgtacagacagtcttgggcttgccaatttctatttctctgtggcttaggtttctcaatactgtatgaaacttctttctgtagcttagcaataatggtttcagagatataccttcaaaactatgggatattatctgtgattcagtcaaccaggattggttccagatatgtgaatggaagctaatagaaaatagattctcatatctattttttgcaaagcctgagttttaagatgatttcttttcggtatgcttttaagaaagaagcaaaacccaaaataaaacttctcattgaaatttaaatctagttttttttgaattattattccatgtagcatttgccctccctcttctccttaggttcagagccttatactaggtctttgattatcagcaaacatgattcatgggaaaaataaaaattcatcaaagtaatagactccaaatgcaattgtggctaccatgtttgttttcaaatatatccaataacagtcattttatgcattcatatattctagtagttaggacttccagttctaccatcaaataggtagtattctaccttagccattcactagtttattacctcagagtagctacttaattcctgtgcctcagtttctttatcttctggagaaaagcactctgcattttctgtgatagcattcaagtactttcagtacatgtggtttgcaagggaatggtctcactaacagctcaaagaatgaatgacaccacattataatggttagtttgtaccctttagggccagataatttytgatggaacccaaattctgcaacttaacagatggttgaaaaaggtcaagtgaattaacctctctgtgtgtacgttttctcatcaatataatgtagatagtaatagcatattatgtgttgcagttattgtaaagttataagttaatctattcaaagtttttagaattatggaagtactgcaagtgttcactgctctcattatgtttatcatctttattactactatgcacacaattatattgttataaatagtgcaaatcctttaacacatgtcatctcgattattacaggaacgagtaccattcaattcagtcaaggagaatcaagccaagactttaccatgttcacagataaaacatgtatttatctttcctctgtatctagagttagttgagtgttcaactgggctgaaatagctatcctgtgattgtgaggagttaggtactgacaattcatgaaagaaaggggattcaaggtagggacttgaaactgtaaatattgtttacatgttttaagcccatgcattaaactgccctttaagacaaccctcttccaggaagttttgtttatgtgagcccataaatttcctatttgctgaagcaaatatagatcgggtttgctgttcttgtgtgattaaagagtcctaagaattacacagcctgttcatatagtagtctagtgaaggttgagtgagataatctacacagtgttcagcacagaatttggcacttagttctaaatacatttcagctattattagtagcaaagttattgtttaatgttagcaagaagtgtcgtgaatacctaacatataagtcagttgacattttaaatcataaaaataagtcctttgcttgatattgtttgtatcctgagtccttcctactttcactttgctcttaaccttttatactatttcaggaaaattacttcactatgaatacacttcttgtgagctacacattttcaagtaattgaaaatatgttcttcatgctctccagaaataatctaatccttgatttctcaatgtaaattgttgattttatacattggctacaaaagtatgagaaacttattctttccaagaatcctttccaagcacagttactttgtacattgacaagatttccttcaaaagatagcacagcattttctacataatgatgttttgaaataacatctattctataataacattttccactggacagatcttttgaatttttattccatctttgaaaactacatgtgagaaatagaatcttgctttattctgactcctaacacctatgtgaaaatgtcatagaatgtaattctgttggtttctgaataaagtactttagttttaagcaacataaattgactctggccaaattatggaaaacaaaaggaattttttgacaggatccatggcaactcctagatttaaaggaaaagaaaaacagtccttgtataggacaggaagtagagaagtttgtagaaatgagaaagaaatctgttgatgtcattgtaattggtgcttcagctccttccatttttttctccttgggtcaatgattaaggttcaaatttctgagagacaagatcaacatgatttgcagtgtcaagggatagttcaaagataattcaggatgttttaccaaaaaaaaaaaaaacctaataatgaataaaattaaagcatataaaagatgcaggctaactaaaaacagatacccactgtaattcctaatctaaaccccttaatttgatatcctatgtattacatatatatatcctatataatacatatatatgtgtatatgtatatgtgggtgatatatatatatagcacccataaattttaaaatatatatataagtaaatacatacatgaaaatgaaaactgaaaagaagagaacaaatctccctacctcatgaatctgatcattttgtcatgtctcttcttctgttatctatccatgacctattctctagacaaagttcaaagctttttaaaatctaaacacagtccacactttcctaactgcagtcttttactctcccttggccaaaggtattcctctctctttactaaggctactcaggagactgaggtggaaggatggcttaagcctggaggtggaggctgcagtgagctgtgattatgccattgcactccagcctgggcaatagagtgacatcctgtcctgaaaaacaatgtacaaagtacatcattctactataagttctttatagaaatctccatactctttcccaaagaggttgcactaatttgccttctcaccaacagtgtatgaccaatcccttttctccacatccttgccaatagctgttgttttttgactttttaataatagtcattctggctggtatgagatggtatctcattgtggttttaatttgcatgtacctgatgactagtgatgttggacttttttttttcattgaatccagcaatctcactactggatatctacccaaaggaaaatgaattatcatataaaaaatatccatgcttgtatatttattgcagcactattcacaatagaaaaaatatggaatcgactcaatcaacagactatttatgcatacacatatacaaaattgaatactaagtcataaaaataatgaaatcatgtcttttgaggcaatgtggatggaacttgtcattatcttaagtgagataagtcagaaacagaatgtcaaatactgcatattctcacttataagtgagagctaaacaatgtgtacacacgaacatagagagtgaagactcagactagtgggagggtgtgaggggggtaagggatgagaaattacataatgtatgcaatgtgcattactttggtgatgcttgcactgaaagcccaaactttaccactatgtaatatatccatgtaaccaaactttacttgtgcccaataaacctataaaagtaaaaaatacaaaacatacattgtttgatgggcctgaagcttacaattgaggggcataatcaaagggtgaacttattgattaccaaagaagatttaattcagttcaatacaataaatatttattttgaaagttgtggaaagtattataaacaaaattaaaacattgttggagaaaatttcctgttaaaatgtttactacctaattaaggagagaatacagagaataagctcagctgtatgtgaacaggattgacgtaagtaatacagaagattattcctttaaaacttcaaagatagagcaattgagctcagacaagaagagatgtcttcaaaagggcaccagcccaggccaagatatattttcagccattgtagttttccttgacacagatatttatcaaagataataaatagtatcccagaaaaaaaaaaagtttgagcagaagtttggagttaaaagcgaacctaggatattcagtgaaaaatgaaacccctgaccaactgagacagattgttagaatctcaccaacatatttaatttcttgacatctttgctttgttcttgctttcttctgaaacmaaaaaaaagaaaaaatattttactgacatcattggttaatatatacttatctttcaaagctcaatttctactatttcttttgttagaaacctacagattcaaccatttgttagaaacctacagatttctaacagatttctagcagatttcttttgttagaaacctacagatacaaccaacattatctgtgttcacaaagcactttatgcataaatgttcatagtatctacracattgcatttttgtcagctgtttatctgttagacttcacctgctgctttttttagtttttagaattcaataataatgttttagttctctttgttctcctaacatgtaacatttacctgccatatagcaggagtgaaagttgaatgatcgtaaacatagaattgctgtaacggggaattatagtgttgtagacaaagcaggggagcaaagttgtgtcacatttggggaatttttgcttaacgacccaagaagaatgaataaatggaaatttaagttgcatactggttttttacttggaatgtttctttggacattttgtaataaactctaaatcaacagagaaaatgggaaaattttgggtacctaaaaaattctgagcttttttccaaagattattatgttatattatattacattatattatacatatacacatatatacagtatatataaaaaatagtgtaaccctatagcaatgttatacaaaattatattcttcttcctttaacagataactttaacatcaaaacactgaaatgataataccttttagttaactttatcatagtgaaactgtattttattgactattgttattttttattgaatataaaatatttttactaaaacataaaaaaggttttaatttgttccatattccagaaaattgtgctttgtgaggtttatctaacccagatataattttcatgacatttgcacatttctgcatggcatttcacttttccttcaagacaggaatttaatttctaaaagtatttaattttcaggaagaatttactaaatagttgtgcttatactttaattgtgttaatatttttcatgttttactttttgaaatactgaaacatttgttcaatttagaagttaagaaaaaaatacacaaaaataaagaatagatatttcggtgtcagagcaagggaatattgctgttcattatcttggaatcaatatactgaactcagttttccagcaaatagaggcagacatttgtgatagcttagttttctcatatttgaatgataaatagtgcatgaaatagctccataatttagcgactgtatttatagagttattcctggcagctaatggtgcctttcatttgatgaaaccatgtaaaggaagataatacaaagaagaatttttttagcagttaacaaatgtccactcttccaagtttatatcatgcattgatcagaaggtccaaatctgtctaatcccaagagcatgattactgatatgaaactgatatggtttcccatatcagtccaaagctccctacaatcatttccctttctctgtattgcttgagttagtttttcagaactgcatttgatattttccttcctctaataatccttaccctttaagtaacaggtatgagcaaagacattgaccttcaatgtctttttctttttctaagattaagattagctaggctctgtgttatgtgatcagtctttgcttccttcagggctactctttgttccagctaatctagcctcctttttttttttcttttacctactgagatattcattcattaattcatttaatgaaagtttttgcctatgttctgcctctattttatctcttgtcatgattttaacttcactcatctaagagaggtaattagcgttaatgagatcacaaggatggagccctaatcctctaattacctttttcacatatgtgatcagtttttgtttttctggttcaattgtaaactttatgaagtaatacatgacattccctttttgcttgccaattttgtattctctatgctaaacccaatactcaattcataggaaaatacaagagtaatgaaggaaggaatgaatgttttggtggtctgcatgctaagtttactgattatgagagaaggctttctaatctagtcacagaaatcatgcatcactccatatctctttttccatctcctgttgaaacttctctaaagacaggcttgtcagtctttgggtggaagaatmgttgcaacaaattccccttcctaattacgtactaggggaacgatagcattatttaattgcaatgaatatactggataatcagttaggcaccatcaggaatattgtagatgaatatggtaatggaggtggaggtggagtcatggcagaccaaaagttcaagaccttaayatacatgtacttaactctggtcaccttatcaccacaatgccctcaaatttaagctgtagaatcagctcaatgaatgttttagggcatgtgaatttttccttctgtattataaggaagattgataaagtcttccacccatagtaagcagtccttgatgcccaaaagaaatagtcggccagtactactaatttattccttgccagtttgaagactaaattgatttcctttatattatatattgtttgagattgtaagtgtaccaaaaatttttttcacagaaatgattagggtatatgaaatttggtcctattatcatttttaaaaaaagaaaatgagtgaggctttttagttggtcctccaaaatacaaaacttcaggatcaaggtagaaagtgcatttagtcttcaatttttaaaagttcaaaacaactacatcaggcactgtacatataatgaaaagagaaaacaaatatggatcttataatctagtgggagagacaaacaataaccaaagaattacacaaataaaaataaaattgtaattgtggtcattttcttgaagggaagatggataagaagctctatgagttcataatatttttctgtcctcctgttctgatcttcttctgggttgtgagagataattgaaatgatgcatgtgaaataactttttaattacatcaaactgtgtaaatatatgacattcatactaataagtatttccctttgtcaatcaaactttctttaattatgtaactccttctgggtttaatttttcatttaattcttatggcctttcggtctttatgcatttaatttgtatgtattatgactatgacatcagaatcctcaaaccagtgttctcagttttgtggaaaaagtgaaaatgatgatggaatcacacacttttctggctctctgaattatgaatatattatcatttttcttaaaattataactgatgtctttacagggtgtaatgaagctatgagataatttaggaggacataacataaaaacacagtccttactaggtctgttataaattatattagtctgctgcagctgctgtaacaaaatactacagaccggtttggattaaacaacagaaatgtattttctctcagttctagaagttggaagtccccaagattaagatgctggcggggttggtttctgaaacctctttctggcttgtacatacgcagatatccaatttctgactgtgtcttcacgtagcttttcctctgggcaagagatcattggtatctctttctttttttaaaggacaccagttctactggattaagttcccattcttatgatctcattaaccataattatctccttaaaggccttatgtctgaaaacagtcacattgggagttaggccataacaaataaactttgagggaatatgattcagttcaaaatataaatcttgcattattttaaaaaactcatttacactactaataacaacattcgtgagatatttatattaaccctattccaaataaatcctaattttaaaattgtctatgactaggtctggggcgcggtggctcactcctgtaatcccagcactttaggaggccgaggcgggaggatcacgaggtcaggagattgagaccatcctggctaacatggtgaaaccctgtctctattaaaaatacaaaaaattagccgggcgtagtggcgggcgcctgtagtcccagctacttgggaggctgaggcaggagaatggcgtgaacccgggaggcggagcttgcagtgagccgagatcccgccactgcactccagcctgggcgacagagcgagactccgtctcaaaaaaaaaaaaaaaaaaaaaaaaaaaattccaaaaaccatttagccaggcgtggtggcggatggctgtagtcccagctactcagaaggctgaggcaggagaatggtgtgaacccgggaagcggagcttgcagtaagccgagatcacgccactgcactccagcctgggcaacagaacgagacgccatctcaaaaaataaataaataaataaaaagtctatgaataaactttaataaaagtgtggagtttttttcaaaattaggtaaaatagaaaaaacaattctgtttttaatttttgtataaaaacactttaagagtgctagacactaagcaaacaattctatacaaacctacacaactttaggttaaggcatccacaactatggaaattatccagctttaaaaataatttttgaataatttgtgtcaaattctagatttgttatctataggaagtaagaaatttatgatggaaaatgctgaatattgagattattgtctaaaatggtatcactgaatggaatttctatgaggacagggatgttgtcattttttttttctggccaccgtaagtgtctagaaaagtgccttgtccaaaataagtattataaaaatgtttctcagtgaataaattttaatatcatttactcaaattagcttcatttcttatagcacttcacaattcacctgaatcttaactatattaccataatgtagttaaaaagagatgtggttttaagaatctacacagtttttggtagaatcttctatactatcattttcttttgttctaagtcaagagtgctgagttctctcaatacttatatctacaatttatacgagtcagaatggctattacgaaagtcaaaaaaaaaagttgttgatgaggatgaggagaaaaaagaatgattacagactgttagtgggaatgtaaattattataacctctagggaaaagagtatgaagagttctcaaagaactaaaaatggaactaccatttgatccagcaatcccactactgggaatctaaccagtgtaaaatcaattattatatataaaaaaaatcttgtgcttgtatgtttattgcagcactattatatggcatagagctaagtgtctattaacagatgataagaaaaaggaaatgtgacatacatacacacacacacacacacacacactactcagccataaaaaggaatgaaatcgtgtcttttgcggcaacatgaatggaattggaggccattaccttaagtgtaataattcagaaacagaaagtcaaatagcgcatattctcacttatcagtggaaactaaacaatgtatggatatgtatgtagagtgtggaataacagacattggagactcagaagggtaggagagtgagaggggagtgagggatgagaaattatgtaatgggtacagtgtgcattatttgggtgatgtttacactaaaagcccatgtattagttctttctcacactgctataatgaactatctgagactgggtaatttatggagaaacaccttttaactgattygtagaactgtaggctgtacacgaagcatggctgagaggctcaggaaacttaacaatcatggcagaaggcaaagggaatccatgcacatcttacgatggtgragcaggagaaagagagcaaaggggaagtgctactcacttttaaacaatcagatatcatgagaactcactcactatcatgagaacagcaagggagaaatctgcccccatgatccaatcacctcccacccgcccctcctctaacactgaagatcacaattcaacaggagatttgcatgggaacgcaaaggcaaaccatctcagcccagacttcactgctatgcaatatataacaaacatgggatttatattacttatgtaataaaaccacacttgtaccgctgaaatttatacaaataaaaaaatttctaatgttgaccaaagatctaagattcatggcttttgagttagagaatttaaattatataattaatgcagcctaaattcaacttcaaagttaaggttaaagtcttaaacaacaaaaatttaaaaaaatgtgattataaacattctttcaagttttgaggttgaatataagtctataattaaaaaataaatggggaattggcaattatattatttcattttataggaaagctgtattgcattaattttggccaaccttcaaaagtagatattactatttattacaagtgtatctttttatttttataatattattattttttatttttatttttgagacaaagtctcacactgtcacccaggctggagtacagtggcgcaatctctgctcacagcaagctccacctcctgggttcacgccattctcctgcctcagcctcctgagtagctgggactacaggcgcccgccaccacgcccggctaattttttgtatttttagtagagatgaggtttcaccgcgttagccaggatggtctccatctcctgacctcgtgatccgcccgccttggcctcccaaagtgatgggattacaggagtaagccaccgctcccggccttttattattattattattattattttgagacaagttcttgctctggtgcccaggctgtagtgcagtgtcgccatcatggctcactgcagcctcaaacttctgggctcaggcaaccctctcacctccacttccccagtatctgggactacaggcgtacactaccatgcctggctaatttttttttcaattattttttgtagagatggggtctcgctatgctgctcaggctggtctcaaactcctgggctcaagtgatcctcccacgttggcctcccaaaatgcttggtttacagatgtaagccactatgcccttccttgatgatttctattgacagataataaatagttttcacaaaattctcgagaaaaacctgggccatacctcaattgtttataattttttactctgccttttaacaatttatattttgtcttttatatggggtaattagaatgagaatgatgtaagggaagagtcctaagtttagaattgaacacatctacatctacattgtaattcctgacagctaagctgcttaccagctgtgcgttttctggcaatttatatatcctttgttttcccttcaagaaaaataacagttgtttttttttttttagtgaaattgtatgtataatatgtatatatttatattatataatttaaaataccaggcacaataaaatggctctcattatattcttttagtagaggttttgtttgttttgttttgttttgcagtagttttgttttgttttatatggaaccggttatttaaacatttaagtatttgtctttgtattatattaaaagtgatttagaatttcttgacaggaaaactagagtaactaatgtaagtctctgtaagtaatagaattcactgcattctatgcaggggaatttgaaaagttttgaaaacataaaaatcaatgttacatgttggtagaaaagctacgtcctagagatactgttcttaatattggtatatgtgcaatttcaaaacagggatgagtcaaatcacataaggctatgactttttccttatttgtcatttgcaagcttagcagtggtgaggatgttggagataaatgtaagaaactaggccatctttgctcattttgaatatagtggatgcctctttccttatacgattgttaaattaacccttttcaggttgccaggtctactgttttaaattatgtacagatagatttttgtaagaaaggaaaaaaattctcaaagaagtgtgtacttgtgtgtcttttrtagaatgcatctaaacaagttgtctaaaattatacatcttctctttatttacgcagcttattctcccttttttgttatctcagttttctttctctctccctgctccacacacttgaatgaagattgaaaactacaaattcttttcagtattaggacctctgaagttgatcctgatgttctaaatacattatccttatctttcgtcttgcttacgagagtattatcctcatttttatatgatagaaagctgctttgaaaggaaaaggccttgatgcaggccaagcaatttgtaagctatggaggtgagatatgaatcatagttcatctatatctctaggctgtatttatctccttacttctagagaaaaaggaataaggaaataaatgttaattcaatgattttaaaatatatttattatcattataaagactgagcagtattattcaaaattcaaagttttgagttctgtataggtagtttgcgtatatataggagatggacatccctgcacagctactttttcctaagtttatcaatgtttcttttaagatttaaggtaatccttctattccaaatatgcagaaagcatttgaacacatacttcaaagaatttctggagacagccaggagtagccaatcaacttaaatccttgtatgtcctcctgggctgaaatgcatgtttccttcactatatatttcagttctcctgttcctctatctcagctctctagttttccaaaactaacacccttgaataagagaaactctgtgccaaagactacttggtacatttccaaccacaagattcagagggtctggctgcctctaatttagtattgccaacatacccatcggtgactcaagccaaacagagaccacgccaggacactttttaatttgccaaagcaactygtgaaagaggtaaaccagtccaattctgataaattatctgcaaacaaattagatattcttacagcaaggaagtgtcaatactgtaaccaagcagaggtgacagaattcataacatgtttcaacagaatatatcagaaaaattattttgtaaccatggtaaatatattaaatcattcttccagcattttgttaagcttgtatttggatttaatagccattccacaatgaatatatacttcaaaacatcatgttgtgaaatataaatacctaaaattttatctgttgatttaaaaaatacattaaaaaaatttaaaagaatgggctatatcactaaatataacacactgttgtgatttggcaatttgccattgaattttttatattagtcttgccaaattagataagttaagcctctaaatttatttcacgaagaagtgggtaagtcctagatagctactaggtacaattttatttggctatatttttaaattagtcaaatagatgatttttaaatatacttttatgttgcattgataatagccagtcaaaaaaattgaatcatttaataatttatgtttgtaggtgcattttagcaatcatcctttaaaaattctgatatttatatgtctcatttgatttgaatgtattcaaagtgtgagaaggaagtaatctaacgtgtacaaaacactatactagatcgtttcatacattttagccaattattactcacaataattttgcaaaacattatgcatattttatagatagtaaaactgaggatttttaacatacaaggtcataaatcagaaggtaagtataattctatttagtacagtaatttgaattctccatcagcccatacaagactttgagaaagacattgctctaaatgatcacttagaaagtagggtattcatcctctcaaaaggctgtttagttatatttgagtaagttttatttcccctgttaagttataaaaaagttgaagggtaacatggtatcttaaatttattcttcatatcaacttacaattaacctcatacatggaaacatttatacraatttaagccaaaaagaaaaaaaaaactgttataagtgttctaattcatctttaagttttagtaacattaaattaatataatgttttataaatactcaaatgcaatatattcaaaactattttttatcattcccatttctgctctctgaaacagactctttttcaaagtgtcctaccatggcaagtatttccattatcaatggtccctgagctaaaacacatttaatcttatattggcttgttttagccaattcccacatctactcaatcatcaggctctatagattttattctattattagtcccaaattctcactctcaccactttagttcaggtatttataaaataaacagaaacgtcattgattttatatgcaaatttctgaaattttaaaagtcataagttattcgttcagtcaaatttttatgtattattctcgaattgttttgcaaacaaatctattgtgcaatataaaggaaaaaaataaaatcctatgattgataatgactcaagtaattacaaatatattatatatatatatattcagggtaaaaaagaagaaaatcaaaactttaaaagtttagaaaaatagaaataagtgaagattcagaaatagtaaattatttggtctagcaaatgataagtttgtgcatttgagcaccattatcctttttctttcaaaggttactatccatgtggtaaataaatagcagtgcttctgtgagaccttttttttaacccccttcaaaaatgttaagttccccttcctcctacctgtagcactttcacataccattttgatagcatttataaaaactttagtttatttatttgctcatatgtctgacatctgcatgagaccttcacctcctggcaagccaggacaatgcctttgtgcatctgtgtttgtactggatactcagcaagcataatttttaaataattaaataagtatatatgtatttatttataaatattttaattatatattagatcatacatcatatatgcattgcttgtataatacatagcattgttatctatgttaaatatatatatatgaatttaaaaatggatggatgtgcttatgttcatccacatggctttatcttaagttttagagttttatactatgttcagtaggatggtaaatactttgtaaacatgtccaagttaaagacacagagaagtgactcaccagtttgctaattcacaggagactgagagattgtgtctgtgcctgtgtgcaaagcattttaaacaatcagttgcaatgtctatttcatggctctttttactaaatagaaaaatccatttactaaaggcctgttgctttttattatgcaatgtatatgtttttaaaagacaaagctttggtatgtttacaaaagttagccactaaacaattatttctgcttaataatacttgacctacggataatctattacattgattcttttctctcagatagttctcttttaaatttgcaagaattggttgcctttgtgtgttactttatcatgtaatgaagtactcatgagacctcattatagaaccaactctattttcaatcattaaattagtgctcttattaagatgaagtatgaaactgcttgaattgctgctttcttcaaaatgctttttaaaatatttaaaatccttttgaatggtaaattaaaatcttttatagtaataaagaatcatattaacaggttaaggaaagctaattggaattaaattgataaatgtggtgaattattttatatacaaactgcactgatgcaaacatgatttcttttctacaggagaaaaatatgagaatagaataattatagtcatttgagaatgcagtcaagcccaacagtgagacagataacttttcaaagaaatatatcgaatatacccgtatgaactgatttcctttcatctatgtttaggtgcatggctaacagaaaagaaagaaagaaagagagagagagagagagagaggagagagagagagagacagacagaaagaaagagagagagagagaggagagagagagagacagaaagaaagaaagaaagaaagaaaaagaaagaaagaaagaaagaaagaaagaaagaaagaaagaaagaaagaaaaagaaagaaagaaagaaagagcaagccttagaagttactttttaaggctagctgggtgtggtggctcacacctgtaatcccagcactttaggaggccaggtggacagatcactcgaggtcagaagttcaagaccagcctggccaacatagtgaaatccgatgtttactaaaaatacaaaaattagcagagcaggatggtgcacagctgtagtcccagctgcttaggaggctgagacgagaggattgcttgaacccaaaagacagaggtcgcagtaagcccaggtcatgccagtgtattccagcctgggtgacaaagtgagactcccactcaaaaaaaaaaaaaaaaaaaaaaargaagttactttaaaaaaatgtgaacctgttaaactgacatgttttagttaaataaaattaatgtaaaataatctatacttaagtattttacataaacttatacaatgtggaagctttacataatatacattatatgtaattacaaagaagagtttaaaaaatcctttccatgaaagagctcaaaattaaaagtgtacaaatatatacacacacatgcacacacacatacatatatcacttgtcttataaatagttaagagatatgaatataaattattagatttattatacagtagaattatatgccttgtggtagctataaatatcaaattttctatttccttcctactcagcagtaggaaaatagtaagataggaaaatattaattcctcagtaggaaaatattaagaagtttttggtttgtttgtttgtgttggttgccttctatattagtttgctagggttgccataacaaagtatcccagaccagtggctttaaaagtataaatttattttctcacatttttgagggttgtaagttcaagatcaaggtgtcaacagggtaggttctttctgagggccaaaaggggaggctttttccctggcttacaggtggctatcttctccctgtgttttcatatcctcttccctctgtagatgttggtatgtctacatttactcttctaataaggacaccagtcatagtggactaggtcctactttaatgagctcattttaagacatcagtcatgttggattaagacctaccccaagtaactcattttaacttaattatatctgtaaagtgaccatcaaatatagtcacattctgtggtactagggattaagcctgcaatatatgaattggaagggggaaataattcagcccagcccacagcatgtcatgctctgccccccacaaatgtatgcctttctcacatgcaaaatacattcaccccatcccagcagcccctagtcttaactcattccagaatcaactctaagtcacaaatctcatttaaatgccatttgatccacgtgtgggtgagactccaggtatgattcatcctgaggcaaaattactctccagctgtgaacttgtgaaaccagacaagttgtcttctttgaaaatacaatggtgggataggaattggatatacgtttcaatttcaaaaggaagaaaacagaaataaagaggttatgcattccaagcaagtccaaaagctagtagggaaaattctatcagattttaaatcttaaaaattatcctctttgactgctctggagccaaatcttaagtcctctgggaccatcatggtagcagtcctattctttgggccccctcagggtggcagcctcatctcctcagccttaggtggcaatggcctgttcctttgaaactttagaggaggccttgccatttagaaccaaggaggagacaaacctactcgcgggcctgttgtagtggcagaaatgccaacttctgcactgcctgcaaggtcattcaatctttttattaagggataatgcacattcacagccaattaatctgcttttccctcctgtagaattttgttccatccgtttattttgtttcatctttattttcttcagtacaagctgggtgtgtttcagcatgtatcgaattctcaaaaaacttttctggcctaccatgcaattcacagacgtccaagccatcaaacatgaggacagtccaggaggatccttcacagatctttcctggataaccacatcttcaatcccagcttctggtgagatggttgaatagacccatgagccatacatacaatctctttagcaaatggtcattcagccacaaccttgatgtttcctccagaacaggttttctgattttttgcagtatggatatgctgaggattttccatatcttcagatactgcttcctttttgtttagcaattctttcttccacttatctctctcctttagtattttgccataagcaacaaggagaaggaatactatcaatactttttataaaaaatacaaatcttatcagctaaatatccaaatttataaaagttctattttccacaaaacactagaacacaatttggctaaactttgcattactgtataacaaaggtcgtttttcctccagtttcagtaatgtttctcttttccctctaataccttaccaaagcatctttaacattctaccaatattcatacacacacacatacacacacacacacacacacacacacacacacacacatatatatttatgtacttttttttacataaacaagttggtctcaaactcctggcttcaagtaatcctcccaccttggcctcccaaagtctgggattacaggcatcaaccaccatgcccatccttacttacattctgtacacaatgacatatatattttttaagaggatagagactttttctacagctatctttttttttctgagtccttaccagagattccttcaatgaccatatttctaccatcaatctttccaaggaaatctagactctttgtaacatacattttacaactcttccagcctctacataaaacccaattccaaagccactttcatatttttcaatgtgtgttatagtagcaccccacttctcagtaccaaaatctgtattagtttggctagggttgctttgacaaagtgcctcagaatgagtggcttaaacatcagaaatttgtgtacaattctgtaggctaggagtctgagatcatggtggtgacagggatggtttattcagaggcccatgaggaaaggatatgttccaggcctctttccttagcttgaatatggctgtcttatctccatgtcttcatatcatctctctatagatctgtacctgaattacctcttcttataaggacaccagtcatattgaattaggactcaccctaatgacctcattttaacttaatgatctctgtaaagaccctatctccaaatacaattacattctgaggtattgacwgttatgaactcaacatatgagtttggggaaggagacacaattcaacccacaccaccttccttcaagctcatgtcatatttataataatatatcttataactaaagatttctagaaaaacaacttaaaatttatacacttaattccaaaattattattttttccctttttctaatttgacacctaaatttcaaatagggaagattaagattattaactatattcaagaataaaactttggtcctcatattgaaagaattcatacataagttgatgcttatggtgtttaacatatattcctgaatcatctgaaattcattaccattttctatgattactacattatctatgcaaaaacacagccaacaattatttttaaattgtcttttaacttccttctgcaattctacttctatggatcatgtataatatttaatatgttttgagaggcctaaaatatatataaagcagaaatcatgggaaaccattatataatgtttcttgaaacatttgattatttaacaaaatgcaaacaacagaatggtattgattagataatatttagtagtcactactctctagtattgtactaacactgggaaataaaaagattaatataaataatacatatattttcaaacagtttaaagtctgcattcatataaatttggtagaccaggtatataaatacagtcactgctccatatctacactattgttgccaccataaatggatatttatattaaaactgctttttccacctaattgttcatagaatactaacgttctatgaaaaaaaatagtctctgtttctgaatataggctaaatcatcctcatcagatcataagaattaacatcatatactaatctwttgattataaaatttttaatggaataaagctaataatgtcattctttttttattttattattattatactttcagttttagggtacatgtgcacaatatgcaggttagttacatatgtatacgtgtgccatgctggtgtgctgcacccattaacttgtcatttagcattaggtatatctcctaatgctatccctcccccactccacaccacaacagtccccagagtgtgatgttccccttcctgtgtccatgtgttctcactgttcagttctcacctatgagtgagaacatgcggtgtttggttttttgtccttgcgatagtttactgagaatgatgatttccaatttcatccatgtccctacaaaggacatgaactcatcattttttatggctgcatagtattccatggtgtatatgtgccacattttcttaatccagtctatcattgttggatatttgggttggttccaagtctttgctattgtgaatagtgctgcaataaacatacgtgtgcatatgtctttatagcagcatgatttataatcctttgggtatatacccaataacgggatggctgggtcaaatggtatttctagttctagatccctgaggaatcgccacactgacttccacaatggttgaactagtttacaatcccaccaacagtgtaaaagtgttcctatgtctccacatcctctccagcacctktttccagactttttaatgattgccattctaactggtgtgagatggtatctcattgtggttttgatttgcatttctctgatggccwgtgatggtgagcattttttcatgtgtcttttggctgcataaatgtcttcttttgagaagtgtctgttcatgtccttggccaattttttatggggttttttgtttttctcttgtaaatttgtttgagttctttgtagattctggatattagccctttgtcagataggtaggttgcagaaatgttctcccattttgtaggktgcctgttcactctgatggtagtttcttttgctgtgcagaagctctttagtttaattagatcccatttgtcaattttgtcttttgttgccattgyttttggtgttttagacatgaagtccttgcccatgcctatgtcctgcatggtaatgcctaggttttcttctagggtttttatggttttaggtctaatgtttaagtctttaatccatcttgaattaatttttgtataaggtgtaaggaagggatccagtttcagctttctacatatggctagccagttttcccagcaccattgattaaatagggaatcctttccccattgctcgtttttctcaggtttgtcaaagatcagatagttgtagatatgcggcgttatttctgagggctctattctgttccattgatctatatctctgttttggtaccagtaccatgctgttttggttactgtagccttgtagtatagtttgaagtcaggtagcgtgatgcctccagctttgttcttttggcttaggattgacttggcgatgcaggctcttttttggttccatatgaactttaaagtagttttttccaattctgtgaagaaagtcattggtagcttgatggggatggcattgaatctgtaaattaccttgggtagtatggccattttcacgatattgattcttcctacccatgagcatggaatgttcttccatttgtttgtatcctcttttatttcattgagcagtggtttgttgttctccttgaagaggtccttcacatccctcgtaagttggattcctaagtattttattctctgtgaagcaattgtgaatgggaattcactcatgatttagctctctgtttgtctgctattggtgtataagaattcttgtgatttttgtacattgattttgtatcctgagactttgctgaagttgcttatcagcttaaggagattttgggctgagacaatggggttttctagatatacratcatgtcatctgcaaacagggataatttgacttcctcttttcctaattgaatactctttatttccttctcctgcctaattgccctagccagaacttccaacactatgttgaataggagtggtgagagagggcatccctgtcttgtgccagttttcaaagggaatgcttccagtttttgcccattcaatatgatattggctgtgggtttgtcayagatagctcttattattttgagatacgtcccatcaatacttaatttactgagagtttttagcatgaagggttgttgaattttgtcaaaggccttttctgcatctattgagataatcatgtggtttttgtctttggttctgtttatatgctggattacatttattgattttcatatattgaaccagccttgcatcccagggatgaagcccacttgatcatggtagataagctttttgatgtgctgctggattcggtttgccagtattttatagaggatttttgcatcagtgttcatcaaggatattggtctcaaattctcttttttggttgtgtctctgcccagctttggtatcaggatgatgctggcctcataaaatgagttagggaggattccctctttttctattgattggaatagtttcagaaggaatggtgccagttcctccttgtacctctctggtagaattcagctgtgaatccatctggtcctggactctttttggttggtaagctattgattattgccacaatttcagagcctgttttggtctattcagagattcaacttcttcctggtttagtcttgggagggtttatgtgtcgaggaatttatccatttcttctagattttctagtttatttgtgtagaggtgtttgtagtattctcygatggtagtttgtatttctgtgggatcagtggtgataacccctttatcattttttattgtgtctatttgattcttctttttttctttattaatcttgctagcagtccatcaattttgttgatcctttcaaaaaaccagcttctggattcattaattttttgaagggttttttgtgtctttatttccttcacttctgctctgattttagttatttcttgccttctgctaccttttgaatgtgtttgctcttgcttttctagttcttttaattgtgatgttagggtgtcaattttctatctttcctgctttctcttgtgggcatttagtgctataaatttccctctacacactgctttgaatgtgtcccagggattctggtatgttgtgtctttgttctcgttggtttcaaagaacatctttatttctgccttcattttgttatgtacccagtagtcattcaggagcaggttgttcagtttccatgtagttgagcggttttgagtgagtttcttaatcttgagttctagtttgattgcactgtggtctgagagatagtttgttataatttctgttcttttacatttgctgaggagagctttacttccaastatgtggtcaattktggaataggtgtggtgtggtgctgaaaaaaatgtrtattctgtttatttggggtggagagttctgtagatgtctattaggtctgcttggtgcagagctgagttcaattcccrggtatccttgttaactttctgtctcgttgatctttctaatgttgacagtggggtgttaaagtctcccattattaatgtatgggagtctaagtctctttgtaagtcactcaggacttgctttatgaatctgggtgctcctgtattgggtgcatatatatttaggatagttagctcttcttattgaattgatccctttaccattatgtaatggccttctttgtctcttttgatctttgttggtttaaagtctgttttatcagagactaggattgcaacccctgcctttttttgttttccatttgcttggttgatcttcctccatccttttattttgagcctatgtgtgtctctgcacgtgagatgkgtttcctgaatacagcacactgatgggttttgactctttatccaatttgccagtctgtgtcttttaattggagcatttagtccatttacatttaaggttaatattgttatgtgtgaatttgatcctgtcattatgatgttagctggttattttactcattagttgatgcagtttcttcctagtcttgatggtctttacattttggcatgattttgcagcagctggtaccagttgttcctttccatgtttattgcttccttcaggagctcttttagggcaggcctggtggtgacaaaaatctctcagcatttgcttgtctgtaaagwattttatttctccttcayttatgaagcttagtttggctggatatgaaattctgggttgaatattcttttctttaagaatgttgaatattggcccccactctcttctggcttgtagagtttctgccgagagatccgctgttagtctgatgggcttctctttgtgggtaacccgacctttctctctggctgccctttacattttttccttcatttcaactttggtgaatctgacaattatgtgtcttggagttgctcttctcaaggggtatctttgtggcgttctctatatttcctgattctgaatgttggcctgccttgctggattggggaatttctyctggataatatcctgcagagtgttttccaacttggttccattctacccgtcactttcaggtacacaaatcagacgtagatttggtcttttcacatagtcccatatttcttggaggctttgttcatttctttttattcttttttctctacacttcccttctygcttcatttcattcatttgatcttacatcactggtaccctttcttccagttgattgcattagctcctgaggcttctgcattcttcacgtagttctcgagccttggctttcagctccatcagctcctttaagcacttctctgtattggttattctagttatacattcgtctaatttttttttaaagtttttaacttctttgcctttggtttgaatttcttcctgtagctcagagtagtttgatcatctgaagccttcttctctcaacttgtcaaagtcattctccgtccagctttgttccattgctggtgaggaactgcgttcctttggagtaggagaggcgctctgctttttagagtttccagtttttctgctctgttttttccccatctttgtggttttatctacttttggtctttgatgatggtgatgtacagatgggtttttggtgtggatgtcctttctgtttgttagttttccttctaacagacaggaccgtcagctgcatgtctgttggagtttgctagaggtccactccagaccctgtttgcctgggtatcagcagtggtggctgcagaacagcggattttcctgaactgcgaatgctgctgtctgattgttcctctggaagttttgtctcagaggagtacccggccgtgtgaggtgtcagtctgcccctactggggggtgcctcccagttaggcagctgcgtgctgggagaaccactgctctcttcaaagctgtcagacagggacatttaagtctgcagaggttactgctgtctttttgtttgtctgtgccctgcccccagaggtggagcctacagaggccggcaggcctccttgagctgtggtgggctccacccagttcgagcttcccagctgctttgtttacctaatcaagcctgggcaatggcgggcacccctcccccagcctcgctgccgccttgcagtttgatctcagactgctgtgctagcaatcagcgagactccgtgggcataggaccctccaagccaggtgcgggatataatctcctggtgcaccgttttttaagcctctcagaaaagcacagtattcgggtgggaatgacctgattttccaggtgccatctgtcacccctttctttgactaggaaagggaactccctgaccccttgcgcttctggagtgaggcaatgcctcaccctgcttcggctcatgcacggtgcacccacccactgccccgcaccaactgtctggcactccctagtgatatgaacccggtacctcagatggaaatgcagaaatcacccgtcttctgcgttgctcatgctgggagctgtagaccggagctgttcctattcggccgtcttggctgccctctaataatgtcattcttaactgtattctaggtatagagagcttagctaaatcctaggtgaaatgatctataagtgtaattttaactaccaattatagaacaactattatgtgtcaggaattctgcagttataccatatacaacacacacacatttgtgtgtgtgttattgagttcagttgtgtatgtttgtccctataccaataaaaaattaatccaaagattacaaaatgctcaaaataatgtgcaatattgtaattggttttattgaaattgtctacagaatcattatgaattatttttgtatagtattcaaagcatagatatggacattggtgatacaaagatgtataaaatgatttctgctttctagttgtttataaattgagtacataatataaatgaagaaaactaattaaaatccagtgaaacacattaatatgatatcaaatgagcactgtattccacagtatacataggtttaggtacggttgcagtaacatgaaaaaaaatactgcatatgaatgcagacctgaaaggagtaaagtgggggaagttttaccctacctagttttcaatatacccttgtaaaggcaaaatgaattaggaatagcagaatagattcataattttgtttataagccagagagataattcacacttttgccattccgcttgtcacttacatacaatttgttttgagtcacacttaacatttttctcttgataatttctctttatgatttcaagtaaaataaaacaggaacatgaasttgtacttcattatgttctttctacaccagtgacaaagccctaagatatgcttattgtgttagattttgttccttctcaaaatatcagaaaatgcaataaggtacattttgtaacaaaatgtcttgaagaagcataaatcccatggagaacagaaacatgtgtcataacrtgatatctgatttatattgaacacctgtagactagagtttcttgtatttgcttttcatttgaaaatggcagaatggagcattgagcatcatcaatatggctcttttatttgtctgttttgaacctgctactgctttatgatgacatgtttctctactttcaaaatgtgtttattatttgttaacaagtgataagtagagcctttaaaataggacaaaatgttttgaaatgtcaaaaatatattcaaagggcttctgctttttcttaaaacatgtaatgaaaatattcaatgggtttttcattgcttacttaaccaggggaaaatgctgagggacacagaattaaggttatttaagataccagcataatgatgcgagaaattgtcccttgttggtctgaaagtttgagtggctatgtgagagagccatattacctggtcctgaagacagcttctaacaatgaacagtggctttctcaccccacagccagtaagaaatgagacctcagttgcatagtcttaattctgtcaactacatgaatgagtttggaaaaggaccctaagccccatataagagtgtagccttagggccaggcagggtggctcactcctgtaatcccagagttttgggaggctgaggctagcagattgcttgagttcaggagtatgagacaagcctgggaaacatagtgaaaccccatgtctacaaaaaatacaaaaattagcaggtgtggtggcttatacctgcagtcccagctactagggaggctgaagtgggaggaatgcttaagtccagggggttaagrctgcagtgagccatgatcatgccactgcactccagcctgggcaacaaagcaagaccctgtctaagaaaaaaaaaaaaagtgcagcctatccctcaccattatttcagcctgttaagaccctgagcagaggactcagctaacccattgtggcaggctaaataatgcccccctgacaaagataacatgtcctaatcccaagaaactatgaatattattctatatgccacagagactttgcagaggtattttaagaattttaggaagatatattattttgaattattttgtggggcactagattctatcacaaaggtccttaagaaagagaagcaaaaagttcaagagaatagccatcaatatgaagatggaagcagaggttggagggatgcactctaaaaatggaggaagtagccacaagccaaggaatacaggtggccactagaagttaccactaaaaagtcaagaaaattaattctcccatgagagcatccgaaaggaaccagccttctcctgaccagcttgactcctgatatctttaactcaacttaataaaactgattttagacttctgatctccagaaatataagaggatagatttgtgttgttttaagcaactaagtttgtggttatttgttacagtggtaataggaaattaatacatccatacctgggctccagatctatggaaaccacaaaataataaatttgcattgtattattccactacttttgtggcaataggaaaaaatacaatgtctttgtaaataattacacttaacccataataatatttagcctcaaactacctcagtactctcacaatgacccaaattaaccaatattcaagccaaaggcatcaagttacagtcctcccaaaacccttagcttacttccctggtatttagagtattcatcaaagaaaggctggccttttatttcattttttttactaagtgccatcattccatggaggccaaccacaaaactcaactttccaaaacattatgcccaaatcagcaatttcttagttttgttgaggtataattgaattctataaaatatacatatttcaaatgtacaatatatgttttggcacatttatacacctgtgaaactgaacaaaattaagatagtgaacatacccatcacctccaaaagttaccttgtatctttgagttatctcttcctacaaatcttgccacaatgtgatcactgatatgttatcagtacaaatgagtttgcattttctagttttatacaagtggaattatacaccacatacactttttatctggcttctttcattccacataattactttgagattcatttgtgttgttgtagatgcagttctctcccctgagctgagagtactctcagcaaagtctttttaactaagggcatttttggaacttcaattgaattccccttttcttttctatgccctggacattctactaaggcagtgagctggaacattgtggaactcaccatattgtttcttatttctctgggatcactatcctttcttgcccggtgtccctaaagctgtttcattgcatattgtgtatacattttttgtttgtttgttcttttcttaggttgtttcaggcaataagatcattttttactccatcttgaatgaagtggaagcctgtaacagttctgcattctcattgaatttgaatcactcattttacatttggtgtttgctacttggaaaagctacttatccaaaaaaaaacaaaaacaaaaacaaaaacaaaaatccgtgcctaagtcagtgtcatggagctttcttctagttttttctagtgatttgatagttttaagacttacattgaggtctttaatccattctgagttatttttttgcatatggtgagagataagggtctactttcattcttctgctgtgtatatacagttttcccagcaccgttttttgaagaggctgtcttttccccactgtgagtgcttggtacctttgtcaaaattgattgactgtagatgtgtgggtttatttgtgggctttatattactcctagtctatgtatctgtttttattccagtaccatgctgttttcatcattatgactttgtagcatgttttgaagataggtgatgtggtaacatcagttttgttatttttgctcaaaattgttttggctatttggggtcttttgtgcttccattgaattccagcaaacaaaagtaaatattcacatatgagattccataaaactgaaacattttaaaaatcaaaggaaataatcaacagagaaaagaggcaacctacacaatgagagaatatatttatttgcaaactctacatttgataaaatattaacattcaatatataaggaagtcaaataattcaacagcaacacacatacaaaaaaacctgtttyttaatgagcaaaatacctgaatagacatttctctgaagaagaaatacacatggccaacaggtataggaaaacatgctcaacatcactaatcatcaggggaatgcaaatcaaattaaaatgagatataaccttactccagtaataatagctactattcaaaaataaaagatagcaagtgttagtaaggatgtggagaaaagggaactttatgtacttcttgtggtaacctaaattagtacacctattctgaaaaacagtaaggaggttcctcagataattaaaagtagaactacagtgtgatccagcaatcatacaatttgatatatatccaaaggaaataaaatcagtgtgttgaagagatggctgcactcctgtctttgttgcagcactattcacaacagccaaataggaaacaacctggatgttcctccacaaatgagtggataaaaaacaccatggtatatatacacaatggaatactattcagccataaaaataatgaaattatgacagttgcagcatcatgaatgaagctgagggccatttatgttaaattaaataagctaggcacagaaagacaaataccacatgatcttactcatatgtagaatctaaaagttgttctcatagaagtaggcaaaataacagtggttaccagaggtagggaacagagcggggagggaggatgatgagagattgtcaacaagtgcaaagctacagttaggtaggaagaataggccatgatgttctactgaatagtaggatgagtagagttaacagtaatgcagtatatatttcaaaacaggcagaagagaggtttttaatattctcatataaataaatgacaaacgttcaagttgatgaatactctaattgccccaattcgatcattacacaatgcatccgtgtatcaaaacagcatgttttactccatatttgtgtttgtggaagtttgtgaggtgttccttagagataccaattttgcataacaaaataaccaccatatataaattttaatataattcaacttttttgttcatgactcactatattcatttgaatatgaatatacttacatgcagaaacctatgaagccagagtgactgtgtttgaattttgattttggcacttatctgaataatataagaaatttactaagtgttttgtgccttagttttcttatctataaagggaagagaaagttaatacatgtatctttctcaaaaagttaggcaacgacttaatgagttaataaaaacatgcagtaataagaattatacctaagaattgtgctaagtaaatactaattaatgttagtttctttttwwaaaaaaaaaaaaaaaggattcggacataaaaatatgttccctagctttattttctaacattttgcagcttatcaaaattcctttgattcatctttatccaaatatgtgcttctgtgataacctgccaacttggtctagtaaaacctttagtggtatatgattgcaaagttttatagcaatttatttttgtgacaccagtgtaaggccaaagaaactttgggtaattgaaatgcagtttgttgagtttcagtagaagctcatgatgtaagatctcaatcaacagctgtcacctatcatcagaaaaatgtaaagtgtcccatggattgtgctcaatataatatgttctttggaaaattttgaaaagaagctattagagaaaggcattttctgacttactttttcagctcaccctcaggatactatatgtgatatccattggttccatggtaactgaatttaagaggttttaaaagtgaccagatgtgacccagagaggacataagaatttcaactgttaaaattgaggtgaggctatggttttagctgaactggaaactgaattactacttactgttagacaaaatggttatctttcagtgccttgaggtcaaagtcagtgggaaggcacaaatctagggtttctactgtattgttgggagctgtctctactgtggtaggcatacagtcccattgtgacaaccctttacatttttaagcataaatatctattctaagaagaacaaaaatccacatattgaaaatattaaactctatgcaggtatcacctggaacaaacattttcaaatcactctggtagcatgaaaagactaagctttccatggggatatctcagggagaaatggatgaagtgaatacaaatccagaccccagcatttacacacacrcatctstgctttacagtattgtctttacttcaggtgaaaaaaacataggctatttaatgcaatgcacaaagtaagtttttggctattttttaatatagtaatttatatagaattttttgttttatactttcagttctggggtacatatgcagaacgtgcagttttgttacataggtatacacgtggcatgatggtttgctgcacccatcaacctgtcacctacattaggtctttctcctaatgtcatccctcccctagccccccaacccccaacaggccccggtgtgtgatgttcccctccctgtgtccatgtgttctcgttgttctactcccacttatgagtgagaacatgcagtgtttggttttctgttcttatgatagtttgctgagaatgatggtttccagcttcatccatgtccctgcaaaggacctgaactcatcagttttttatggctgtaatttatatagaattttaaagatatagtataattataacttttaaataaacagcaacaattttaatgtaatttaatttgatttgagaaaggcttattatgattttgttatacatttgaagcaaagtaatgttttttcccattggaaacctagctgctgcttagatttaggaagttatctttcagggttttgagggcaaagtcagtagacatgccagaaccaaggaccttatattgcacctgcctttatactctgtactccatacagctatatcatcattttatggatttgaagatgtttttagggaatgtggtgtggcgaaataagaatagtgcaacaacttagaaagaaatagttcttgtatctgttattacagttgtgctggggaagtcatttaacttttttagttttagtttatttccctcctatgaaatatagtgatatgctattcagtttatacttgatagagtggccgttaaaatcaaatgagacaaaatatgcaagactattttaagaaatgtagaattcctaggaaaatcagttattagtgttatttagaggggagcatatctctgtggattgaattatgcccccaactcaaaaaaaaaaatcgtatgttgcaggcctaattcaccaggttgtgatattagaagacagaggcctttggttggtaaccatggttagatgaggttgtgtaggcgggactcacatgatgggatcagttcctttataagaagagataccagagaactttatcctgctctctctctgtatgaactcaccaaggaaaaaccttttgaacacacagaaaaaaggtggctattcataagcttcaacaagaacactttgaaacaatggccagccttgatctttcacttctgggctctggaactgtgagaaataaatttctgtgtttaaactgcccagcctatggtattttgttatggcaacccaaactgactaatacatgtattttcagataagatgaaataaaacatttaaaaaactttaaaaattatatatatattttaaaatattaatgattatgattatcttaaaataatcatgaaaatagtttactagacctggtgtggtgactcacatctgtaactccaacattttaggagcccaaagctggccaattgcttgagtccaggagtttgtgactagactgggcaacatgatgaaactccatctctacaaaaactacaaaaaactagcagggcatggtggcacatgcacttagtcccagctactcagaggctgtggctggagagtcacctgagctggggaggttgaggctgtagtgaccagtgatggcactattgcactccagcctgggtaaccagagtgagaccctgaaaagaaaagaaaggaaggtaggaaagaaggaaggaaggaaggagagagagaaagaaagagagagagagaaagagagaaagaaaagaaaaaaaaagaaagaaagaaaaagagaaaagaaaagaaaaaataattcactatgtgttaattaagatcttattagcactggggtgagaaaattagagtgccacagttcaggaaatcaggaaagatattcctctgcatagtaaatctatgaaatcagtgcatattatattactaatgttatcagtcagaattctccagaaaaccataatcagtgtaatacagatgtatagaaatgttgatgtagatatagacatattacaatatttattgtaaggaggtggctcatatggttgtggggctaacaactccaaaatttgtgaggcaagccattcagcagaaaactcatgcaggaatgatgttatagatttgaggcaaaattatttgtctagaaaacccatatttactcttcaggctttcagtgattgcatgaggccatccacattattgaaagtaatctgctctactaaaaycatgttaaagtcaactgattgtaggttttagccacatctgcacaatgccttcacagcaacatacagattagtattttattacattattgactactatagcctaacccaggttgatatatatatatataactagtcatcattgtgttgtgaagaaattatttgagagactcaccatgaattaaaaactaaagtctgattgaatacgttaacataggtaaaggaaaaaaaatgaccattatgtttcagaccatcatggaagcaaagaaggtgagtaacagaggaaaatattgacaaaactcttctcagctctgtccaggggacagaaagtttgatcaaaacatcactaatttttaattatctgtggaagtctgtcctaaaacagagatggatatattgggaatatatagcctaattccattatacagtcaatttgtctatcttttcttgttctaacttcttactctacaataaatatagttatttggtttcctaaatagactattttcagggaaaaatatctcttctcaggctgcaatccatgtggcagttttatttttcatgtccctttacaaaattgccattctgattgtgtgcattcatcttttaaacagctttattgagatataattgaactataatattgctacacatatttaaagtctacaatttgattagttttgccatatgtatacacccataaaactaacatcacaatcaagataatgaatatgcatctcaccccatttgtaatgcccctatgcaatccttccctcccttcactcctgcttgctagcaaccacttagctgctgtttgtctaaagatcagtttgccttttgtagaatttttatatgacattatcaagtacattctcttttgatctgtcttcttttattcaatacaattattttgagatttgtttatgctattgcatataacaaggatccattatattttactgaggagtcaaattccattgcatggaaatatcacaaattatgtattctttcatctgctaatggatattttggttgttttggttcagggctattataagtagagctactacgaatgcttacatacaagtctctctatataaatatgctttcagtgccctcaggtaaatatttaggagtagtacttatttgtttacatttttttaaaactgtcaaattattctccaaagttgtgtgatttttacatccacaccaacagtatatgagtggtccagttgcttcacattcttttcaacacttagtatggtcaatctttttaaatcttaggcagtctaaatttatagtactttctctctgtggtttaatttgcattttcttaatgactgatgatatcaagcatcttttcatccacctattttctattcatatctttttgtaaagtgttcaaaccatttgcctaccttttaaattgaggttttttttaatattgaagtttgaaagtcctttatatgtatatattttacaagtcctttttcagatgtatgctttgaaatagtctcccattgcgtgactgccgagaccatctcgggctggtgaccctaacccagtggtgctagaggaattaaagacacacacacagaaatacagaggtgtgaagtgggaaatcaggggtcttacagccttcagagctgacagccccaaacagagatttacccacatatttattaacagcaaagcagtcattagcattgtttctatagatattaaattaactaaaagtatcccttaagggaaatgaagggatgagccaaattaattgcagcaagaacacacccttaagacagagatygctcaggcttttctttgtagcttaagaatgcctttaagcggttttccaccctgggcaggccgggtgttccttgccctcattcctgtaaacccacaaccttccagcttgggcgttatggccattatggacatgttaccttgctggagagattttatttatggccagttttggggccagtttatggccagactttggggggcttttcagtctctcaacattgttttttataggtcacgaattttaacattaaagaagtctagtttatagatttggtctttgtaaatcatgcttttggtaacgtatttctgaaatctttgtctaactcaaggttatagaagttctttcccatgtttcctctagaagttttattgtttcaggtttgacatttaggtctatgatccatttgaaataaatttttgtgtatggtgagaagtatgaaatgaagttttactttttgcatatggataggcaattgttccagcaagatattttaaaaagggtatatttgttcaatgaagtgccttcatacctttgtcaaaaatctgttgtctagatatgcatgggtctacttctggactttctattctgttatctttaatggtcattctatcttaacaatttggctatcttgaatgctgaaagaaattaaggaaaagctaaataaattgagagatatcctatgttcatgtgttggaagattaaatattgttaagatattgatattcactaaatgaatctataaattcattcatgtgttccaatcacagttctcacaaaggaattttatggaaattgacaagctaattctagaactattatgaaaatctaaaagacctaaaatagccaaggcagttattagtggcaacttgcttgctttgactattctagataacactagacgattagtgttatctgattttaagtcattttaaaactggaataatcaagagagtgtggtatttgtgtatgtattcactttttatgaaattttgtgtttaaaattcctaatctaataaactgtggaacattcatgagactaaatgtcactaactgaatgattgaacactagacacaggatttaattaactcaacaatataagctttatctcacagagacaaattataagtccaacaggccagaaatatctctttagagcacaaaataacttttctatataaaatacatagaagcttttacttggcgagcattacaatttaattatctcattcaatctggtgatacatcattattatatttgatatgcttttataagtctctgtgtctcattgtgctccaagacatatgaaaataatataaatagcatttattcttcatatcttaaaacatgttattgaatatatggtttatatcagttaaatgctgaattaagcctggtcctaacaaaacttttgagattttataagcctaattttgcaatatactcttctatttccttattataatagtattatcacattttatagcaatttacataacaaaagctgaaggaggataggcttgtgttgatattttgcctttcttaaggctttaatttgcttattgacatggtgtaatttactacaaatcatcaataaattaagcaatgtgctttgaattttctaagaaaccaccatctgtaatttgtatttctataaagaagttcatggaaaatagcagttatgctaaagctattaattagagtggtasaaataagaaactcaggatataaatataagtcactttaaattcaaagctagtctgtcttgagatgtccattacttagctgagtgcaggggctggattcagggagtgggaaggaaaagctaaaatttcaatagtttttacttgttcttaatcttcttygattttgttctaattttacatcttcataggatattggatttttacatctgcacacttacctggttaatgttcgttaaaagtacagcagtattctcacaagttgatagacataagaaatcaagaaaaaatgtagagtacaagaaaatttctacgaccacatggctctatatttttttggattgctttagtgtgttataactgaaacactgcagtaacctaagtttytagaatgttcctcagtgaatattctctagtagattgtctaccctgacattttgcataccagtggattttgttggaactatttttcaaaccagtgatgaacmcattccctccattggttcctctcctggcactggtgttctaagttcttaatctgtaagatctccttactgtgttctcatccccttggtttatgatgtgcaaggctcttacggtatgagctattgaggtaacttacaaccctctcacagcactttaaacaaacacaagctctcgtagatgctggctgaccaggccatactccttaaagtttacccttcaggtgcatttctaactgttaaagtctagcctacatgtctggcctgaagtttctgaaaattaatgcctcccaattctgccctattagccttcaacaattgttgactagagttggtaaaataaaatatatactacctcttttatccctaggttaggatgtccttgttctatatcgacttgcaaagctccccagagaattgaggtcaagttacctatattagtaactagcataacaacacaacttgcatcagctctttttctcttgtatttctttcttattcccttagtagattttactataatatcttcccaaatgtaatattttcgtttgaattgttatctgggatctttttctgggcaaaactgaaagactaccatggacaagtttgttttgttgtgtttttgtttgtttgtttgtctaggcaagcatctcacactcaaatgccttggaggtgagtcaaaaaataatgaaggtaaagcagatctagtttaaaatgattgggaatagtgggtagaaagtatagcccgtgactaatgatattcaagttcacttttaagacaccatacagtacaaacaagaacatgtcttcaggctgaattcagcctcatctatgtagggacttttctgataagagtgattggtagttttagctttttcagctgagctataaccttccttgcacatatgttcctgcctatgatactccactttagttcttatgaaaggattggccacatttgaataaagttaccagaggcttacttaaaccaaattatttcttctctctcttaatagactcttctcaagaatcttcccatttgtctaaattttgacaagatatacctcatttcagttcagtcatatgggaactagggagataaaatcaacaatccaacaaatacattgattcctactatgctcaaaccatatgcgagatattctttcagagattcaaggtgaccaaagttgctcctataatcaaactgaataaaccttaatcctcaccattcaacccaggcaaatctatattctcagtgcctattaacatacatgtaacttggctactgacatcagttagaatatgtgccctagctaaatgggactctatttactgaagaaaagccttccctcaaaaaggtaraagtcattaaaatttatgcagtgatagtcataagtttttattttcacactgcacaatctccaaaattggcagcattctttgccatctgatgcaatgttttccatctacttagaattaagttgtttaacataaaagccagatttgtctttaattatttagtagggggaggaaagttgtaaaattgacatttttaaaaattaagagaaaattttaaaatctgatacattgtttggttttctttctgttacctaatttataatattttgagggcaatgaactgtcttttaaaaggaaaaatcatatcaaagtaagatcaatgacatactatttcctcataaaacaattgaatgaaggtatagggtttacattagacatcttacagatgcaaaagtttctatgtattttatgcaaattaatgcaatataatacaattaacaagacacaagactggtcatctgttgaagtactcaagaggttgcatattgtcttaatttatttctataagatactaaatattgaataaaatatttaaagtgcatctattgtttagaagaatggaaagttagcaaataaatatttaactactgagaaaaaccacgattcaattatgtctgattactcttaacattactttaaacatgtttgtttgcagctatttttgctgactagaagataattgctgaaataagagtagtttaggcaggtttacgatatgtaaaccagatggggtgagtaccagaatgagtgggtagacaaaaagaaaacaatgtgtcagctactttttaaataagcttggatgtaattgaaaaaaaaaaaaggttaaaagaaaatatattcctttcagcttaaatttaaaattaagcactcaacacttttaaatattaataactattgtgaacacctactagcttctttggctgaattacctactaatatactaaattttttaaattttctttatttcttgataattttcttaagatatggctttgtaaatgtttaaaaaaaatccaactctagcaagatagtcaaattcacatcttatacagttaaagtctctatggatactcaattattgattaccatctccctctgatatgtttctttgctttacatgatatkacacactctgtatttctgaccctgactactcattctcctactctgatttccaaaattcagcatggcctccagttctgttcttggggctccccctcctcttcttatacatggctcttgacctcatgtagtatttttatcacgtatttcctaaatgttaaagtcaattatccttgaataggtttgcatgttaggtacatgagccaaaattcttagagattcaactttcattgaggagtagacttggaaataaaatgtttaatttctggctcttygccaggcttccagtttctataatcataaattcttgatattattcagaggccagaggcagattttaaggtaattatacaattagaactgtttgttacagttctcattgccaatattatatgaaaatgagttgatgacactgtcctaatgactagatyagtgtgccttagtagtcaactacttagtatgactctttagcctattaataggtcaaagcttagcaccttttctttgagctacacatggcttggtcaaaggaattttgcaggtatttacatctctctaatcagatatccactgataaattgataaataataatgcagtgagttaaacagggcttggttcctawttgcttataaatttagtattgatgctaatcaaattagctttcttgacattaattgtgatgggtaacttatgtgctacagagctaactgttaaagactttagcatcccacattcattgtgtggatagtttctcttctgcatttgtcacagtactttgggtcattccttcctcatacgcacaactcaggtctatcgtctttcaaattgcacgtatcagccagttattaccagcttttttttaaaaaaaaaaatttccttccagctaccactgaacataaaagactattggcagtttttaattttactttagacagcgaaagacatgtctgcatgtttagaatgccaagtagctctataactgttatcaattatattaactaagagaaaactatagtgaaatttgctctgaaaaagaaaaagatcattgccctaaaacctttgttaacacatagctgtccatatgctattgtatttttcataatttagctatgtttcatccaatttaggacaaaattttagaggacttagaaaaaatacaattttaaagagaaataattgtgaaattattcgtgagtagctagtttaatatgaattataacaacctmcacacaagtacaggctgattaaatagttgaattgagtaattgttttgaaatacacgcctagttggacagccatttaaattctctaacaagctgcacagtccagaaagtttgtaagccatttaggaaaatgcaacttacggctcaacggcatttctactaacatttagaaaattatagtttgaattgaaaatgattttaagtataaatcagtgtttaaagagattttacatacattaactcatttaatcctcactgaaatcctgcaggataaggagcactggaggatgctctgagtttatcagagatttgtccaagattacacaaatagtattgaagtacagattcaaactcagttcatcaggttccaagtttagtgccaccctcatcacttcatttatatttaagcacctagtatgagtcattacctggtaagtacatcagaggatggaaaccaagaacgcaattctgaataggacaatatttttgctttcaaatggctttaaatgtagcaagcgaaacaaacaagtaattagatcctactattttgttaaattatcacatccagggtaagtataaggtgtctctacggcaactcagaaggagacattacctatatttggagggggctcagaaaagatacctaaggtgatatttgttgatcttcctgtaattagtcaggtctatggaggtgaaggactgttccagaagagaagagcgaggagcatgtagaaggatcagaggtaagagaaaatgattattgtaagagaaaatgattattgttgtttgttaagtgaactgtgaataattcactgtatttgaagtttagtatttcagtgaataatagtcctaactgaacaggttctccagccttctcaggaacatttgggggtctctggagatgtttttgtatgtcagaatgacagagaagtggtattaccaagatttagtgagtgtgaggatttcattacaagggtagtccagtacagtgggtaattttcccacccttaaattatacttgtggtctcctgagcaacataaataacagatcaccaaaagctttggaggataaatcagtacatttgaactgtcttcagaggcatttaaagggttttaaggcccctgggcccctaaaggtttttaaacagaggtttaacacaacaaaatttstgctttaaaaggatccttctagctgccttgtggagaatgggttagaagaaatgaaaatagacagacaataccacaagtgtttgctctgccttgaataggaaagtctaagagagcaagagagatttagccagcactaagagaatttcactgcattgactactcactgggaaatgtggatgccagctttctgtgagcagagtgaatgagaggggatgaaatgttctagaagaacaaactccagtaatagtcctcactgaggctggagcaaacaccacttcagagaatggtgatgttcccttttttagagatagacagctgtataattctgcctcattaaaacaaatgcctgaaatctttgtttggcttaagttcctgaagctgaatttctatttctacagctgaaagaaatctttattgattcatgtgggggtattcagtcattccatatcttgattctgacacaaattcattaccagagacagggactctcagtttaaatttttgtagttttattaaaaagaagatactttaatggagccagatttactcattcattcattcatgcaccattaatcaaaacatgattattatgggcattgagttaagcattcaacagatacaaatcatgctaaaaatttggttttctaggccaatgtttctggcattcatatattttcccctctatttccaagggttactattatcttgctgtttaacttcctttgaaacttaaccacactgtaaaaacccatgcatgctatattgtaaagttggactccagaataagaagtagaaatgcaaagtcaacattatattcaagaagtatgtgcatatcttctgaaattggtacttcctttataccaaatgtgtctttagttcttcaaagtaaaaaatactttgattacacagaaatttgttcattctccagatgcgaactccttcatttacatgaccattttgaatctaaatatatatgcctttcttggtatcattcmgttattccagaccttccatatcattttaaaagatgaaatgtctttcagtagatggtgaagagcccattttttwaaaaaaaaactttattttgcacaggtgtaacacaggtggtacaccctttcctctctgccccatagggtgtagctctaactaccctctagggaagagaaggttgggtgaacagccttactatttctccagctcagtcattacctgcaggcacattctcttctctgtccaggagtgcttaaggaaattgcaggctgatgcatgcagaacggatttgcatcatggttcttcttccacaagtcacttcagcctcttccccagaaccaatacacattttaagcttattatgtttcaatttttttaattgtcgggtttggatccttgtcataaaattgttcatactgtggtggagggccctcagatgtggtgcagctattttttaagtgacacacttgaaggagagcttttaccacacagaatctcagagtgtgttctacaaagacacacccacatccatactcatagactcctaactctggatttgttatgctaagaatgtcctggatttcataataaagcaccttgaaatagtgaataatgaataatggagaatctaaatcacttgtgatttttttttttacctcattatgagaagtgctgagagctggcatttatcaccagtggttgcttcaatccattaaaccaatccacggagaggcagagttccactggagttttagatgaaccaaaatgtactatgaacttggatggagtgaaggaggagagattttgaaagattcttctgtttctttcttgaaacactgtacaagtgtgctacatacactctgtttaccattctaggtttcccgtttattcttccccaccctgctttggcaccagaaaacaaacctttactgtctttgtcaatcatattttttttttccttagcaacctattgagtctgggtaatggaagctatcctcaggagagaatatggtagagtagaaagaagttgagttatttagttccgtggttgtctccctaactggccataaattagcccttgctgagtttctctaccaaattttacagctcttgtggagcagtactctcttgtagttgcagctacagcaccagcttcagcccgctgtaaatttcagtacatgttccttcccactgcctcaagccaagtaatattcatatctcctgctgttgctcagctcagggtgcttccatatgccttgttggtttctttgaacttgtccttatactttgaaactgcccttgcattaaagtctcctaaatcactacattttgagtgtgccactttttcctgctgataccaacgttcatactacttaatacttaataacaatttaattgagtaagaaaaaaagccacacttaactgtgaaaaataaaagtaaatttaattttacagctgtcaaatttcaaatgcctgactagtatttcaggagtcagctgtctaagtagtaatcctatagagatggaagaccaaagaggtatctgggatggayattgatttgcagtttaataaaatttatgaacctggaaaaacctgggctttgtttaacaatctgtaaaattaaggaaatgtattcattatttcctctgtgctttcatccctgtgagtctttatttcatactatccggctaattagcaaagcagaaactttagggacccagaaatctatcatagccagaaaacttatgtgaaagctgtaatgtcttattttgtgccaatactttctaaacatttacatcaagtgtaaaataawctcttcaggagaaagctggttttcccctgggatacattatcttttaaaatataaaatgtatatgtaccataagttattaaatcactgaagtatgcattgcaattttcaacaatatataattgagaatatattttctttgtatataatctatctctaatgttaaaaaagttttaaagttacacagtatggccatttccctagttctttgtgaagaaatgcttatattaactctgcmgtacttattgtgtctgaatggaagccagagagtaacctgagactgaccccgaaatgacacttctatacacacacacacacacacacacacacacacmtgcatacacacatacatacacacacatacacacatacacacatgcatacacacatacacatacacacatgcaaaacacacatacacatacacacatgcatacacacatacacatacacacatacacacacacatatatacataaacacatttttcttggaataatgaaagtgttacatattttgctctttgaaatattatgcaaatgtatgtacagtgtaatagctttagtttgggaataacaaatcaactgtgaacactatttaatcaagatggaagatttaagatatgttagtattatttttttattattgattacatgccaagatggttcctatcttttcatatttatttacaattatattaagaggctctgaatatatactaatttactatgctaaggagtgtttgccatttttctaccaggataatgctgcataacaaacctccagaaactcaatggctcaataattattcatttaatctcagtagtcttcaggtccactaatctcatttaggctaaacagactaaaccggatcacagggtttggttcatgtgtattcattctgggaatctgactacagcaaaaatggcaaactgaggcatgtcatactcatggagcaaggtggaagcagaaacacataaatgcaacatcttttaaggcactattaagcagaaacagataaatgcaactttttattaactctgaagtttcacctgccccttctttaatggttaaagcaagttaaagagccatgcttaatattaatmaattaaggaagtatactctacaaatactgaacatgcagcaagcacttgagaaaaaggaagaatttttacaaacaacaaaatattccaaatagggagtgcaaagatatatttattctcagttggttttagttaatcagcaaatattcactatgcttttcttcaraaacttgtatcagggagtgtacagtgtgaggtaaataatatatgaaatatgaatctctgataaccctaaacccagaaggtgacccaagaaaccatagaaataagaataaatatataaattaactacaaagaaccatagactaactccaccttattaattttcaatgtctaaataaacaaataagccttacaagttaaaggtacataatcaaatatgtgaaaataatgttgtttaaatacaatacagaaaacaattttgtaaactgttttgcttgtttacttttaaatatgtagtctaaaactatggaggagttaaataaattctactgttcatgatagttctttattatatttagtattctaaagggagatcctattcaaaagtaccatctcaggattagaagagtccttagatgacatgaaaatctcaggcagttgggtaggaataagaggaagatgaatcattgtgcacaagcaaaactattcttgcatgaaatttctgaaatctttgggggtgctttctatgagtagtgtcagagactgattctgcgtagtcattttgtattctgagttaaaagtaaattttattttgcttcttgacaattatataaaacaattttcaagcattacttacacttcagataactaaaatgccaccaaacaaaacacgttggttttccaatttttaaattaatatttctaagccacttttttgtttagttactgttatgcaaaaagtgaggaaattactacattcagtgtgttattttaacaataatatgcattatagtttcaaaagaggatcatataaaaatattatacagcaatttctacgtttgataacttggaacaactgaaaataaaaccaaataatttaaagtataatctaaaaccattttaaatgtctttattttaaattgtttttatcccatccaccaatgatgggcccttaggtctttgctattgtcaacagtactgtgatgaacatacgagtgcatgtgtctttttggtaaaacaatttattttcttttgggtatggagaacataatcctaagtgaataaaccaggaacagaaaaccaagtactgcatgttctcacttacaagcgggagctaaacattgagtacacatgaacataatgatgagaacaatagacaatgtggactactagataagggagggagagaggtgggtgtgggttcaaaaactacttattagatattatgctcactacctgggtgacggaatttgtattccaaacctcaatatcacatcatatacccatgtaacaaacctgcaaatgtactctctgtatataaaagttgaaattactttttaaaaagtggatgcaataatttttactaaagaactgtgtgcattcaaataacaaatccctagcatttgtatctaaattacttgttttgacttaatgtcattaagaataagaccagaccgatatttattttacaagaattgctctattgaaggccatgaggactttgaggcttttctgaaatcctgtgaattctgagaaacctattatagaagtgttactaaaacatacattgacattctactgtacaaacaactctaaaagatgtactgtgcagaaatggttttatgcataaaaactacaaaatcagaagtggcattaaatttcaaaaatatatttttatttgttctaatttaatattctaattaaatgcaccctctattatctttttggttaataaaagcttacatttagtctttcaattttatttcagtgttataaacacacttctacaaacttcttcaatttggctttaaaattttctactgaacaaaatctacaaaagaaagcaaaaagcattataaaaatataatgaatcctatccttatgaccatgattatttttacaacttttgaaccatcacaaaagtagtattttttcaaagaaaaaaagattctaaaactccacatttctcataataatctgaaacaaaattaattctattgtcttcataaaaagagaacatagctttcaacattgtctgcaaagaatttggaaaaggattgaaataatgaagggttcttgctaaaatgaaaatgaacattttgcttcaagtatctttgtaatttcaaaaataatgattgtgaatcagcaacagttatggacttggggataaaaatggagtactcagcatccttggagaagctttttagctatgaatagctcataaggaatattatattataaatagactctcaatttacagaaacatatatatatataatatgccttaggacttatgtgtgtgtgtatatatatgtgtgtgtgtgtgtgtttgtgtgcatacataaataaatatatatacacacacacgcacacacacaaaaataattgttcctcagtatccaagggggatttgttccaggaccaccaggcagataacaaaatccatagatgctcaagttccttatataaaatagtgtagtatttgcatataacctgtgcatatcctcatttatagtataaataatctctagattacttataatatctaattcaatgtaaatgctatgtaaattgttattattctgtattgtttagagaataatgataagaaaagtctgtgcatgttcagtacaaatgcaaccatcctttttttttcccccaaatattttacatctgcagttgctgaacctacgattgtagaacccatgtatatggagggctaactgtatatacatattcttcctaagtgagaatatatgctttatttagtttggatgttattaaaagagtaaatgactaaaaatgatttatatctgaatatataaattttaaagttgaataaamatgtatttgaatttggaaatttactctttwtgaataaaatatagacttgtaaatataacagcatatctttaggacaggtactacaaacattgaaaaatgtttgctttgacttaagtttatatcatttgtagcttatttgtttgctttccaaaaagcttttgtctcaattataacatagattttttttttttttttttttttttttttttgcacagggaaacatagctgaattaaaaatctgctttacccatcttaaggagagtaataagacaaaaattggaatgacaataataaataaaagtggataccctaacgacaatcatttaatggcatttattcaatgcttactacaccaaaaatcttccttttgtccctttctgctatagctatgaataggtatttaataaaattttatgataaaagagctttttcccagtaatagcatggacaccataaaaaaatataaacgggcttttgtgttcaacctcttcagttttagagattcacaggaccagctaattttgtggcaaggttggaaattcaaccccaaagtcctaattaataagcccagtcttggacttaatttatttttacaattgaaatgcatagacatatgtgtcatattcttaacattttctattaataatcagtcctgaaattgtattgatacagaggctgacttccaaaagcagtaataaaatcgaacaatatgtaacgcactcctcgtatgagttggatgaatgtaaactgaatttcatacttgcaactgactataaaattgaatgaatggcaygattcatttaacaaatattaattgagtacctgctctgtgtatcagctttgtggatccattattgaacaaagcagtcaaaaatcctcacctgtatgaagatatttattctagaaggaaaacaaattaaccaaggaactatataaagtatccatatattgaatagtagcaagtgatacaattttttaaaaagttaaggacatgttaagtctaagaattaaaataacaattttaattggggtagtttggctggaatacctcactaaaaacattatttaaaaaattaagatatgaaggaaaacaaatatgtgtgagaagagaatccagaaaaagggaacaaccagatcaaagaccttcaggtggtgtgtgaccttaatgcagttttgaaattataaaggcggagtaggcaatgactgagtacaaatgttgtggtagatgaggtccatgaggagaagaaagtcagattataagtaagtttacagaacaaatagaatgccctagcattcactttgaaaaggaaaacagtgatcaattaaagccttttcagtagtgtggtattgtgatctgtcctaagtttaaccagggtcactctggcttctttttaaaatagactaaaaagtaaaagaaaaagcagagaaataggtagaagtttattctaaaatttaggtaagagacttggactagtgtgcaagcaagaattgctgagatatattttgaaagaaatgccagtagtatttactcaagttgtgtatgtgagagaaaaataaaagactaaaggaagtctgttttttttttaactgggaaactggaaggaaagaattgttattgactgtgttggtgaagacaaaacaggaaattttaggggtggatgtgaaggtctctgttcttgacttattaaattttatataactagcttatgtagttgtacaagtaagtttggagttcagaaagtattaggagctggagacataaatttgaaaggcatcggtactggcatggaatttgtcttcgaaactggatgaaatcacttaggggaatcaatatagagatacagttcaaagattgaatcttgaggtagcttaaaatttagaggttttctagattatttaagaaaaaagtagactgaggaaaagtagtcagcaaaatagaaggaaaaccaggcccgtgtgttattaggaaagaggccaagttaaaaaaaaaaaaaaaaaaaagtattttagttggctagactcatcaatggtgccaattgcttctgataggccaaaaaaggtgagtactgaaaattgaccattggacttagcactgtagaaactaattttaacaacaaaatgagcagttatgctggagctgtggggataaaaatttgatgatagttgacccaaaagaaaataggtagaaaaatatttaaggaatcaagcgaagcagccatttcaatgagttttactttattgatagaagagaaatgagataatagctggaagagaaagtgggccaagataatttgtctttataaaattggcaggttttttttttttttttatagaattgcaagttagcttgatgttgatggatatgatccagttgatgggaaaatttgatggttcaagagagagatgggaaaattactagagcaatgcccacgagaaggaaagggataaggttatgtacacaatagaaggactgtatttacttagggtccagtccatgctaataaaataaattagaatattcaagtataaatgtgggaaaatggatgtgaagagacagtttttgtaatttgtcttttaaatgattttctttcttctgtgaagtagaaaaagtggtcwcagcagacagtggataattttgaggcaagaggacatagtacagaagacttctatataggtacagtaaaaaagtgaatgaattaggatgatacaatgtgagttagtgctcatgatcttaaaggagagtcagtcctgggtgtttggttttccctccaggctcgttcactggtggaggtgcagatgaatagtatgtggagaactgttttcaatcattgttggggtgatttagttaatatactatacaaataagataggaaacaatgttgcatttaaggaagtgattttatagtgattagcaataaaatttaagccggataataagggaagtatgaatgttgggtgaggaaggagacataaagaaaagtggtaaggtttcagtggcttcaaaagattcttggagctgggttctaagagggattgagctgaaaaaatagaaaattataagacatatttgaaattgaggtgttaggataatagtaattgttagtaagccaacagtgtggcttactgtaaagtcatggatacaatcacagaagttagttttggagttaaaatggggaccaagatgattgagaagaagaatggagaagctaggtcttcaactgtgaattaattaccacagaagtagttttggagagaattacaatgagtaaagaactaagattatcaaagaacaaaggaaggggacttttgatgacagcaacagagagaggctttttatagaaaaggtaaagacagttgtatgaatatctcttcagggtggttaatacaaaaakacacttacccactttgggtaaaaacatataaagtatgcagaagaaaggttatcattggaaaatagccaggtttaagttagagcaagtcagtgtgacagacattcaaggaagagattaaggatatagtcgattttgctaataactgaacttaagagaaaaacatgtaggtggtgggaggatgaacagtcagtttcagaagagatgttggagtaggatgagatttcaaagattatatgatctaatcttttgtatctgaagatacaaaataacttcttcacagtataactaatatttagtctttatttgagtatttcctgtgactgccttcttagaaggcagcccattcaaagaaatgacacatttttccatgttcacaaatacttccattgaccccaaaatgaaatagaaatctatccatcacagattcttcacgattatgattctcccttgcttccttgtgctgcttccaggcaattatttctgctaagctttaaccatcagatttgaactgcctggcttccgtgtctacctccccctttcctttctgatgtggagtgtttacaaattttccagttacttctttcaaatcattgatgatttcatcaactgaaatcatcaccttaacagctaccatcatcacaaatgatttctacaaggaggggcccaactcactgaccctctctcgggattagtcatctccctaatactttcacactcttcacacccagcttctcttcatttttgcataatacttactattactgtgtttaaaatattcttgactcccttgttctaatctcgcactcattaggcgagatggaaactctggacaaaatccctgaatagcaaagcatcctaagtagattggattctctacagtttatgtagagaaccaaactcaagtgggctttccacaaaacacacaaaaaatcatgtttcttcagcaagtttactcggccaagttccgcaattaaataacatcttatacacactatttaaatgttttcctactcctttcctccctctcttaatctcagtatattatttcacttcttaccagaacaaatacagcagatggtaactacataatctttttgctaccatatgtaagaactgacctgctgcctctctgtcccatcagttcaggctactgtataatagaatactacatatttggygacttcaacaacaatcatttatttctcacaattccagtggctggaacatccaagatcaaggctctgacagatctggtttgcggtgagggcactcctcctgatttgtagacggtggtcttcttttgtatcctcatgtgctacagggcagagagagaagaagcaagctctcttgggtctctttctatgggggttattaatcttattctagtgggcaccacctgaagacataatcacttatcaaaggctctacctcctactgccattacattggggctgaggatttgtatatatgaattttgagaggagggcacaaatattcagctcatactatgcccctttccattagaatgaaggacacgctgctccgattcaagttcagcccctgcacatgcattcccctctactcccactgtttttagctgtttttgttcctgagtcttcaacatcttaatttctgtcacagtctccttctgatcaaacatgacctcatatccctaatcttaaataaaacatggcatgctttgtctygacctaatatctcttgttagcaattatttttaatttgtctttttatttcaatctcccttcataactagcttttaacaacagtttttattttctcttttataaaggcaacttaaactttctcaactttcatttaattttgccacactagagttctgattctatgtcaccaattaataacttgttgccagatcctacatattcccatcctaccttagctgtcggcagtattttacagaattgaccacgacatttttcttgagagactagcctcttgatctccacatgtagtggatacatattttgtaaaattcaagtgaacacaatatgtaattcgctttattttaatttcattatttttttcataaacagaattgtcttctaattacattcccattttgcttagaggcagaaaaacttaactgaatcaattccaagtaagttcagaggttttaaaggattctcaggcattttgggttttaattcagttaaatcaaaattgtctcccccccttcttccttgctttttggattggtttaacttctggaaagttcatacagtacaattatattagatggtgaggcatctgggaatcagccttccattgtcctatactgacatctattgtgatgtacaatcatgtctcacatacccaccacattggcatctgttgaggtttctgtatttccacctggtttcttgacatacattttacactactctttgttataatgtcttcttatcacaatcacagaccctttcaacatctgcttgctttctytcagccaaactttgtgtttgtttgtttgtttgtttgtttgttttgctcttcttgttactcggggatcataggatacttgctatggctgccttgtgccttccccttcttaagcaacaaaaatacatcttaacccttttcattgggttattagggaattctaaaagcataattctttacactgttccaraaataattaagggaaaatgtggtatttttagaattccaaactgttctgtgggttctgtcaaaatctcatgtacttctcaatgatagcagaaaatacaatgaaaagagtcttcttagatcccatcagtttttaagtatttctctctaatgcatttttcaacctttctttatactggatagagtaattatcctttagttataatgagagggaagactgatttaatttttcattcttccaaatcttcgtctattatgtcagtaatatagcttttattaaaatgaaaaagagttcacatctctgctctgtactttcacttaattacagctggctgggctgggggaaaaggaccacatgttaaaaatgaagcaatttgatgactgttactgggagaaacacctttctgcagtatggctgaatggttaatctgctcatccttttttttttttttttttgctggagaaaacaaacaaaacataaatgctgaatatgttaaaacaggggtctccaaaccctgggccacagatcaatactggtccatggcctgttaggaaccaggccacacaacaggacctgagtggccagagagcaagagaagcttatctgtatttacagctgctccccatcaatgcattaccacctgagctccacctcctgtcagatctgtcttggcattagagtctcacaggagtccgaactctagtgaactgcacatgcaagggatataggttgcacacgccttatgagaatctaatgcctgatgatctgtcactgtcttccatcacccccagatgggactatctatttgcaggaaaaaaagctcagggctcccactgattctacattatggtgagttacataattatttcattatgtattacaatgtaataataatagaaataaagtgtgcaataaatgtaatgcacttgaaacatcctgaaaccgtatgcccycaccccggtctgtgaaaaaattgttttccacgaaaccagtccctagtgccaaaaagattggtactgttgtattaaaacattcaaatgcattgatgaactaaatagaaagtaaagagtatccaaggcataagtaaatgaaaggataaaatgaaagtgacaagcagaatgctgatactggtttccaccttgaaagccattgcacattctagtaaacttgagtttttgttttcatatattttcaaagcacaaggtatagagagaaaatgtccagtggtggctgaaaatagaaaatcgaaagcataatccctgcataaacctaggcccagcaaatggcctagcccctcctttaagcataaaacaggaataaatgtccactcattcagggttttataaggagctatacctatcttgacttctagtgctgaatgaagggggaaaaaagtaatgcttctagctaaaaaacagcctttatgttggattgcagcctgaatttcctcaaattgtgtgatgcgaaaaccttaatgcaatactacagtttaaagtgcatctaggttggtatagcccccaatccgtagcagaaacaattgcattttttttcccagaagaacttgtcttcagtcactacaagcaattatcacaaataaaaatttagaaatataaatttatactaaagaaaaatcacaaaacacctaaggaaacaaagtgccacaagctggagcctcctaatatgggaacagaataacataactaaaaaacaaatatacttcataggttacaacaataaacgaaggtactgaaaaaaaataagaaaagggcaaaagaattttaaagagactaagatgattcaacaaaagactcaagagaatggcttgattttgaaaaattactattttaggtcagtgtccctggaaatagactcttaaatatggattaacatacaagaaatttatttgggtattattcttagagaaaaccactgtgaargaagtaagagaagctggattgggcagaaggcaagggagatgcaattgcaatagaatcttcagttgataatatcataagctctgaagttaatcactcctagaactactactaaaaaccagatatatttttagtgtctctattatacagaacagctaccaccccacagactgaatataatagttacaagtgaaaaattagataagaggcttaaaatttctttaagaactctcaaagttctatacaaatgggttattttgacatctacacaggaatcaaaagaacagccactggaatcagataatcttacttcacttctgcctttgacactcactaactagttgaccaaaagcaaattactgtctctctgtgaccagttttttcatttctagagtggcattaatgatagctgcttcatagaagtgctgtggaggattaaataaagtgaacacatctgaagaataagcacaacatctattatataacaatagttgttaatagcggttataataaaaatattttttaaaaggaagaggaggatcataatccttaatttagattctgcgttaaattgtcttatatttacttagatatcctctttaacccacgtcatgtgcagaacctaatttctactccaaaaacacagcagtattttactggaaatttacctttaatgaaatattctgcaatagcaggagatccttgactctttttctggctctttgtatgaatttatggtagaaaaaaaattgctcatctgatctttttatgtcaatatatcacatatttgcacagagacactatttctgggtattttagaatacgttcaagctgattccttttatcctacaagtacgctgacaaaacaacagcttatagcattgagatttgtattggcagaagcatttcctgttaatcaaatactctgtagcatgtttgtacatgtttttttcttctgtgccttgaaaaagatgatatgactttattcctgtgtttactttttatttcctacccttaaaacaaattgaggtgcagtttcttaatttaataaattcccttttctctggccctttcaaaacaacaaaattactgctaattttaatctatcaagtagcagttgacataaatattatatggaattcaatctacaagttgatttctttacagtgataaacaaatattttgttttatttatgttcgaccagatttatttggttcttctttaatgaaaatctggggctatttggctcctacgataagctgtcaagatgaaaaatctatgctgtaatgtcaatttgcaatgcttgtggttcaaagggtattcacagcacatgatttatttttccatcacctaagatttaaaaaagaaactatgccatgattaatatcaaaaaaatgagaagtgatttatttttacaaatttgtcttgaacagtataaagcatgttatttctgatggtgcctattaggaacaagagcaattgaagtctgtataaacattttaaatctcccattaaaaagtcaacaacttagaaaaaactggaacagatactctactcccatctaggggaatgatttcttagatattagatgaagtgttgtacaacattttttcagggcttttgttatgagaataagtgtccattcttcaaatgcatatcatccttttaatacatgattgtttccacagttttttttgtttttatatttaatatatatgcatataaatttgacaaaaataagttagttgaaataaaaattaaacaatatttaaatagctcctaagtttcaaatgccctctcaattttggaaaataacttatagcagttcttagcatcaacctaggaaaatctttagaattamtctcccagtaatctcacactattytattcagaatcaaatcttttacacctgccttcagtgaaggaagtgtttggctttattagttataaaagtttatttcctttttttaaaaatttttatttttttaaatttttgtggatacatagtaggtgtatatatttgtgggttacgtgagatattttgatacaggcaggcaatgcataataatcacaccagggtaactggggtatccatcacctcaagcatttatcctttgtgttacaaacaattcaatgatactcttctacttattttaaatgtacaattaaatgatttttgactatacttaccctgtggtgctagcaaatataatagcatctatcattgaaatttgcacagaacatcaattctccttaccatcttttatgtgtcttcttgcaaaatcactttagtcttgttatgttttaactataaaaccttatttaataatcaagagttatagttaagtgcagaattattctattactagaaagctacatgtgaattaatccttcttattcttttattacaagtatatgatcattaaataagtaggtgtatttgaattgatatcgaaaggcatctaagatataatgctaagacaaaaagtaagtgagaaaacagtgtattttcataattatgtagtggtatctatacatatatttgtacactagacaataatgttaaaacacattggtatgtacggagaaaaaagtgtggcctaatatgcagcaaactcaacagtagtgagcgggagtataataaatattcatttcttttgagacggagtctcactctgtcacccaggctggagggcagtgacgagatctcagctcactgtaacctctgcctcccgggttcaagcgmttctcctgcctcggtttcccgagcagctgggactacaggtgctcgccactatgccaggctaatttttgtattttcagtagagacgaggtttcaccatcttggccaggctggtctcaaaccgctgacctccggtaattcaccagcctcagactcctaaagtgctgggattacaggcgtgagccactgcaaccagccaaacattcattttttacatctttgtatcttacatatctttgtgtttttctttaatagccaacatttctataataagacaggggaagaagacaggcatgtagactcaaatattaataatgaataactccacaaggtagaattaaaatgaccttaattttcttacttcttgactacattttaaaatctatgttcataacaagagttattaatttatgtaatacaaggtagaatcattttagtggactgatattaaaaaacttttctcatttattgcrtaaacacatctcactcctcatagactttttctatggaaatatgattttataaatatagttaacttttatctgaataaaacttatttatcaataaagaacattaattgcatgagcattgttaaatcaccaaagtaaatctagtacatcacaactaagttattacttggccttctcaagagcttcttcagttaaattgcatgaggattgagaattaagtgagttttttgtttgtttcttttttttgttctggtggtcatatcactacttttgtgtaaagttacaagtaatggctgtgaataacaacatagatcttttcatatataatattatagaaatacattatgaacaatgatttccatgtatataaaataatgaaaataataaaaagttttaaaaagtattctgtaagcccttgttttagatcacttctccctttgtttcaataacatgctttaataatcactctttcttaagaactatgtgaacatttagattttactgttttaaaatttttgtatcattaagtatgcatgctttatttcctaacttttttactattaatatctttttttttaacttctggctttcctttgcctcttcgatcctctctagcaatatttaagatctctgatagctaatggtaaatctgagaacatttcctggattcaagccaatcataacatctttaaataatgtttatatattgcaagcttgccagctacttaccagggcataacaaaagataaatatacactcctctactaccaccactaaaagaagccaagtcatctgactgccagtgacctaatttttacatagctgtttataattctcatcatcatgttatagcaatatgatttattaatccttctggcatttttctccttgacagcttctcagctgctgttacattctacttggatgggtaagtactatatactattttaaaagtgcacatcaagttttatatgttgagactttatttgctttaaacacttagtgtcaactagggtggaataatttggatttaacagtataaatgataacaattattgttaagggttcaacatagatgagaatgaagaaaacatacatttgaagatgtgattacaayagagcctttcaatatgtttaacttagggtgggttaaaatataattcacgtcttagtttttaaaggccataggattttacttcaaatggaaaatatacttttaagtcctctgcagactcttaggtatgttcaaatacttgtgtacagaagaaatatttttgctataatatstaaaaatttacacctttgtggacaacatctctacgttttcaaattaatgttagattgtcaataattagctataatcaccaatacaggtggtacttatttatctttatatgtaactaccacactttttttaataacaataaaattcgacttgatgttgcatgcatattaaacaaaaacaataagaacaggacaaaaatattaaaaaggaatatgcacatattaacaaacatccaattaataattcactacagttgtactctaaccaaggttgtgttactagaacgtatggcaaaaataggagaaacatttagattgtatagttccctttgtccagtaaaaaaatcaaccatttttgcttaatgtgaatagacacatttcttcatgccagtgaataagaaggagtttaggcatataaaatatattaggtaatatcgtattgtcaaccacagatttacacagcagtgttattcaaatggacaatttacatttttggatctctatcagacctgtcacctgcatattgacgttccatctctataaatttatgccttaagttagagaaacatttttgtaggaaataaagataatgtgtattcatgtgacttcctgatgacctgatttaataaactttttcttaaatgttaggaggaagacatagctatatttatgacattatcttgctcaaatttccaatgttttaaactgtcttttgtcaaatgatagatgatgtttctgttgtaattatctgaatttttgagatgagcatttgaaggagctccagtttcaattggaaacgatccatagtctttagacactggacattcttttgtgaaggatttgaagtgtgattgtatattttctctaatattcataagtattctatcatatttattctagaggtaaagcagttaattcctaaaagtctaggaaaaatgcaaccataatgcaactttccacatttggaaaggttgtttgaaaagccagaattcttcagcatcttactataaagtcgtaatttgtgtctactgtattttaatcacaaatgtgacaacagcatggttgtatacaaaataaaaagggggcgctgggccgggcgcggtggctcacgcctgtaatcctagccctttgagagtccaaggcgggcagatttcctgagctcaggagttttagaccagcctggacaacacggtgaaatcccatctctactgaaatacaaaagaaattagccgggcgaggcagcgtgcgcctgtaatcccagctactcgggaggctgaggcaggagaattgcttgaactcaggaggcggaggttgcagtgagccgagatcgcccactatactccctgcctgggtgacagagaaggwctcggtctctaccaaaaaaacaaaacaaaacaaaaatgkcagggggcgctgatgttttagcctccgtgtttatcccatttttgtggagtctttaatgttgtctggtctgactcaaaatcattgtcactttcacccaagttgtttaaggctaaggatgtgatattcttcactgagattcagagaactggtacgtaactaacagagaacmaattaagtaacaattttcacacagctccctggtcattaaaaaatagggaaaaggaggaaaatctggtgtactctagcttctaaggaagtcagttcctcagtttaagtactttcttttacagcatataataaagcaaataaaatgctaggcaattccataatattcagatgttttgactttcaaaacactagttgttaagctattaatcactgtgagagatcctattaaattcaggtgatgctgattattttaaatggacagataaagttttatgtattgtgtaaaacatgatgtttcaaagaacttatacattgtgaaatggttgaatctagctagttaaaaaaatgcattacctcatatagttatcatttttgtggtaagaacacttaacatccgctttcagcacagaagtacagagtagaatggtggttactagaggctggcctgctttgggtgcagtaatgttgggaaaatgttagtcaaaggatgaaaagttagagttggataggaagaataagttcaagagataatgttgatttttaagctttcagtaaattaacaaataacttatgttgacattataacatgacatttcaccaaaatcaaaggctgtctttcaaacatagcacatcttattttcattttgaatgtcacatgaatgaaccaatatgtcactccagctactgcatctattatgtagaagctcaggtagttattaatagttattattagtgaaaaaatatcataatcaacctacacataatgctgctgtttaaataccccatataatatggtaggccagaggaggtaggggtcccaaaagatggctctgcaagtaataacaacaaatttaaagcattggatgacccagtttttgaaacacttgttattgagcaaaaatcagtttcagaaaattattagagatgcctataattttatcaaagaccaattgcatcattaaagcattacaatttggggagacacaacagtgctgaggagatcattaaataggtgtatgcatcctgaagtcaagaatttaaaagaatcattgggtgttggagtgctcatttgccataaactattttgaaccataattaataatgaattttaaatcataaaggcaacatttcatacttaaaagatatatacattatatatatggtaaaatctatgaaaatgtttttttatacaggtttgaagtttttcagtatgttataaaagttaaatttataatgcatgggtattgtatcgaacaaatacatgttcaaattaaggaaaaactttgctttcctattttaattgttatctaaacaagacttacacatacacaatttgtgaacacacaatttcagaaatcttttcagagagaaacagtttaattacatgctttttgcctatttaccaatgaaatttaaggcagttgttacattttatttgtattacaatctccagagaactgaaaaatgttacaatagcactttaacattttaattgaaatactttaaaaattaaactgttagaaaaaatgataaggaaaaggagactgtccttcagggattgacttgtgtcccccccaaactcatgtatttgttccccaatgccatagaatgtgaccttatttggaaatagtgcctttacagaggtattcatgttaaaatgaggtcactagagtgagcccttgttcaatataataggtacttattaaaaggggaaattcagatatgcagacttactcagagggaaaacaatgtgaagaaacacagcaagaagatggccagcgacagacaaagagcccccgaggctgccaaaaccaggagacaggcctgaaacagatcctttcctggaaccttcaaagggccatcttgatttcaaacttctggcctccagaattgtgagacaataaatttctgatgttcttagccaatcagtttgtggcactatgttttggcagccctagaaaactaacacattatcttaacaaatgtttcttgtctaagatagacattttatttccataacatccacagtggcttaggraatttatgtaggaagtcatacactgtaattatttatttataaatttctgaggaacaacgatgaaactagcaacattagttgtttgatattcttaaaattcagagtagtaagagacaatgttgttagtcaattgatataaacaatactgaataaatgttgtgtgatgtggctatcatgtataaaatagttgtacagatttgaacatgaattcaatgccagtattgcacatatgtctctgtattcttctcaagaaacacaaataattaataggacgacacctgggtttaacaccagcatatggtggacctatattttccatatgcataccatatgctccctactaaaatgtatcagacaattttatgtataccaactagtaaggacccagtttccatccctttataacctccaaagccagaatgaggaatagacatttgacctagagttaatttttgaggtgtgtgaataaaccaaattaggtaactgcttttgtttttatttgctactctgagggaacagagtaaagcaatgctgagatatgaatagagatgtagaatcttttagtaacaacagccaatatattctgttttaacaaaagctctgttattattttatggttgactgttgataaatcccttaaaaactattgacttggtaggatatgatactttgggacctccaggtcagtctttgaggtggtcttgatagtgtgctatgtgttcacaaaatgtattaagatatgggaaaataaagcatttcaatatatatattttataatgtgtgtgtgtgtttactttttcagcaagttagttcattaccaagaaaaggccccacaatagaattataaatcttcaatcttttgttggcatctacaggatgggcctcaacttcagatgtttaactgctgtaaggacactggctcagttttactctgtcctttaggatctttgggaaaagatgcatgctcagagtcttctctggcctgtagcaatgctacagttccctctttcggtttgctccatgcttgcttcctgtcatgcacagttaacagtgccctccctcctgctgtcatcctcatttctctagttcttgagctcactgctgggagaacagaaccattactaaaatatgactgaaaagtgctgaagtgctcacccagccataacattcttctatttactgtccttgttatttatgttgatatttgcttaatctaggatgtaagagcttgacatatggggtgatttagcaacaccagggaaataaatattatccacagttctatcattgaatgacatgagattaataatatctgggctaaccattctacctgcatcaaatgtcgcaatcacagatttgaatattttcctttaaaacatacagtattagatttcattgaagcatggcgtgctacataaatagacttaaacaatcagggacccagcttggaccctctggcaaactgcgtgtgtttttttgttcaatcttacgttatataaagccttatggtcactttaaggcaaaaacagtcccaattctgcaaaatttgaataaaccaccccatagaataatcaaattctgaacctgatttgaagtgttttcctcctcctcactaagggactttgtaatgtaaggcagataaatgatagttcagtcttccctagctccccaatccatgctaaacttgctagccaaagattcttctgaatctacggtcaaggtaggggaaagaagagaggaaagtggataagaacattttaaaggtgaatccaagccttctgagccagatgaattgcgctagtctacttttttttttcttatggtgcatttctatggctgtctcaaatttctcagattccctctctcttggtgtgcgcagggcctctcttaattatgtttcttctaattaatcctcaaatgttgacgtaatgcacccaagccttgactaaaatcttcaggtcctgcaaggtcattctttttgacaagattcttttttaaatgattacaggccagtgtgcttcctgctagatccacacatggtgcatcacattcttgcacgtttgacacatcactggggcaaaactgattatttcacacttgccaccttctctgtttcccctttagtttttcaagcatgagtcaataaccattctacattggccccatacctatcagcaaacacatatgagattcttgattggtcaaagtttctctcaccaacttgggattaattttaccctccattttttcatgtgagtatgtaagtgggagtatgaggaagggcagagtatacaacttattgctcagctctctccaaagacatcttccttaaatattatggtttattatttcccaactctcaaccaccatgtatctttgatgtgagtgagaggattcattttaattatcttcttgaatttctataaacaatgcctctactttataatgactaaatccaaatttcatttttaacatgctattatatcagttgatagtctagaattgtgtttcatattttagaattttcttcaactaacttatgagtgccttaaggtcgtaaatcatgtcctgtatttaatttttttcttattgctcctgatccaggtaagccatctttaataatttttgttggatgattgagtgagactttaaaaggagatatagggagtaaggagctagatcatgatgggaaaaacttgaatcatgaacagatgatatagatgttaatattaataggacctaattggggtagtactttaaaataaacataacatatagaacattgcagtagtttaaaatgtcaccagctctttgactctccttcccattaggaggtcaagtctgtttccaccaccttgaacctgagggctttgtaggactgtctcaataaatacattgaagaataattgatattgcataactttgaggctagattataaaaggtcatgcagcttctgtaggtctctcttggaacacatgatttcggagactttagctaccaagaaatccagcaaccctgaggatgccatgtagagagataacaaagcaagaaagttggaaaagtttacatttaatcttaagtcatatttagagaaaatggaaagaaatcagaatttctttgttcctttcccccacctgtccaccaccacaatatttctcagtccaaggctctctcatttgcaaaatatttttaaattaagacatgttttataatgaaagatcaaattcaagatagccctctgttaaggatcccaaaagacctaaggttaagttttgtagactctctcaaagagtcaagaagtcttttaatgatgccaaggttgttcctcacagataatctctgtaaaataacaggagatctaataacttcaaagactttccccacaacatccttgagatctgtgagtgtgtattttttctaatagaaagaattgcacattaattcattgaaaacccacatagttttaaagaaattttatcaggtgggaatgcaagaacagggacagtawaaatttaaaaggaagttggatttcaggatttctgtgagcagaaagctagctgcgaacactcagctgcaaacaccagtcacttcttatgtaaaaggaaggatgattcagacaacaaaatcaagacccagaaggcagaccaaagaggtatgataaatcattcctaggcaataagactgagccatcatcaagaaactggcaacatgtactcagctggatttcagaattgctatgaatcagtgactctgattgcctcccatcttacctattttgaatggaattgtatcagttcttctatatgtgagccatcattgtatgttagctatatggtgggcagataacttgtctctttagatcatagatctacaggttgagagaaacagcactgaaggagctgtactgaaacaaccacaggcacagagcttcttacgtgcatggatctcatttagataacaggatactaaaacctcaaacctgagtgtgatattacaatatatgagacatttgaaagtcttgagagggagtgagtgtattttgcacgtagtgaaagtataagtacttgtgatacgaaggtggaccatgccctcaagttcttgacaatcttcattcatttaagaggtaggggctatgttaactttccttgaacctggacaggatattgtgactaacttgaagaacagaatatggtagaaaaatactgtgcaactttagagaaacatttgttcagcttgtgccagtctttttgaggacattgtctctttaagaacgtaaccatcatgtaaagaaacccaggtaccctaaggccaccgtgtagagcagtggtccccaaactttttgacaccagggactagtttcatagaaaagaatttttccatggagggggtgggatggtttggggatgaaactgacccacctcagataaacagacattagttagacactcataaggagcatgcagcctagatttcttacctgcacagttcacaatagggttctggttcttgctcctataagaatctaatgaccccgctgatctgacaggaggtgaagcttaggtggtaatggtcccttgcctgctgttcacctcctgctgtgcagcctggttcctagcagaccacagatgggtagtggtccatggtcaggggattggggacccctgatgtagagagatcaagtaaagaaaccatatacagagaggagatgtccatgcagcctctactgtttcagcactagttgtttaattctttctagcccaggccctggctatgcaagtgataggccttttaagataaccccatcctcagacattgtgtgactgctgctgcatgaaagacacaggtgagacaaacactcacatgctgagcccactcaactgctgagttcatgaacaaaataattgattgctactgttttaagctactgtttggggcttttataccacaacaggtaaccaacacaagaactattgaaatactgagaacatttgtttgtttgtttagaaaaaaacataaacaatgggtcagttacagagtttattttaccatcatggtttagatcagggtttctcaacaatggtgttaggcatttaaagcccggcaattttgttgtggggggcttgcctatgcattgtaggctatttaacagcatcattagtttgtatcaatagagaatacaaccttcccatcccccattatgaccaacaaaaacgtctacagacactgccagatgtcttctggggatgaaattcctcctgattaaaataactggttaacataaattttcagaaaggatagtaagggaaaaagaaacctggaagagaagagtataaaacttagccaaaaatttatatcaaatttcctaataataaactgtgaagtagaaacagtattgaaacaagaacgttctagaattagacactgcaaaatcatcaaaatattcatgctacccatacatatataagtatgtaaaattaggtttccattaagttatggatttgttgaggctcaccttgagtgtttatttcttgcacttttttcctcttatttcatgtttcagctgatttttatgttatcttccattgtttgaataaaaacaatttataaagtaatgactttccaagagatgagtttttattttctctcagaaaacctcacaacttagcattttaggcttttgaaatacttatcaggaaaaaatcactaatcaagactaacaaaatatgctatgtatttctgacagcataatctacttcttcaaattttgaagataattgcaaggcaacctacaattcagaaaggaaataatatcagaactgttagtcatggaaaaggaacaaaggggttaggactaaaggtgagggaaaactaagttttaatacaaaattcttgctttctcttgtagtatcaatgttttaaattattgacatgatatttctattttttcaaattttattgaatttatattcttatataaggtgtttaagaatgaactctgtgtagtttgttgtaatttgttatatttgcttcaaatttgtctttctgagcttttttttttgtaataattataattacaagttttcttcttgatgtctgttttttaaaaaaattgtgctctaaggcagaggaagtcctttggccaaaaaaagagcacaacatttgattattttttcccattctgaggtcagtttcaattgcaggttgtcacaaaccatgagaaaccatgattgggttaaagcaaattcattttcattattagagcaaatctatcactactacaatgacaacagcttagattatagtatatagtgctaggaggtaggaagaatcaactgcatatttcaagggcagggaatacccgaactctcccaaaactagcatacttttgtttacagtggaagtctaggtaaactagtgtcttatccccatctcaacttaactttcaaatatatgaaacattatctttcacttggtaactggcatctccctattataaggcatgtatctgtcatcagttgacagctaccacttatcagaggaataggacatttgttgcacagagcattcaaatatattaaagccatttttctcctttctacaaattttgtatagtgcaatgacatatgaatcaattggcaaactattaataacttctcaatgagtttacccccttcatttttcagaagggaaaggaattgaagagctgaatagatccagcatgccagtacatttacccttttactgcttttcattttaaagttactatcttttttgcaagggcaagatactaaatgagatgatttatattttttcatgtttgctttcaaagattaatgaacaccaccaaaaggaataaaaaaagataatattaggtagggccaacatatgaagcagaggcagtagttaatatataaactaaaattgcactgttgtccaccaaaatggtttatttcttaatttttatgtttatttgaattaatttggcacaaattcagtagttttaattaatagtaaattaatagtttgtcctgtttaatgtttatatgtacctcctgtatgggatgactgatggtttataaacacctttggcaattagtgggcagtttactgtatcttttggaaaaccagtgggactatttttcacaatagtaacaaacaaaatacaacataccaacatattatatagttatctgcctgaaacaacacatcttacattatgagtagattaactaatctcaggtggataaattgaagcaaataatagcacaatttctagttttgtttgctctttccttttcagtagcacaatttctagttttgtttgctctttccttttcagaaacacaacaaaactacttgatttgaaagtacatttttgtaaaagcccaatattttcccttttgaaatttaggtaacatgattactaaactttaaccattcatacacagaataataatctaaaactgatgctgatctaagacatcaaataagtctagctaaagcatattatagtgacagagtaaaaggagtagacttccttagctgtgtgtacagtaaatattgcttaggacaagaaaagagcacaagaataatgcttaagagcctaagtgtagaaatctgtcagctttgcgattgaagcttgggtcttaaatttttttgttctgtgattatgccttgatgtttgcacaaaccacaacatggagcaagattgactctytaaaagtttaaactttttactcaagtataatatacatacagaaaaacatacagcttggtagtttgcacaaacaccaaacaataatataatcagcacccagatcaagaaacagagcataaccaacagccagaatcttcccttatgctcctcacccatcagctactgccactccctctccaagaatagcttctactttaatttctaagtgtacaaattagcatgcttgcttttttgtttctgttttcttggtatggtagtttactttaagaaaaaaattacaaagtatgtttaagtaatagaaaagacagctgttataactgaaattcagattcttgaaaacttgtttaaaagattttgtgtggggataaacatgcctgaataaattagttttattgttatatcattacccacttttaaaagtaaagggctatttaggaattatatataattatacaaagtttgaattaaacataacgagataagtttccatgtgacatggtgaaattatcacaacttctaattatttctcaaatatgctgtatgttatgaagtgaacttaagaaaagtttctgttcatttatggttaaagccctctttttctaactcctcatataatagctattattgttttaatatcttcttaaataatttctctcttattctcgttacatctttcttctaccctttcttccttcctactttaattctttccttccttccttccttccttccttccttccttccttccttcctttttcccttccacctctttcctcactccttctctgtattattccattttcacactactgataaagacatactggagactgggtaatttataaagaaaaagaggtttaatggactcacagttctgcatggctgggaaggcctcacagtcatggtggaaggcgaaaggtatgtcttacatggtggcaggcaaagagcaaatgaagagccaagtgaaaggagtttccccttataaaatcatcagattttgtgagacctattcactaccacaggaacagtatggaggaaaccaccctcatgattcaattatctcccaccgggtccctcccacaacacgtgggaattacaggagctacaattcaagatgagatttgggtggggacacagccaaacaatatcattctctgcctccctgctttgtatgtatttactgtaarttaaccacatgtcaaatactgaggtagacactgagaacataacacaagaacattagtatacttgtcttcaaagtgcaacttatatatggaggtagaagagacttaagccaacaaaaaagtgaaatgctaacctgcattttggtaaaaatactgaagtattttctctctgtctttattttgtcccttaatttccataattggaatagatgtcctttatccattcaatggatgcctatcagatttagctttctakaaaaatttcaagttaaatttttgttaagatgataataaaatttagtgctgttgcttcctatatgaaatttctgcaatgctcgtgaggactcacatgatgcaataaaacatactatgtgcaaaccattttctaatatgcttctagcatacctgtctacatcacaggccaatataataaatgtttaaaatatgaattaataactaaagggggctctgaattacataataatgtaatacataagtccgtaggtgctgaggcctaaagtcaaatcttttctccttcactttcaagctatgggactttggaaaagttactaaaattattcaagcctcagattcctcatccttaaaatagagatatcaatggtgctgacttcataggagtttttaagaaaataaaatgaactcatatatataaaactactaatacattgtaaaagctcagaaaatagtttagctaatgtttttgcattcataactattcatttcctaactttactcaatattttcatgaaactatcctttcttgtagcatatagtcttcaaaaagttaaaaatacatatctttactatagaggtagaagcccttataattccacaaatattaattttataatattaatttataacagatgcattcattatgatgtgagaacccaaaaagatgaatgaatattttcagaataagatgatacatcctcagagggtagggtcaccctaatagttgttggttgaatgttcaacagctgtttgaacatattgtcatttgggagaaaaaagaaccaattcatcaaaatcaacagtactcacagagggagttgtacagtctcatagctacctttatatcaaatctactctttaaaaaacaacatgtaaaccatctgttatacataagaagacacaagttaacagtaacactgttattttcaacataagtggaatcccttaatgtaattgtataaatagcatggtgtgtgtgtgtgtgkatgtgtgtgcagccttatgtatttgagtggaacaattccataacgattaaatagaatcaaaactgggtctacagacagtttcagaataaatagtagaaaattgcagatggactaaaatgtcacaatgctaaacttttaacaaaatttctatccatgaaatgattttatcaatgcttattactcgtcttataggggaaggatggctttttgttttctggcttaatgttataaatcgataggtattgggtggtggaaaaatatagactctgttagagaatggagccasaggaggcaaaattgtctacaatcggcagctaccttttatgtgtgaactcagtagagcttttccttcctggtacctgacttgagactataagcaccctggctactcgattctcaccttcctcaaaattaattttgtttctactgtggctagaagatgaacatatttttaaaaactcaagttagtgattcatgctaaagaaaacaagccagttttcaaaaataatagtttcgtcatgagtcacagtgacatcagatggcataaatgctttgtcaagtggatcttactcaagagattccagcatcccctaaatgactcattgctcttgtgctgataaaacacagcccagcatatttctttccccacgttttttgagtttctcctgttgacttatacaaactgtctgaagtttttcttattttttatggttagtcattgattatgttattcatggatcgagaactgataaacatcttaatttcagaaaacactttcttkctccctatgccatccttttatatatttttttgagttggaatgttgtattttattgttgcagggtaaagaagcataaattctgtatgtatacattccaaaaatatttcaacttttaaaaattgtggatatcttttaaatataagtttataagttatttattctccaaacgtatcttttattacaatattaaatttattatcttctcatttaataaataaatgaaatgggaaactgccacaaatttagaatctaaagggtttattgtatatgcaggtacttatctaacataagaaatcatcaccagcacatggcaatatatcaaaattgaaatcctctccatttaaaattgtagtctgctcccagggcaggacagattttgtgggcatatgatctgtgcagttaaacagtccccacagttaaaaggtcatcatggtttatggctctgctgttgctgttttgaaattcttaataattgttaacaaggggtttcacattttcattttgcactgggtcattcaaattgtgtgtctggctctgatacaaaacaacacaaatatgagacatattaaattcttcgtttttgtgtaatttaatatattagcaatttaatttaaaaatatcagcttaataactaaatttgtgagatgaaagtctatcttgttttcatatttttttcttccatttatcctttattccaaattaatagagatcttatactactgaactaaaaaagttgtactacttaaaagaaaaaacaatataagaaccaaaaaccaatttttaattagtgttaacagtgtagtgaccatctatacacaaaatcttaagtacacatttgtgattatttccaaaactatgcggtagatctgttttggtatactgactgaatcctctttattgggccaatgtgcccatctccccataaatatgagtgttggttcctaatgttcaactttagcccttccccagctcctggtactggcagctaagatggcatctcaggagcgccaggtacagactttaccttagatgaatctttacccccttttggctctttctctattcccatactgtttctcttcctacattgagtcaataaattattagtattattttataactaatttatatttttatttcaaatttttggggggtacacgtgggttttggacacatggatgttctttcgtggtgatttctgagattttggtgtacctgtcacccgaccagtgtacactgtactctatatgtagtcttttatccctcaatcccctcccacccttccgcatctaagtcctcgaagtccattatatcattcttatgcatttgcatccttataactttgctcccatttgtaagtgagaacatatgatatttggttttccgttcctgagttacttcagttagaataatggtcttgaggtccatccaagttgctgcaaaagacattagtttattcctttttatggctaagtagtatttcatggtgtatatataccacatgttcttcatccactcgttcgttgatgggcagttaagttggttccatatttgcaattgcgaattgtgctgctataaacatttgtgtgcatgtgtctttttcatataatgactttttttcctttgggtagatacccagtagtgggattgctggatcgagtgatagttctacttttagttctttaaggaatctccatattgttttccctagtggttgtattagtttacacattcccaccagcagtgtaaattgttcccgtttcaccacatccagatgaaaattaagtccacaatgagatgccaccttactcttgaagaatggccataattaaaaagtcaaaagagtcaataaattattacamccaaatctcttctcaggcttgatttctaatttaagtcaaacatgcacttaagaaaatgtaagtgttatggaagctgatgtaagacaactcatatccctggaagtggaaccagagacaatgatgaataactttaaagaaattgcttactagaaaggttgcacaatartatcatacttcccacctcagaggttcaagggtatttactacatctttatcagcattgactgtgaatgtgcaaaaaaagaagaggggtggccattttgatagtgaaaacagacatcttgctttcagtgtaatttactatacttcaatgactagtgaagttggaaggtttctaatatgtctattgacaattcttatgagttcttcagatttttatggggatagaagtagaaattagtattatttattccatcataaaaataatgatctcataatcacctttatttgaaggacaatattatgaaggttagtgattaataactcttagttgtctctgagaacagaaaaaagtaactggcctcaactcgaagaacaaagacatttttgtgtgtatacaagaattttatgccatccaagagtattagcacaaataaataaaggcaatttgtaaattttttccctgaaaatctaaaaaacaagaaaactatctcttcagggtgattataattaggtctatgagactctcaaggtccctttagtgattcagaatctatagttggaaatacttattttaaaatgttcaggcagagagggaaggttcctgcttttaatcccagcactttgagaggccaaggtggggggatcacttgagaccaggagtttgagaccagcctcaaatataatatctataaaacatacatacatacatacatacatatgtaaaataaaagttttcaaaacataatcacaaatcttctatatatgcttacagtaaaaaaaatgtttcttaggtatataaatttcaagatttttttctaatactttgagtctaagtacaaaagtgacctgattgtgataattttattacataaatgctagaaatacaaaataaataataaagatttgtattagtacatttttacactgctgataaagacatacctgagactgggcaatttacaaaagaaagaggtttaatggacttacagttccacgtggctggggaagcctgacaatcatggtgaaaggtaaagaggagcaagttacgtcttacatggatggcaacaggcaggagagaacttgtgcagggaaacttcccttataaaaccatcagatctcgtgagacttattcactatcacaggaacagaatgggaaagacctgtccccatgattcaattacctcccactgggtccctctcaaaattcaagatgagatttgggtggggacacagccaattcatattattctgcccctggcccctcccaaatctcatgtcctcacatttcaaaactaatcatgccttcccaacagttccccaaatcttaactcatttcagcattaactcaaaagtccacagtccaatgtctctcatctgagataaggcaagtcccttctgcctatgagccagtaaaatcaaaagcaagttacttacttcatagataaaatggggatacaggtgtggggaaacacagccattctaaatgggagataatggccaaaacaaagaggtttcaggccccatgaaagtccaaaatctggtggggctatcagatctttaggctccaaaatgatctcctttgactccttgtctcatatacagctcatgctgatgcaagagcttagttcccatggtcttgggcagcttcaaccctgtggttacgcagggtgcagcctccctcctggctgctttcaaaggctagcgcygagtgtctgtggcttttctgggtgcaccatgcaagctgtcagtggatctaccattatggggtctgaaggacagtgactgtcttctcacagctacactaggcagtgccccagagggattctgtgtgggagctccaaccccacatttcccttctgcactgcccagcaggcattctccatgagggccccacccttgcagcaaacttctgtctggacccccaggcatttccataaatcttctgaaatctaagcagaggttcccaaatcccaattcttgacttctgtgctcctgcaggctccacaccacttggaagctgccaaggcttgaggcttgcactctctgaagccgtggtccaagctgtacttttgcctcttttagtcatggcttgaacaactgggatgcagggcaccaagtccctagactrcaaacagcayggggaccctgggcctggcccatgaaaccacttttccctcctaggcctctgggcctgtgatggaagcggcttctgtgaagacctctgagatgtcctggagatatttctcccatggtcttggggattagcattcagctccttgttacttatgcaaatttctgcagctggcttgaatttctcctctaaaaatgggattttyttttctatcacattgtcaggstgcaaattttctgaacttttctgctctgcttcccttataaaactgaaagcatttatcagcacccaagtcacatcttgaatgttttgctgcttaaaaacttctcctgccaagtcaggcatggaggctcatgcctgtaatcccagcattttgggaggctgaggtatgtagattgcctgagctcaggagtttaagaccagcctgggcaacatagtgaaatcccatctctactaaaatacaaaaaattagcatggtacggcagcatgtgcctgtaaccccagctacttgggaggccgaggcaggagaatcacttgaatctgggaggcggaggttgcagtgagctgtgattgtgccactgcacttcagcatgtgtgacagagcaatactccacctcaattaaaaaaaaaaaaaaaagaaaagaaaaattcctccgccagataccctaaaccatctctctcaagttcaaagtttcacaaatctccaggacagagccaaaatgctgtcagtgtcttttctaaaacataactagaatcacctttgctccagttcccaacaagttcctcttttccgtctgagaccacctcagcctatactttattttccatattgctatcagcattttgggcaaagccattcaacaatctctaggaagttccaaactttcccacattttcctgtcttcttctgagccctccaaactgtttcaacctctgcctgttacttagttccaaagtcactaccacaattttgggtatctttttagcagttcccactttactggtaccaatttaccatattagtcagttttcacactgctgataaagacatacccaagactgggcaatttacaaaggagagaggtttaaaggacttacagttttacatgactgcagaagccccaccatcatggcagaaggcaaggaggagcaagtcacatcttacatggatggcagcaggcaaagagagatagcttgtgcagggaaacttcctcttataaaaccatgacatctcatgagacttattcactatcacgagaacagcatgggaaagacctgcccccatgattcaattacctcctaccaggtccctcccacaacatgtgggaattcaagatgagatttgggcagggacacagccaaatcatatcaagagtatttcaatcaaatgaaacactttaaaaggatgacatggtctagtggttgttgtttttgtttttgtttttcccttgtgccatttggggattctagggcaattcataatttagggaataataatgtcattccttgaaataacagactatattgaggactctgtcttgcttctatgggggctaaagaatgtactataaatgggaaattaatattttattataaaaactagtataaggctgggtgtggtggctcatgcctgtaaacctagccctttggaaggctaaggcaggaggatttcttgagccctggagtttgcaaccagctgggcaaaatagagagaccctatccctatttaaaaaataaagaataaaaacaatttttaaacctagcatgaaataaatgaaagttattttcttattatttgttgaacattccaattaaaatagccctaaaaaatccaattctcagaattgatattcttatgttaaaatttacaatcttcatgcaaattaattctctccctcaaattccctgtcttgcaataaaatcatattttaatttatccagtaagacaaaaaatgtaggtttctccttacattacmttcttcttaatccttctgtatctatccttgtctaagatcatcacagcaagcacatatttgttttgtttttcatcatacaaatcctctttctaagagtattcagtcttcccattttgygtatcaatggaaagtaaggcctacttatggaccttgttgtaggatcattacaacaaacacagtgatgaattgaatgactcttgcctctacttatatccacttattctattgtactaatcttcctttaagagaacttcaatcacagcatcatacattgaaaaggaattctagattgtgttacatgacatcctcttttctcagataaggatataatagctcacataagtggaactactgtcccatgacttctgtaatacttagtatgatcttaaaaactcccgatccccattaattatttgttacactacattgtatctcctcttatattttgtcaagctctctaaagttaactttgtacttcataaatatcaatgctaaattttctttcctagagtctcccaaatttgtttatatttcatttattaagcttaattctagattatactttacactgatccttatgatttttatttaggcacatttgcttatacattaattataaaaattttacatttttgcttttcataatattttctttacctgggatccattttttttctttacctgggatccatcctaaactccaccagtttttcagagatccagtaaattttcaattctgttgtgaaacctcccctaacatttcactttcccttcaggtttggcaattcttagtagtgtgcatcatgaagtttagcactcaattatgtgctttcccttgactaacccagcctcttagtagcaaatattataaccaattgtatttcatttaagcatttgagggaaatggataggtggacaaattagatagatagatagatagatagatagatagatagatagatagatagwgrtaatagacagatagatagataattagagagtttagaaaaccttggaagaccaaagtgtctgttttgaagtctatgctgacagggacaatgttttaaaaacattgaggctattctggaaaaggcaatgcttacttgccctgaacaaatcccagaatcaaaacaaaggtctcacttatttgaatatgataggtggggcccggataacatgcctccacctttttccaagaaaaggctacaaagatgaattctttataatttgaaaaggtgggagaaaaatatggaaagttaactaaaacaagctgctgctaatgttaatgaagaacaagatatgaaaaatatttatgacagtgacatggttggcattgcaggtgtgtgtatcttgttatcacaagaagcatttaagtcttagtagtaatatatcatgtgttacactccttcatacagacttgctggattcaaaattctgccctatagtgacttgaggcaagaaaattaattttactacatgttgccaatcaygtttactgtcaacaaatgttggataataaatttgccttataagttgattgttataactgaaggaaatagctgaagtgccctgtgtaaataataggtgcttcaagaccttgactttttgtccttctttctccctcatatgttattctatagatatttattaatacagtgatgagcacataaagttaacygagacatttcctctactttctgatcaatagatttattaataaaaattataaaataacttgaaagttaattatagtaaacatgtatatgtttttttttccatcgtaaaaagacctctttccaatagtatttactcatcccattttgtattttggtcaaaggtaaggtctgtatcacataatagaagccagagaggacagtttctatcattctctatccaagcatagccaamgggctgacccatagcttaaattaggagtaacttttttcttccaaggtggtaaaacttgatacccaagaatacagataatttattcatgggataataaccttttcatacattctttaaaaagtaaatgaaataattcacggagagtatttagagtgttgaatatagtaaaatataattataattagctcttattattttgattatttccttgtcctaattattactattacatatttgctataaaagtcatactgtccttggttactttaagcaaattgtggtctaaaacagttgtgtctatatggaaagaaagtaacaataaaagtaggactgttgcttctggagcttccttggtacctgtttgttctgtctcccataaatcctgagaacttatgatagattccgaatatttaagccctttttatgaagttagccagagttataaccattgcttatataccaaaacctctaagtgattaaaaatgtgaaataagtttgtctttgaaattttaagtagaggcatacataggagataatgtgggttaggctccagacaacaacaataaagtgaatatcacaataaagataaccacacattttttaatttccctgtgtatataaaagttatgttttctactacactgtagtctattatgtgtgcaatagcattacatttaaaaaaccaatatacctactttaattaaaaaatactttattgctaaaaatgctaccaatcatttgggccttcagtgagttgaattttttttgttggtggaaggtcttgcctcaatgttgatgtctgctgactgatcagggtggtggctgctgaaagctggagtggctatggtaatttcttaaaatcaaaaaacaatgaagtttgccacatctatttactcttccttttacaacagatttctctatagcatgtgatgatgttatatagcattttacccacaatagaactttcaaaattggaaccaatcctctccaatcctgccacagctttatcaattatgtttattctaaattttttgttgtcaatttgaaactgttcatagcatctttaccagcagtttgtttcatctcaaaaaagcactttctttgttcatccgtaagaagcaattcctcatctatttacgtgtgatcatgagatttcaacaattcagtcaaatcttctagctctagttcccttgccatttttaccacatccaygattacttcctccactgccgacttgaaagtctcaaaattgtctatgagggttggaatcaacttatttcaaactcctattcatacttatattttgacctccattcacaaatcataaatgttcttagtgccatttataaaaatgaattctttctagaaggttttcaatatactttgccttgatctatcagtggattctctctctatagaagatatagtcttaaaattatatttcttaaataataagacttgaaagtcttgatcaatgggctgcagagcgaatgtgtcagcaggcatgaaaataacattaatctctttgtacatcaccatcagagctcttgggtgaccaggaacattgtcaatgagcagtaatattttgaaaggaatctctttttctgagcagtaggtctcaatggtggactttaaatattcaataaaccacactgtaaacaggtgtgctgttatccaggttttgttttccatttatacagcacatgcagagtacatttagcattatttttaagagctataggatttccagaatggtaaatgagcaatgacttaaacttaaaatcgttagctgcattagcccttaacaagagagtcagcccagcctgtcctttgaagctttgaattcaggcattgacttttccttcatagatatgacagtcctggatggcatcttcttttaagataaggctatttcttctacattaaaaatctggcccaggcctgatggtgcacacccataatcccagcattttgggaggccaaagtgggaggactgcttgagcgcagaaattcaagaccagcctgggcaacaacatagtaatactacatctctgaaaaaaaaaaaaaaatagctgggtgtgtgggtgtggtggcatgcacttgcaagactcagctagctacttgagtgactgagagactgaggtgggaggatctcttaagcccagggggttgaggctgtatgagctgtggtcatgccactgtactcttccctgtgcgaaagagaaagaccttatttgagagaaaaaaatatgttgtttagtgtagctatcttcatcaatgatcttagatcttctggataacttgctgcagcttctacatcagaacttgctgattccactttcaattttatgttatggagatgactttttcttaaacttcatgagccaacctctaacccagaccactaaaactttcttcatatcaccaataaggctgtttaatgttcttattattaatgcattcattggagtagcccttttcattcccttcaaaaagttttaccttctattcacatattggctatttgtcacaagaggcctacctttcagcctgttttgggttttggtgtgttttccttactaagcttactcatgtctagctttgacttaaagtgagaaatgtgaaaatctttcttttacttcaacccttagagatcattatagggttgctaattggcctaatttcaatattgttgtatgtcaagtactagggaagcccaagagaaagagagattgggaaacagctggttgatggggcagtgagaacaaatattaataaagttttacttgttctcaaagtttactgtcttatatgggtacggctcatgtcaccctaaaacgattacaaaaataacatcgaagatcaaagatcattgatcagagatcaccataacagatataataataacaaaaaagttggaaatattgtgagaattaccaaaatgtgacagagacataaagtgagcacatgctgttggaaaaacggcatcatagaattgttcaatggagggttgcaacaaactcttcaatttgtaaaaaaaaaagtaacatctacaagtgaagtgaagtgtgataaaattatgtatgactgtaatacaaagccttgggtttatttaatcattagttgaatgtatcaattttgtattttaaagcatttaatatttccatgattctcaaaatggatagcagacatgaaagaatactatggcaaggctaggtttctatttaagatcttgaaaaaatagagtagtcttatatcctgttgttaactttttaatatattttttcttattgcatttatatttcttggaaaagtttacattatattttgataaaattcactttctcatttgccagttctacaagattgaggaaattctctactatcaataaagcttaattttcttactgtgaaaaagaaatgtaatactattttcttcctggtgtatttgtttttggaacgaatcacatgaagtattatgtacaatgtactaagcaatattggtcttttaaataaaaatatttgcaagaatcaatacttagaataacaaagaagtcttagttttaattattgaggcattccacaggaaagttatggtcatttagtctccaatttaaccaaaacatttcttttatttctgtttcagtagatatagatgtaactctatatgcacccactataatacatacgtaaccttttcttgaccttactgaaaaataataccattagaagggcacttcatttaagttatatccactatttcctttgagagttattaggttaaggcacaatcacaaggctgtaaaaagcttaacttgctttacatgaagtcyaactgtataagtaccttacactttaatgtatcaaggggcaggtagtaatatttgtgaacaatttcacttctgtatgtttatgtctgagcttacacacacacacacacacagtctctctctctaaaattaactctgttctagtcaatatattaagcgacttcaaactaatatgtatggcttgatgacctaggctgccagaaaaattatgcatcagtttatgctaaagcctaatctatctatctatctatctatctatctatctatctgtctgtctgtctgtctgtctgtctgtctgtctgtctgtcthtctatctacattatctatctacctatctatcatctatctatctatcatctatctacattatctatctatcttatctatctatctatctatctatctatctathyatctatctaatatacaaatttgaccccsaayatacahccttttttcaataacgattacatcaagtgctcctacctctcttgcctcccattccacctcctccacctcttttgcctctgccacctgtgacacagcaagacctcttttttctcctcctcttcagtctactcaatgtgaagacaatgaggatgaatacctttatggtgatccacttccacatggtaaataaattttctactttttatgatttccttaatgacatttttttctctaccttattttgttgtaagaatatagtatataacatgatataatataaaatatgagttaatccattttctatgatatcaggcttccagtcaacagtargctattaataattaagtttatggggtatcaaaacttacatgcagtttttttggctgcactggggttaacagctcctacccccatgttgttcaagggtcaatctcatgcgcgtgcacacacaaacacacacaatctaaacttaactctgttctggtcctatattaagtgacttcaaattaatatatacactctgatgacctaaattgacaaaagttatgtatcggtttatcatcaaaatctgatctaaaattatgtgaataaatcaaaatacgtatattttttcttcttcaaagacatggaactaattgtctcttgcacagcagaaagagtctaagtgcttatattgctaaagcatattgattttctgactgtaggattcatcataattggatagtaaaatatcctgtttaatttgtgtcagtattgtcagaaatatgtaatttagaagtatacattaagtgaatttaaataagtcccttggatgtatttatttatctacctcatttgaattaaaatgtccttctgtatggtaataagaagacatagaattcctatttaatgatgaagaatgattagaattttaacatttcttttgcaatataaattaatcctctagttagtaaaaaatggagaagaatatgccttgttgctctaaagcacttaacacagaatgctatcttgcccattaactatgagcttactgcctctttttccttgcatgtttttctaatcaaggacatactttctcccctgagrcacgtgggagtttagcaattacttgcagctctaacactaggcaatttcttctgggactgcaatctgttagagttcaattttctcaaccacagacaaaatgatcagaatgaattcattccttcagaatgaaaccaagtgaataaactgaatgtgattgaaatgaacttatgcggcactcatacataaatcaacagaatacccaccccccccacagctcagctgtacatacttatgacatgagtttcatattccagcaattttttgacagttttttgtcctaatcctccaaaaagcatatttaaagtcccagtaaagtttaatataaatgtactaattgtaatttcatatagatattgctgtcatgtaaagagattgcattacattgcctgccctccaacattagagatgtaagacagctgctgtgacaagactttactaattctgtgtggtaacaaatgtttttgtatttgccaatctgttaagttcacacacatgcatacacacacacacacatasacacacacacaaacacacatacacaaacacaattttttwaaaaattttcacttatttaaagatgagaaaggctgagtattttttacttgtatattggtcatttatttaggattttttggtgaatctattaatactcctttacgatatttcagttgagtttttttttcattttctttgttctttgtagcagcttatcctcatttaaagtattgagtctcttgtcatatgtgttgcaagtatttctcaagattcagttacaacacagacatactactcaaaaaatgatataacaaatacacaggtttataaaaccatatttttcgcattattgccacatgctgggaactataattcacacaaatatggtgaacagagtactgattgggtaaatataatacatctatttaagagaatatgaggttattaaaaagaatgaagcagatctatttgtgatatacaagatacattataggagaaagataattctgaaaagtgattttaggtgataagtagacattagaggcaggaatgagagtttcatgttttattatataaccttcagtattttttaaaatttattacaatatacttgcattacctttgtcactgtcatcatcattgtcatcagctttatcaacatcattattgcagttgtcattgtggtcatcattattcaagtacagaatcattcttgtttagcttttagtaacaaatttatatttaaatataatttatcatgtaacttttctagttttggttcctccaaagaaaaacatctgaaacagcaataagttctaaagggtaagagtgagtgggagaccctttgggtgattacattttgtgtaacaccttggataaattttattctgatttttctaggagtgactttttttttgycatggaaatcttttattttcaagagtctcaatcatactgtacatataaaatgagaaatttagacttagaaaaatttaggttacaactgtatccagctatctacgattccctagctgttccactttaatatcatcaattagtcaagattgcagaaacactcagcatatatgaatggtaaaatggccagatcacaaagcaactgtgtgagtttatgagactacaaacagggagaaatattgcatgtaatctctactttagcgaatatatttaggaaattttatgtatatatacctatattatacataaggtcatgatctttggattaccaatcacctatgtagaactcatgaagcttatgaaaggactgactgaattgacaaccaaaggaaatattccttatcagatataggatttactacatttatctatgcatatttcagttctataaaataagggtttatcaactacacactataaaatttgaggaagttagataatgaatcagagagagaaagacagagggagagcacttgttaggaacgggttgtcttctaatgtttatttgtctggtgattttccatagttcagaatatagctttcttacttatagatttgaaatctgattttgtcttcacactaaaagcagatttctttttgtttagtgggctcatattaaaaaaaaactcatgagaatgatgctaattaatcataatgccacatgaccagtgttattttgatctagacagacacataagggaagctaaatcaaaatctgaagcttgtatggatatcacagctttggaatatagaaagtaaatttaagattaatgcaaaaactaaaataacctgttgcattcctttcctccaaatgagatggtcataaaaaatggcactggcatttgcagaattcgttcaatgaatattttgcatccacctccaaaaacggatggacttgccaacagaatcatatttctcaaaggcctttgcttaaagcgtacttaagtgaaactgtgcttgagatgactgttctgacttttacttaattatttatttattgtaaagaaattggttagctattctcatcttttgactaaccacttttttttagtttttaatttttgtgggtatgtggtaggtgttcatgagatattttgatacaggcatgcaatgtgtaataatcacactacataaaatgaggtatccattacctcaggtatttattctttgtgctacaaacaatccaattatactttttttttttctgagtctcactctgttgccaggctggaaggctggaatgcagtggtgtgatctcggctcactgcaacctctgccttccaggttcaagcaactctcctgccttagcctccccagtagttgggaatacaggtgcgcaccaccacgcccagctaatttttttgtatttttagtagaaacggggtttcaccatgttggccaggatggtcttgatctcctgacctcatgatctgccctcttcagcctcccaaagtgctgagattacaagcatgagccaccacgcccggcctatattctttcagctattttaaaatgtacaattaaattcttattgatgatagtcaccctgttgtgctatcaaatactagattttattcattttttctatttttttgtacctattaactatacccaccttcactctcccaccccctaactacccttcctagcctctggtaaccatcattctactctctgtgtcgatgagttcgattgttttgatttttagatcccacaaataagtgagaacatgtgatgtttgtctttctgtgcctggccttttcacttaacataatgattctcagttttttcatccatgttgttgcaaatgacagaatctcattctttcttatggatgaatagtactccattgcgtacatgcaccacattttctttattcattcatacgttgatggacatttaggttactttgaaatttttgctattgtgaacagtgcaacaacaaatattggagtgcagatatctctccatattctgacttcccttctttagagtatatactcagcagtgggattgctggatcatatgttagctctacttttagttttttgaggaatctccaaactgttctctatagttgttgtaataatttacctttttaccaacagtgtacaagggttcctttttatctatttcctcgacagcattttttattgcctgtcttttggacaaaagccattttaaccgggatgagatgataacttactgtagttttggtttgcattttgctgataatcaatgatgttaaacaccttttcatatgtatgtttgccatttgcatgtcttcttttgagaaatgtctgttcaaatcttctgcccagtttttaatcagactacttgattttttcctgtagagttgcttgagctgcttatatattctgtttattaatcctttgtcagataggtagtttgcaaatatttcccaccattctgtgagttgcctcttcactttgttaattgtttcgtttgctgcttagaagccttttaatttgatgtgatcccatttgtccatttttgctttgattgcctgtgatttggaggcattactcgggaaattttttgcccagaccaatgttccagagagctgcccagaggttttctcgttgtagtttcaaagtctgaggtcttagatttcagtctttaatctttaatccatttctatttgatttttgtacatggtgaaagacaggagtctagtttcattattctgcttatatgcaacaatttctttctgatgtataaataaccttgataattcaaatcctactgtaatgagaagattgcggtcacttctaaagtgaccctgacatgacatatttttattattttcaaataattctgaaagatatatctcatttgaattacatcaatcaaggaaaaaatacatcaaattatataaatactagtaatgtactaattctgcaattgttacaagaaaattcaattcctgtactctaatagctcattctaaatatttttgcagctctggttctctaatgtcaagatagacataataatcacaaaattattgtaaaattaaaacttaatttaaaaagttattttaagggaaacagatttaatgatagcctttcacattttgtcatgtttagaatttattttggacatataaaaaagccatttacagaaagtacaatagaagaagaaaaacgactagcttacaaagggtaattgatgtagaggtggtaactagggcagagaaaagaagatctgaaatatttgagttaagattcactaagaaagagctggaaagacacatcagttagagttttggtcatgataatgtatttggaaatttatcataattcattcctaaacagtacatgtggcagaataatttagaagctacatgttaaaagtgtattcctccttattttgctttggatttataatagtaataaaacatgtatttttaaagttcaagttttataaaagaagctgacgggtaatgaatgtcattattggcgaaagctctcagacatttagacatcagtatttgttggcaaaagaaaaactaactgatgagttttcaaaacagaatgaagaagacttctaggcattgtatgctagacatgaggcatacaattatatctcctaatgagacataaataaaaatattttattattgaaataatccaaattgaaaatttctctccattacttagaatttttagttaaatgtgactagctagagaatgacagtaaaataaaactaattatatttctttaatcttaattgttacattttctttgcttctaaaaattacaactgtcatctaattgtttttcaagaataacttgtttattctctatcatataccaaatgaagtatttgcaccaaaaaagaataacttaggagcccaaagctaattagctaatacttatcagagctgaatattaaatttagataagactgatatcaaaaatatcagaattaactagatactgacacatttttatcaataattacaatacacttcatagtttggcctccaattttccaccctcatttgtttaaaaatatttgtggaacactagtttttgtaaaatatattattagagaaaaaataaccaagagaagaattccttgccgttatcaagttactggtcaatgaatgaattaatcagtgtatacatgacataataataaatcatatttttagaataaaatggagtgaagtagatactctaacgcaccttccaggtctgccttcagaaactgctgcacctgctgagggtgctatctgaatatggccttcagctatcaatcccttcagatattaactcagctgaagagtgtcaactcaccctaaattatctctctcttccaagggtggctcatatctaatggctgatccaatcagtagtatagaggtttggctaccttagcccagtgaaggaccactccgtcaggccactctagttacagaaggtccatgggatcattcaaaacggttgttgggcctgaatcacaacttcatattcccctctgcttgatattcttccatgccatacatgatcccaagcacattccgtaacaaacaatttgtgtggtacactcgtctcaggtagacaaccaatccagcactcttcatcaaaaagactatcctcttctcagggtcaagtagggctaccttttcataaaccaagactgtataggtggatctgattctgtatactctattctacttttaaaaatccttacaccactattattctccttattattgtggcttaatagtaaatcttggtatgtagaatggtaatctcattttgttcttcttcaggatggtcatatacctctgtgactattttcatctccataagtattaaatttcccatcaaattgagcttgggttttattagcattgtgttgaattttaaacaaattggagagaaataaactctttacaaaattgagtctttgagtttacattttccatttatttatgtgttaaatttatcaataatgattgttttttgagtagacaccttacacattttgtattacatttctttctaagtagttggtggttttgataatttcaatataattctatgtgtgtatacatgtgataacatgtaattatactatgtacgtactgtgatattttttgtaattacactgtttrcatcataggcttaatgtatttttcacatttaaagattttcaaatagtctgtctttaagtattgcttatgtcccattctctctttcctcttttcttgaaactgcacttgcaaatatgtttcagcttgttaccatgatcacatacctttaataatcttttctgcatttccattttttaaaaaatttctcttcatgcttttgttgaaatcttttgatctgactcatcttttagtgtaacaatttcctcttcaactgtgactaatatgatattcaaccaattcaccaatatcttaattaaagtaattatatttatcagttcttaattgtcacataattatctgtatatactcagaagtagaactatcaattgaaatttcattttgtcttgtaaatactttaatgcagatattttaaaatatatataatcactctattatctagatttcctataaatatatttctatcatttagatttcctataaatatgtttatattgtatatatttttatgtgggtgtgtgtttggatacgttgtatgtcttatatataatactgaatgccagatataaatatgtgaaaagtggaaataattgaaaaatctgtataatattatatttcctaatagatgatttattttgcatctgggtgatggctagtatatagaatgtctatcttaattcaatttagaattgagctggttggtaactggtcttcagtctcagtgtgaactggctattccatttcgctcacatttgtagggtatagccctttggattccaactcaaagcttaagatatttaccaggttgtctttttcttctctctatctcgtcaacaatttttgtgtcttcagcttagtgacattgctcaagctctgttcatacatctcaaaatatcacctggtgcttttggaatccacagctcaaagggaaaagaacttttatactctgagattatttctcttgggagtattgcttttggtttctctcttatactgaatcttgactctgcaaattctcactgctggctccactatgctttaaacatacattattttatcaaatattctagttgttctcaagataattgttccaaaacatactagtcctttattgccagtaaacggaagtagtaagacttaaagatggattgaatatagacagatcataggagaaatatcaaggaagcctcaaaagtttaggtgttgaataactgagtaaactatcgtgccatttattccagtaaaaatagtaaacaaagagcaggtgcagaagttgatgagatcaaggtttatggtaaagaatatcaaatttgagatataatgtggacagaaatatacaagtctaaaacttatgcaaacaggttaaaaatatgaatttcagagtcattagtctaaactgtaatataaagctattgcactacataagatgacggaccattaaagctagaaaaggaaagtgatgaaaatattgagtcctgagaacatcaacattaaaagttgagattggtctttccagggcaagatggccaaataggaacagctccggtctgcagttcctagtgagaccaaagcagaaggcgggtgatttctgcatttccaactaaggtacccggctcatctcactgggacttctgcagcccacagagggcaagcagaagcagggtgggatgtcgcctcactcaggaagtgcaaggggtcagggaactccctcccctagccaagggaacccttgagggactgtgccttgaaggacgttgctatctggcccagacactatgcttttcccatggttttcgccaccagcagaccaggagattctctcgggtgcctacaccaccagggccctgggtttcaagcacaaaactggcggctgtttggtcagacatccagctagctgcaggagtctttttcgtaccccagtggtgcctggattgccagtgagacagaatcattcactgccctggagagaggactgaagccagggagccaagtggtcttgcttagtggatcccacttccattgaaccaagcaagctaagatctactggcttgaaattcccgctgccagcacagcagtctgaagtcgacctgggactctggtgcttggtagggggaggggcatcagccattactgaggcttcagtaggcggttttcccctaatagtgtaaacaaagccactgggaagttcgaattgggtggaacctaccacartgaggcaaagctgctgtagccagactgcctctctagagtcctcttctctgggcatggcatctctgaaagaaaggcagcagcctcaatcaggggcttgtagataaaactcccatccccctgggacagagcacctggggagaggggttgttgtgggctaagcttcagcagacttaaacattcctgcctgccagctctgaagagagaagtggatctcccagcacagtggttgagctctgctatgggacagactgcctgctcaagtgggtccctgacccctgtgcctcctgactgggagacacatcccagccagggtcgacagacacctcctacaggagagctctggctggcatctggcgggtgcccctctgggacaaagctttcagaggaagaagaaggcagcgatctttgctgttctgcagcccctgctggtgatacccaggcaaaaagggtctgcaatggatgtccagcaaactccaacagacctgcacaagagaagcctgactgttagaaggaaaactaacaaacagaaagcaataatatcaacatcaacaaaaaggacgcccatgcaaaaaccccatccaaagatcaccatcctcaaatatcaaaggtagataaataaacatagatgaggaaaaaacaagaatgccccttctccaaagaatcacaactcttcgccagccagggaaaaaaactggatggagaatgaatttgataaattgacagagtagtcttcagaaggtgggtaataacaaaatcctccaagctaaaggagcgtgttctaacccagggcaaggaagctaagaaccttgacaaaaggttacaggaactgctaactagaataaccagtttacagaagaatataaatgacttgacggagctgagaaacacagcatgagaacttcgtgaagtatacacaggtatcaacagatgaatcgatcaagtgaaataaaggatatcagagattgaagatcaacttaacaaaataaggtgtgaagacaagattagagagaaatgaaaaagaatgaccaaagcctccaaaaagtatggaactatgtgaaaagaccaaacctatgtttgattggtgtacctgaaagtgacaaggagaatggaaccaagttggcaaacacacttcaggatattatccaggagaacttccccaacctagcaagrcaggccaacattcaaattcaggaaatatagagagcaccgctaagatactccttgagaagaataacccccagacacataattgtcagwttcactaaggttgaactgaaggaaaaaatgttaagggcaaccagagagaaaggtcaggttacccataaaggggagcccattagaawaacagcagatctctctgtagaaaccctgcaagcyagaagagagtgggggccaaaatacaacattcttgaagaaaagaattttcaacccagaatttcatatccagccaaactcagcttcaaacacaaaggagaaataaaatcttcacagacaagcaactgctgagggattttgttgccaccaggcctagcttacaggatctcctgaaagaaaccctaaatatggaaaggaaaaactggtaccagccactgcaaaaatgtaccaaattgtaaagaccatcaacactatgaagaagctacatcaactaatgtgcaaaatcaccagctggcatcataatgacaggatcaaattaacccataacaatattgaccttaaatgtaaatgagctaaatgccccaattaaaagacacagactggcaaattggataaagagacaagacccatcggtgtgctgtattcaggagacccatttcatgtgcaaagacacacataagctcaagataaagggatggaggaatatttaccaagcaaatggaaagcaaaaaaaaaaaaaaaaaaaaaagcaggggttgcattcctagtctctgataaaatggactttcaaccaacaaagatcaaaaaagacaagagcattacatagtggtaaagggatcaatgcaaaaagaagaactaactatcctaaataaatatgcacccagtacaggagcacccagattcataaaccaagttcttagagacctgcaaacagacttaaactcccacacaataatagtgggagactttaacatcccagtgtcaatattagacagatcaacaatacagaaaattaacaaggatcttcaggatttgaactcagcactggaccaaacagacctaatagaaatctacagaacactccaccccaaatcaacggaatatacattcttctccgcaccacatcacacccattctaaaattgaccacataattcgaagtaaaacacttctcaacaaatgcaaaagaacagaaatcataacagtctctcagaccacagtgcaatcaaatgagaactcagtattaagaaactcacttaaaactgcacaactacatggaaactgaacaacctgctcctgaatgactactgcgtaaataacaaaataaagtcagaaataaataagttgtttgaaaccartgagaacaaagacacaacataccagaatttctgggaaacagctaaagcagtgttaagagggaaattgatagcactaactgcccacatgagaaagtgggaaagatctaaaattgacaccctaacatcacacttaaaagaactagagaagcaagagcaaagaaattcaaaagctagcagaagacaagaaataacgaagatcacagcagaactgaaggagatagagacacraaaaacccttcaaaaaatcaatgaatccaggagctggttttttgaaaagactaacaaagtaggtggaccactagccagacaaataaagaagaaaagaaagaagaatagacaataaaaaatgaaaaaggggatatcaacactgatcccacagaaatacaaaagaccatcaaagaatactgtaaacacctctacacaaataaactataaaatctagargaaatggataaattcctggacacatgcatcatccaaagactaaaccaggaagaagtcaaatccctgaatagggcaataacaagttctgacactgaggcagtaattaatagcctaccaacaacaacaacaacaaaaagcccaggaccagacggattcacagccaaattctaccagaggtacaaagaggagctggtaccatccttctgaaaatattctcaacaacagaaaaagagggactcctccctaacacattgtatgaggacagtatcatcatgatgccaaaacctggcagagacataacaaaaagagaaaaattcaggccagtatctccgatgaagatcaatgtgaaaattctcaataaaatattggcaaactgaatccagcagcacatcacaaagcttatccaccatgatcaagttgacttcatccctgggatgcaaggctggttcaacatatgaaaatcaataaacatagtccatcacggacacagaaccaatgacaaaaaacacatgattatctcaatagatgcagaaaaggcctttgataaaattcaacaacacttcatgctaaaaacactcaataactaggtattgatggagcatatctcaaaacaataagagctatttatgacaaacccagagcaaatatcatagtgaatgggcaaaaactggaaggagtcactttgaaaactggcacaagataaggatgccctcttccttactcctattcaacatagtattggaagttcttcccaggcaatcaggcaagagaaagaaataaaggatattcaaataggaagagaggaagttaaactgtctctgtttgcagaaaaccccattgtctcagcccccaaactccttaagctgataagcaacttcagcaaagtctcagaatacaaaatcaatgtgcaaaaatcacaagcattcagccgggtgcagtggctcacccctgtaatcccagcactttgggaggctgagacgggcagatcatgaggtcaggagatcgagaccatcctgactaacacggtgaaacatgttctctactaaaaatacaaaaaaaaaaattaaaataaaattagccaggcatggtggcaggtgcctgtagtcccagatactcaggaggctgaggcaggagaatggcgtgaacctgggaggcagagcttgcagtgagctgagagtgtgccactgcgctccagcctgggcaacagagcaagactctgtctccaaaaaaaaaaaaaaaatcacaagcattcctatacaccaataatagaaaaacagagagccaaataatgagtgaactcccattcacaattgctacaaagagaataaaatacctaagaatacaacttacaagcggtgtgaagaaccttttcaaggagaactacaaaccactgctcaaagaaataagagagggcacaaacaaatggaaaaacctttcatgctcatggagagaaagaatcaatattgtgaaaatggccatgctgcccaaagtcatttatagattcaatgttatccccatcaagctaccattgactttcttcacagaattagaaacaactaccttaaatttcatatggaaccaaaaaagagcctgtgtagccaaggcaatcctaagcaaaaagaacaaatttggaggcactgtctgacttcaaactatactacaaggctacagttaccaaaatagcatggcactggtaccaaaacagatatatagaccaatggaacagaacggaggcctcagaaataacatcacacctctacaaccatctgaactttgacaaacctgataaaaacaagaaatggggaaaggattccctatttaataaatggtgttgggaaaactggctagccatatgcagaaatctgaacctggaccccttctttacacctcatgtaaaaattaactcaagatggattaaagacttaagcataagatctaggaccataaaaaccacagaagaaaacctaggcaataccattcaggacatagatatgtgcaaagacttcaggactaaaacaccaaaagcaattgcaacaaaagccgaaattgacaaatgggatcttattaaactaaaaagcttctgcacagcaaaatatactatcctcagggtgaacaggcaacatacagaataggagaaaatttttgcaatctatccatctgacaaagagctcatatccagaatctaaaaggaacttaaacaaattcaccagaaaaaaacaaaaaacccatcaaaaagttggtgaatgatatgaacagacacttctcaaaagaagccatttatgtggccaacaaacatatgaaaaaaaaaaagctcatcatcatcggtcattagagaaatgaaaatcagaaccacaatgagataccatctcatgccagttagaatggcgatcattaaaaagtcaggaaacaacagatcctggagaggatgtggagaaatatgaatgcttttacactgttggtggaagtgtaaattagttcaaccattgtggaagacagtgtggcaattcctcaaggatctacaaccagaaataccatttgacatascaatcccattactgggtatatacccaagggattataaatcattctgttataaagacacatacacacatatgtttattccagcactatttacctgagcaaagacttgaaaccaacccaaatgcccatcaatgatagactggataaagaaaatgtggcacatatataccatggaatactatgctgccataaaaattaatgagtttatgtcttttgcagggacatggatgaagctggaaaccatcattctcagcaaattaacacaggaacagaaaaccaaacaccacatgttttcactcataagtggggttgaacaatgagaacacatggacacagggaggggaacatcacacatcagggcctgttaaggggtgaggagcaaggggaggtaatgcatgacctcaagtgatctgcccgcctcggcctcccaaagtgctggggttacaggcgtgagccacccagcctggcccagacaacatttttgagtaatttcctgaaaagggtaatgaataattgggtgtagatagaaagaaattaggaaattgtttaaaaataattccactcaaaggaaaaagcagatgatatgagaaagaaaggggaatcgttgcatgaggtcattcacaactagggagaggatatccaatacagggcacaagagcatgttgaaattagataagacagcagacagctcatcagctgcaacaagaaggaaggcagcatatgagtgcagatgcagaggttactggtgctgagttcttgtgatctgttgaggacacaaacgtttatcatgagaagaaaaggaaaatgattttaagctttaggagaaaaaaacgtggggagaaattctcaagggattgggagagtgagttaactaaagaaatataggaagattttgtcagggctgtgggttcactctatgtctgtttttaacataagacaaattagcatagtggtgagtcatggtgaggatttttttggtttttttttcatagtagtgagtttttttccagcctcattcatatccaaacataatttagtttggattgaacaagtatttgtcaaatggcagggcaatattttaggtaagatgggaagaagtagttgaaaggatagacaataaaatttaaactaagcaaacccagagatgaagacatgaggatgctcattaactatgtaaagttcagaagttttgacttatttcttggaatctgttttatgatttaaaaaacaaaagtaaatagatgatagataaaaagatagattatagataggtaggtagatagatagatgatagatagttaaataaatttccttttattgaatctttcttttgtgccaaatagagttccgtttcttcatatttttagtcatttaatacttttaaccccaccctatgaggtattttatgtcaatttcatagagaaactgaggcacagggatatcatatgtttctcctaagtcacaaagctagcagtgccagagtcaggcttcaaatccaaagacatcctgctcaggatcctagtttattgaacttcatattgttatttcaatccagtgaaatatctgtcactttataaagtttcagaagaaaactggagcagtctaagttgacatacctacataataaagggaaatagataaaaacaatgttttaaatacaggagatggtgatagtgttgttcagacaagcacatcattctttatatctcctaaaattgtagttagagagaagagtgaatccaaatcaaagtttttaactggaggttactttgttataaaatatatttactaaatatttgtccttgaaggccatgggctgtggaatcatttattctctgtggtgtctgcaagtgcattttgtactagttcatttaatagcaagctcagaaatttcttaatgaaataaatgcatagtattgcaggttataatgtgacaagaaactttttttccctagtttgggcttccacatttagttgtcatggtagttgatgaaaattaaaggagcttaaattaccagtgtttaattatgatatgcatagctatagccaaataataccacctaccaatgcaaaggatcaagactacatttaaatatagatcttattaaatggttcagagaagataaaaactacatatggtttattaagaagagtaagaaacatgcctttcattggaattattgtgtaattagtaaactgcttagcttatttcttaaacatgttacctcttcactctgaacctcaaccaagaattttgttaagattcaataaaatattgcatctaataaaattaaattttatactatttaataaatattaactcctatctactgcctrgttttactgctattaaaatgtaaaattaataagtaaacatgcctacaaaacttgctcataatggttgtttcagaattgttagaactatatatgaaactatcaagatttttcattctgtttcacacaaccatgcacctgcattcagatttaaattaaaatgcaaaaatctgttcacaatccactggagattactttggggtgctctaatggccattttgtgcatgctgtctttcaaagctatattgtctctataggttaattgtgcactaagagaaggtgaattggaataccagtgttggcagagaaagctgcctgggtttcaagtcatttttgttcrgtaaatttctactttccaggttctagaaatctctctgaaagctcagaaattagcttttacttccaatctaatggggaatagatatttcatgtttgagcttatgttaaccttgtgaaaattttctatgtatatcagaactgcaatgtattaatttataataaaaattataataaaaacaaactgtaatataactccaataccagtagctgttaggtgtatagaaaactacatgataattgctaatttctttgcttgtatcattaggatatagatttctttagaagattgaaaatttcctattctttttttttctttttgctctaagcaactagcatagtactcaataactataaaactgcttgatgaataagtgagtgagtgggtggatgaaatttattggcattatctttaaccatcatttataattaaaagaaaatctgattaattgaattgtgaaggaacaatgtaggtaagctttcaatacaaatatactatgaagagggaaaatctcatagtccaccatggttgcaaatgttatagcctataaagtaattgtcataagagaccagcctcctttaaataaagttttataatttattatatatggtgtgtatttttaaaaatcacctcatcagcaaattagttagtcctaacatggttacttcagaggctatttctattgaattcacaatgaaatctaaattcttaaatatatgatgctagaggattacatggataataaatatagcatccatacatagagagaatcacatatatcacagaaattactaagtaatatatattttattttccacgagtaatagatcctttctcataatttttatttaagtaagtatgctaaggaggttttgaaataaattaccatcatcttggaaacagaatgcacaatagtcccatgagcatgatgtatcacataccagaaaaaaatgcttgcaaatttataataaataagattgttttctttttgtttgttcctgattattggattcaaacagctctaaattcacaactatagaaagaagaaatgagaagaaacataatatagaagcctaaatttataaattatatataatgattttcctatcacattcagtaatatcaatcttattctggctcaagtgcatggttatggatttaccttcggagcactgtaacaaggaatgcaatttcttccacatcggaaaaattagataggttaattgctattttatgtctaagcctttgtttacttagaagataatttatttgaagaatttactttttaaaaatgcagtcgtgtctgtgaaactatgcaaccctatggccagaatttatgctctatgtatyttttagactacattaaacgaaacaactgcacattagtcctgaagcttagctctgtaggaagaagtccatcagatctgggattcccccagactctaacaattcaatacatgtgggacctgggaaaagtcattttyttctctctcttagccccattctcctcatttgtaaagtgaggatatataaatctgcctwgattatgataatcttatgagataacctgtgaatgtaaaataaaataaattgtaaaattttcagttagtttacatactataattcaaccacctagatgttactaaaagtatattagcaatcttcaaatacaatgtgtctgcatgcatttaaaattatgggttcattcatctcataatatgaatagatcatctactgtgtgtcaaataatctttaacatagtggggatttggccaaattctctgtttattggagactatgttttaggaggcaaaataaacatacacaaggaaattacacaaccagaaaaggggatagaaagaggtagcaagagggaagacctgtgtgatcagtgacattttatcaaggccgtgaatgaggtgaggatactctaaggcaaggaaacattaattgccaaagaccatcctagagaataggtactgacttctctttatatggcagatccaaactagtcttggacctttctggctacgataacaaaatactctaaactggtagcttataaacagcagaaatgtattccttacagttgtggaggctgagaagatcaagatgaagactacagctaatttgacatctttagaggttccacttcttggtttatataacagaaaagtagctttttgctgtgtcctcacatggtagaaggagctagatagctctctgagatctcttttataaggacactaatcacattcctgaaggctctgctcatgacttaatcacctccaaatggccccacctcctaatattatcatcttgggggacaggattttaacatataaattttggggtgcacattcaaactattgcagtccctaaagaaagaacaatcttgtcatatttcaagaaccatgaaaaggccacaaaatagtacactgtagctcatggttaagagtttgcctttgatgctaagtgtgacagaaaaccactataggattttgaacaagaagacatgatctatgatctggtctgtatcttaaagaagatcttgatggttagtgtgttaagaaaagaatctacaatgaactcaaacaaatttacaagaaaaaaacaaccccatcaaaaagtgggtgaaggatatgaacagacacttctcaaaagaagacatttatgcagccaaaaaacacatgaaaaaatgctcaccatcactggctatcagaaaaatgcaaatcaaaaccacaatgagataccatctcacaccagttagaatggcgatcattaaaaagtcaggaaacaacaggtactggagaggatgtggagacataggaacacttttacactgttggtgggactgtaaactagttcaaccattgtggaagtcagtgtggcgattcctcagggatctagagctagaaataccatttgacccagccatcccattactgggtatatacccaaaggactataaatcatgctgctataaagacacatgcacacgtatgtttactgcagcactattaacaatagcaaagacttggaaccaacccaaatatccaacaatgatagactggattaagaaaatgtggcacatatacaccatggaatactatgcagccataaaaaatgatgagttcacatcctttgtagggacatggatgaaattggaaatcatcattctcagtaaactatcgcaagaacaaaaaaccaaacaccacatattctcactcataggtgggaattgaacaatgagaacacatggacacaggaaggggaacatcatactctggggactgttgtgtggtggggggaggggggagggatagctttaggagatatacctaatgctaaatgacgagttaatgggtgcagcacaccagcatggcacatgtatacatatgtaactaacctgcacattgtgcacatgtaccctaaaacttaaagtataataataataaaataaaaaaaaaagaggaaacagagtggtttggaagttcttacagtaggtaggttatgaatagtgcaaccaaaataggcgatgaaggtagaaatgacaaatcaaaaggcctactgagccatcacatgtaggggtggaataaggtaagttgaggaataaaggataagtcttaggctcatgtaggatggtggcgccattgactgaaacggctaaactaaatggaggaacagcttgtttattgttttgctttgctccccactttggtgaggggtgaaaattagggtttcagctctggatatttgagattctcatcagagatatccaaatagagaaatgaagttggtggttgtatcagcaaatctggaaatcagggtgcgttcagaactggaaatacaaatttgagactcatcagcatacatttggtgtttaagccatgggactggatgttattttctaggaagcgagtgtaaaggtagaagaaaaagatccaagagctgaacactagagaatgtctatctttagaggttaggaaaaagaagaccaatagtctttcgtttaacagttttagtcgtttgctttctgaagtatgaagaaaggttaattgaaaattaacatggctaaattaataactgcatttgtattgcaccatcctatttcatatttttacatttgaccaacatttccctcagctatttagtctcaaatggattttatgtgaaacccattaactcgttttaccatggtatatttatagaagattgattatttaagaataattaattaaagaatatttatttttctattccctttgaatactgagatctgtattaactttcaacattcctcagtaaattctctgtaaagaaaaatattaatgttttaaaagtttctgtttccaaatgcttacattatcaatgatgtttaaaatgatgattctgaatggcatgaaattaagaagatgtaacctcattccctgattgcttaactaagcagaagagtaaatctagcaagcacatttttgagtagccattgtgtacatagctctatagccattggttgaaatgttaccaaagtgaaagatgaagttagtactaactcctaatttgggaatttgcagtctaatagccatcaagagattggtgaaagaacatcaaatatggttgaaatttctgtaactgaagagggatggggttaattaatatgaaataaggtaacattttacttaattcaggaaggcctttatgatttcccacgtggtttctcaaataataaattaggtaattaagtattggttaaaaaagttgcaactaggtgcatgtagggatttttttttctaaagaagaaaaatacctcctcacatctcaacactctgcaatctggcttctaacctccgccacttaaatgtgaacagtcctttcacagttctacaacactggacactcctgactacacaggtccttcaataggaggatgtctagaaatatttaaaagactgatggctgtttttccatctaccttttaaatatttatgtttctgagagttctgttcttgaatctcaatttctatcatcattttatgaatcatagttttaaatatcttataaacttatttcaccatacttatatgctctgccttgttctcttctggctcagatctttcttatgtagatatggagaatgttcaattaactgtctcctgggtaccatagcactgacaagtcaaaatgaaagttacttttttaatcctcctaactcctggcattagagtttgtgaatgacaaactcatctacacaggttacctaaaaagatagccaattactaattactcttaattattgcagtgacttctaaactgactgttcatctccaaacaagatatagcatcagtatttccttaaaatccacaagtatatgtattgctaaaggacaattatgttctaatgtttctatcctgagtgtggaatgtagattatgtgtatgtttttgttttkctaattcagattatttaattcctacctattgcctttagagaaaaaatgtaaaatccttggcaggaaataaagaaggtttccccctgtgaattcgctcaaagctaattatttaaaattaagctttccatgctttccaccatgttctctacagggcactcatattgaactgcrtacttgaaatttccctaaatatcctacattgttacatctttttaactttgcatatattttctcctgattggtattctttcctctttcacctagaggagttttcaggacaaaactcaatcctcacttcctctagaaatcatatcaccttctcccacaggttggtttggttgcccctatctgtgctgctataacaatgaatttacatatgtctctatcatatgggttacaactgtctgttcagtggttaattttttcgtatttatttataaacttcattgaaatgaatgtttttttttttttgcttttttatctttgtgattaatgagtagaaaaataaagttagatagaactaagacctaatttgatagactggttagggtgactatattttaaaatagtctattgtgtatttcacattagctagatgcaaataattcaaattttcccagtatgaacaaaagacaaatatttaaggtgatggatatctccattatcctcatctcattatgacatattatatgaatgtataaaaatattacatgcatccccaacatatgtacatctattttgtatcaatgraaataaaaagcaaaacacttcaggatcatttaaaaaaagatcagtggcaaagccccatttcagaccaattgtatcctagaatggtgtgtgagcacagtgcttcaaatatgcagccagagttgagaaccactggtctggtatagcaacctcattttacagttgaaaaaacagacaatctttacatacaatctttaaaagccttggtcatctggttccctgaccctaaatgattgagaggaatcagagcagaggctgttagaggcaaacgggatgatcacagacatgacagctgacagcttgacaggcactgcatcaccacaggatgtgaaaatggatgttcatgatgaaggctgggagtcatcacgataagagtcaattccctgtagtggcctctttttacgaagagagagtagtcttctagaagatttctatcaacatatgattaaaataaatgtttccatgggaccaaaaatcagtttccacttttggaacaatcagtaagtgcattcccttttactgggggtcatctcttgggtactaggaagagaactaggctagcattaaaacctgcattcaaattttgacgatgacatgtatttgcagcacaatcttgaagacatgatataatttttctgagtgttgtaagttttctcacttaaggacaaaaaaacgaatgaagtatatgttataatgaaggtaaaatgaggttaattgtgtttggggaaaatatttatatatatccctgtcctaaaaagaatgcaaagagcctggaccaaatcatatgcagagtaaatacttcaactgatacgaattaaataaacaagagattcagtaatattcagtgtatattttatgttcaaataaaagtggttactatttactagtcttaattacttgttattacaatctataaaataaacatgtgtgtactacttgcattggatgattagaccagaattatatttagctttaaaattattattatttttatttttttgagacagagttgagctcttgttgcccaggctagagtgcaatggcatgatctcggctcactgcaactccgcctcccaggttcaagagtttctcctgcctcagcctcccaagtggctgggattacacgtgcctgacaccatacttggatagtttcttgtatttttagtaaagacggggtttcaccatactggccaggcaggtctcgaactctcgacctctggtgattctcccatctcgccctcacaaagtgctgggattacaggcgtgatatgatccctgaaaaagtctgtattgatttactgaaaaactatcttatggtgcacatgtaaataggaagaaaatgcatagtaaaaatttgaaatgtattttatctttacccaagaatttctggaagaaaaaatgttataaaaagttttgaaaatcataagccatgtgtaatttgataatattagaaaatataatctagatcattgaaaaagtacatattttgatctgtaagtgaaaaattaaaaagttaatagctcatcaatttttgtatttgtatatttagcattttatacataatctctctggatatttgactgtagttttggttttgtggttgtttaattgtctcaaaatttgggttttttatgatgctaaacttgtaaacgtttattttataatttattctttaaatgtaataaaggcaaggagatagaatatattacactttagtgcaatgccatcatttatcatttataatgttcaattagaggtacagagtgatttaaataagatgaagagtaacctttcaattgaataccattattttattcccttcataaaaaatgttcatataattaaaggtagctaattgataatgtttttttttctcagatccatatacgtcaaacagtcatttaagtatctatttagtgtaagacataactttgcctcttgttgtacttgtgtattttgaaataagatgtattttatgtttgaaatgaggattataactaggaaataagttattgaacatattgaatatattgaaagttgatcaagatgtgttaaagtttatctaaagcaagtttatattaatcacctaacatgagtagcaaaattacgcgrttagttattatcataataaaatattattatgttatgcatatattaaaatgcatattactatgtattttcttcttatatctttaattatgtggttgtgtgtgtggttgtatgtgtgtgtgcatgtgtgtgtgtgcgcttgcgcatgtgtgttatgcttactcagggagttgtgagaatgagggaatgatatatgatacgggtgctttctcacaatgataaacaaaacaactctaaaaggcttactttgtgttagtatatattctaagtatttaatttacatagcttaactcaaagttaccctatggaatatctccattttaaagatgaataaactgagggtttaggtaacttgcccaaaattatacagtaataaatagcaaaactctgatttgtctccagacagcgtttttctatagaacggttcccgtaagccctgtcaatagtaccttgaaaatgtgaacgtaatttttaaaattagatatcatagttatcactttggcactgaatcctgaaattcaaggaactattatgagataaattagacatgttgctatatttagatatatattacatctatgtgtcttttagataagaaaagctaattattttaatatatcccccaagaacctaagattgctttatttttctttctttttaaatctaaataatatatttttttcaacttttagattcagagggtacatatataggtttgttaccgggtacattgcatgatgctgaagtctgcggtaaaaatgactccattacccaggtagtaagcatagtatttaacagcttttcaacattttccctgcctgccaacctccctattacyttctagtttctattgttgccatttttatgtcctcgagtacccaatgtttagtttacacttatacatgagaacaagcagtatttggttttaatttattggtatatagtcgctcatagtatccaytaatggtcctttgaatttctgtagtatcagatgtattgtctcctttttcatctctgattttgtttatttggatcctcttgttttttctttgaatgggtaaaggtttgtcaatttcgtttatcttttcaaaaaaactcatttcattttgttggtgttttgcattgttttcttcacttcaatttcatttatttgtgctctgatcttcaattaattcttttattctactaattttgggtttgattttcttattctttaggatgatgcattgttagggtttttattagaagtttttccttcttttttgttgcagacacgtatagccctaaatttccctgttaatactgctttctctgtatcctattgattttggtatgtgtgtttccattatcatttgtttcaaaatgttctcaattttcttcctaattccttcattgtcccactggtcattcaagarcatctagtttaatttccatatacttgtatagttttcaaaattccttgtgattttaatttctrgttttgttccattgtggtcagagaagtttcttgatattatttcaaggttctgaatgttttaacacttcttttaccacctaacatatgatctattctggaaaatgacccatgtgctcactagaaaaatgtgtattctgcagccattggatgaaatgttctcaaaatatttattattttttatacaagttaatttccattttttggttgattttctgcctacatcatctgtccaatactgaaagtgggatgttaaagtctcctgcttttattgtattgagatttagctctttatctccaataatatttctttcatatatcttggtgctccatttttgagtgcatatacatttacaattgtcacatcctctcgctgagttctccacttaataattttataatgacctcctttctctcttcttacagtttttgtcatgaaaggtgttttgtctgatataaatatagctactcctgctctttttggtctcccttagtatagactaccttttttcatcccattgttttcagtctatgggtatctttatagatcaaatgtgtttcttataggcaacagataattgggcctcacttttcttctctgtgttatcttgaaatcattggttgaagtatcctttcattaagaatgctgaaaataggcccccactctctcctggcatgtaagatttctgctgagaaattcattataaacttcatggggttccctttgtatgtgmcttgacctttttctctagctgcctttaacccttttcccatttagaaaaaaaagtgcagctcgctgccagcactcatttaattttatataaacagactctgaggctaaagcaaatmtgactgattttaaatgtgaaaatagagtataaaaactgttcttggagttatttctaaacataactaacatgagaattgtctgaatcatcagaatcrcctatttcagaaaactcattaaataaatctttgtccaaaaaccattcaagaacgatgttaacatcatgcgtagcaatgctacattttctagcatttgacattttcagcaattgagaatgactatattttgtaaatggaaataccactacaagaaaatagaatggtataaatagaatgaagtcttttgtttctgaagttgacaaaaaaatagaatggtataaatagaatgaagtcttttgtttcattcgttgatagagtgatgcgaaaataatcataaaagcgagatattttgttgcaaagttatctaggggcaaatgctgcagctgcaagtgccactggggagcactctggaaaaatrggaaaagggttaagattttttctttagcattggccttggacagtctggtgaccatatgccttggtgatgctcattttttatagtatctttcagrtgttctcaggatttcttttatttggatacttaagtctctagcaagattagagaaattttcttgaatttttccctcaagtagtttttctaggttctctctcatgaatgcgaacaacttataggattggtggtgtatataatcccatatttctcaaagatttgttcattttttttaattctttttttctttatttttgtctgactagtttgagacacaggtcctcaagctctgaaattctttcttttgcttggtttagtctactgataaaactttcaattttattttgaaattacttaaatgagtttttttgtttatttgtttgtttgtttgttttaaattccagaagttctgattgatttcttcttaggatgtgtatctcttccttcatttcctggattgttttaaaactttctttgtgttgattttcaaacttgagttggaattcattgagcttccttgaaatccatttgttgaatttttcatctttcatttctgattttccattttggttatggaccattactggagagctagggccatcctttggtgatgtcactacactcagttttttaatgatgacaattcttgtgttggttcattctcatttggaaacactagaacttctaatttttgtatttattttctttcaggtgtttttttttctttttcttttttccccaataattttattgattttcttttttctttccctttcccttgccctctcccctccttaggggttgtcaccctagataatgctgggcagggctttctggctttgattccatgtccttatgcacatctgataccaaattttgtgttaggcagtgtagttcaacctacaaaccagtagatgaaacttataggtaagagccagctgtggccaacatggctgggcatattcttgatctttgtttactgtaagcagttctttgctgcctargcaatgggctattctgtggagtgcaaagtggtcttatctccctgcttgcccacccctgtccctcaacccaagaagcaggtgctggggcaaagataggcagggccaaactggccaggtctgcctacaggtcccccagtggcagacatgagcaccagctccaatgaataatccagtggatggccactaagtgcccagaggtgtgtttagtcatggagttgggaaaactccctgacccaattctctgcatggggatgggggacagcctaaaaccctaatccaggagaatgggtcctccaaatgcttggagatctgcctggacatggagcagggagggaccctctgcaccaacatttytgcacaggagaggggtggcaactcaggctgctgaacgaggcaaacaggtgctctgaatgcctggagatatgactgggcttatgacagagagggccccctgcacctggatctctgcacaggaaaggtggggctgttcattctgctgttccaggtgagcaagtgcttcaaatgcctgagaatcttcctaggcatgcagcagagaaggccctgttgcactaagatctgggtccaggaagggtggggcaactcaagtggttgaaccagatgaatgggttttctgaatgcctggagatctacctgggcatagagcagaaagtgtcttcctgtaccacaatctctgcacaggaaaggtggtgtggctcgggttgttggtccgggcaagcaagtgctccaaatacctggagttctgcctgtgtgtgaagatctgtgccatgatctatgttagaaagggtgaggcagctcaggctgctggtccagaagagtaggtgctccaaatgcctggatttctgtctgggggtggagcagagagggccctgcttaaacacagtctaaggggagcagccttgagcaccaagcaatggcacacacagactagctctaattcgctaagctggatctggcagcaagtccaccacccaggagaaactgcagctgtagcagctcttctcctgctccaggcttgtgacgggagagcacaattccaccatctactgctgaggcaccttccacagttctggctgtggaggcccctatcctgctccagagcaggcactctaatctctggcttgaaactaaaatgcctgtgcagccactcttccgagtcacacaaaataatggctgacagtgtatgtgcacagattaaaaatggtgtgctgctcttggtccacggtctgggaaaatgtctgcagctgttcccagtgtctttgccttataatgtctccatccctctcccaagttaccttcagggcttgggagaaacaaagagctcttcctcctcgtggattgcccaaatcccaggtggaaaggtgaatcacagggggatgctctcttcctctctcatgtactgggacttcactaacttttatctgccagacgccatcacaggggctgtttgccagcatcttccttcctgaaatctggggtgtccatcatgattctggtagattcctgatttccttcttgaattaaagctcacagagttgatctttatgtgctatcttgctatttccaagtggctgaggcatgttaaaagcccctaatatgccatcttgggaacaaaattaagatagctttataatagtacttggatcatgatacaaagatatagaagtaatattatgcacaatctatcaatgtaatttaagctcttttatttgtcactaaattaagccataggctattgtgtcaaaagaattgaattagaatatagcaagttgctgatgctatttattcttagaaacaaatttcagaccagaaaatccatgtgcaaacaatcaaccttgcttccacatatttctagcatcagaaaagcagcctcacttgctacacatattttatattttagactatgggttactaaactacaatccacaggtcaaagtcaactcatatattgtttgtccaacctgcaaactaagaaagacttttacacagtttttaaatgttggaaatataatcataagaaaatcatattttggatcatgcaaaaattcaaattttagtattcataaatacatttgtattggaatatagccatactcatttgtttacatatggtctgtggtttcattcccattgcaaggaaagatttgagtagtattaagtcagtgcaaaagtaaatgcggtttttgccattatgtttaatagtaacagagactgaatggcttatgaaactgatgctatttacacattgaaatctttcctttgcttaagtcacagtctgatttgcttgcttgttcagataataggagtacgaattctagtgatttgcaggattttccatctaggtctgtatttctgaccatttgtcctactgtctcgaaattaaaactgaaacgtttacatgttagcctgcatttgtacttggctaatgtgtgaattctgcctaatctagcatgtgtctgctaggtgacaagcatgttccaaatcctcttctcctactgcaagacttttctgtgtcttcacagtgatttcattcttagttaatctacctgattttattctcagtcttcacacttcctcctcctcttaatattttaccttatattttgcaacaaaatttcttccatgaatattttatagactatatgtaaatgccctgatctgttttgtaccatgaaagtttcatataagaaataggcagcagcagtggtatagagcaatttatgcatgtcacatggtcaaagtgcttgtaaaatacataccttgtataatcccttccaactaagtaaccaatcattcagcacaagtttctattgattctgatgacagcattgggcttcagtactataaaagtaaatttgaataaagatgttttcatctttatggtatgatctgtttactacttattagattgataaatgtttaccaaatatcagtttcagggaaaaactgctgcttcactgtttaaggacatctgatttgaagtatgtcagaaagattggtcggtgtgctaaactcataatacctcaggaaaaaaacttgaaatctttttctcaaaggtattcttaaagcacaaagctatgttgatgtttctaattggcaaaaacatttgtggggaaacaagggaattctttgttatgattcttcttgttttcatgaaataatttttttgtgactcacatcagagcagatgacattttgtgaaaaaaaagattaataaagtaataattctcagcaaacttagatcctatttttctgcattttttttcaaaagagcaagtgatgaaatgccagaagatgttaaggaaagagtgttgtggacacatagaatttttttttaatgcagtatgacacatcaacaatattttaaggctgaatggaggactagattacattagaagaggagttacatggttgaggattaaacaaagttcattcttagttatgaggcttaaatgacaatggtgatcttagagctatagaaaagtcttagggtaatggtgccagagtgcaggtcttaagtagaatagctaaaaattagaggtttgtaaccagctacgaatctaatggtacctttgtgacattgtctgcaaaaatagaggacagtatgaagaagcacgcctcatattttttaagtgctttaatcaaaattgcatcaagcttgttttaagaattgcagttttgattactacttttccagtttcattggccaagtgaaaaaggaagacaattttgaacaatatgcctttaaaaaatgtagttattttcttgaattgaaatattatggaggcttaaaaaaccccacatatataatgktttatttttctgttatttttgtgcttcttgaaactatttcaatagttttcttttagataaagatgcaagcaaaaatagtctcaactttaggcagtataattagtcatctccaattttgcctgaggaaaacgatcagtttctttaacattactctttttgacactcttaaatcctctcctcattatgattccaaacaagaagaatcgaaattgcattaaattgtataatttaaaaatattgtatattttgtataaaagttgtataacttttccggctgggagcggtggctcacgcctgtaatccccgtactttgggaggccgaggtgggtggatcacgaggtcaggagaacatcctggctaacacggtgaaaccccatctctactaaaaatacaaaaaaattagctgggcatggtggcgggcacctgtagtcccagctgctggggaggctgaggcaggagaatgccctgaacccaggaagcggaacttgcagtgagccgagatcacgccactgcactccagccgaggtgacagagcaagactccgtctcaaaaaaaaaagaaaaaaagttgtataacttttccaacacaatcatgtgtctataatgggtttcaattgtctcagcattttcccagaatcagtcagaagaaaattgtagagaagaaaaggactgcttttcaaacccattaatgttttccacctcacttggggctggccttccactgaatactgtatcccctatgtcgattacactacttatgctgtgggctgatcctattgttaacttcgctgcttgagtgttaactgaaatatcatcttcttaaagacagtttgtctaattttaataaagttaaagtacaacatggaccagatagaacaaggtggtggggggagggggctagattattgattattctactctacgtgactgaaggcaacttacattgcttcaatgatcatcaagcataaaatgagggatactgatacatgaaatgatgtaataaccttattcagatattatgacacaactaattagatgacctatgatagttgaataatgtgtctgattctatccaaaaaaaagttagtttatattaatgttggcatttacagttaactaaaatgtcaaagcagaaaccggaattgtttttttctatagtaaatatatttaatgggattcgttagaacacataactacagatttgtagtaatttgaataataagattttttaatcttctttaggttaataacttgtccagataataggcaccttttttttgtctctttaaccttttcttctttcaggcagtaatcaacgtctggaaatcaaatttttatatggagctggaaaaaaaatcaatatagcattcttaactacagatggtccctaacttatgatgcttctacacaaactaaaatcataaatcattgatatagtatatattcacacatttacagaattgtctttgcaatttcactttgttttgctcaaaatttgatacaaataaaataataaattctattttctgacaaatcccttttgcacaaatattgaaatttcaaattaagtcatttttttgagctttcaaatttaaatgaaaagagacagaaggaatcctgcaaaggggaagaaggaaaggaaaagaaaggagagagtaaggaagaagaaaggaaggggaggacagagtgagagagaaagtagtataaaagagaaagaaaaaatgagaaagggaaataaagacattgtctccggatgttacacctgagtagcagtgtagaagtagttcattgaagtacaaaaaaaaaaaaaattgactgtgcaatgccagatgataaacagtgttcagaatcccagcagtttgttgttattgtttgttttttatactgactgaataaatgcatttccaaatgtttgaatgccaagtcccaaaaggtaataaaatagaactgactaatgacagctgtgaaaaacaaagcctgattaaaagaaatacagaaactcaagcaacttacccctccaaataatttgaacttcagtgttggcagaaatccaagaattctttgcccacaagcataggagctttgaaatagcaaattgagttgcatagatttttctgtttaactcaccacacagcttcactcaaaaaaactaaaaaccttgtatttccccatcagaagtaagtagaactgaaataatatcaaacatggtgcataggggagggggctattaggtagtattttttgaaacctcactttcccctttctccaccagtgaccatcacatttctgttcctgagttttctatggttgtcaatatagacaagaatagtttactaaaagccatagttaagggtctagatggcaaaaatcagtaggacacctttttcaagtaaaaatcaataacacttaaaacaacttttcttaccttggaggcaaatcctattgtgataaatgactaagtttcacacgtactctggcactgtcatgtttgagttaccatctccccttcatttctttctttcttttctttcttttactttttcttttggtttctttctttatttcctcttttttttttttttttttttttgagacagaggaggtatcactttttcactcaggctagtgtgctcacggctcactgcagcctgtaactccagggctcaggtaatcctcccacctcaccctcctaagtgtctgggactacagacatgcactactgtgtccaactaatttttcgtattttctgtagagacagagttttgccatgttacccaggctggtcactcctgggctcaagcaatccaccttccactttctttcaaagtgctgagattacaacagtaagccacagttcctggcccttatttttatgtgaatggtcatctaatcaattaattctgacaaaactagctactgaataagaatttactaatgtcaaagacacttggattaatgggttagtcagcatggaaattactttaactgcaattaacaaatatgtattttattaactaatgactttcaggtgatttgaagggaaagtaactgaaatttctagaaagagtaatagtgttcattttttgacacgaattaatgaagttaattggcttacttgtggcctttcaaaaccttactagtgatcaaattagtttatgattaaagagtaatgctgatttagagcagtgcaaactcagtagctacaagtataacaactcaaatgagagctaccatccactctgtcatacactatgccagatgttttgtatccatttttaatcttctgaatagccctacaagttgcagcctgttatcatttacatattagaggtttgaggatctgagacatgaaaaaaaatcacaatcagtaaggaatagaactgagattcaaacctgcaactttgtaattacaaaattatttgtttcattctatattacaaatgctcctaggatttattaagtaatggcagaaatatgaaccaaaggttgataacacacataggtcattgcctaaacttctgtgtctataatcttcatagggagattattcttcaagttattctgagataaatagataataaacacatatgaatttttcaccccaagccatgccaagactatgtgctaagattttagatttttaaattcaagttttaattcttttttcctccaaatataattttgtgattgtattcggtataaaacaatgacttatgggatacatgagttaatctcatrttgctctgattttctgagcatgctgacgtttctgagagccttgggctcattaatgcctaagtattagtaggtcactgggagtaggggtcttcatgtcttcctgactcaaaatgaaggctagaattaaaagtagattagatgccattcttcagtgtaattagggtaggttagtccaatgtggtggactgcacattagaaactaaatatacagaagagtacatatccctgccctgcttctgtttttggtttatttattattaagatttttttagatggagtcttcctctgttgccctggctggagcacagtgacaatctcggctcactacaacctacacctcccaggttcaagcaattctcatgcctcagcctcctgagtagctggaactacaggcacacaccaccacgcccggctaatttttgcatttttagtagagacaaggtttcactatgttggctggtctcgaacctgacctcaagtgatccacmaacctcagcctctcaaagtgctgggattacagacatgagcatcatgcccagtcccttcttatgtttgattgcttcagttgtacccagacaacctcccattcaaagatactttattaactcaccttggactaccttctacgtccttagtatttatttcatcaactaatgttttctattctcattaaaaaattaattttatgttttactagctttaaaaaacatatagttttatattttgtagttatttggttattaatttgataggttcatatttatattttaccttatgacattaagatgatttttttacattttaaatatgtatcttatttattgtaatatttactttaaatctcattgctttaacttttatcttggattatatatttttatttgtttactcataaaattatttgctttaatatttcttttttattttactttgaaaattgtgattttttaaaatctaatcttttttatactgatttttttatttggctttttccttttcctttctttttgttttctttacatttttttcctttataaatatcaacacaactgtgactacagtgatggtaatatagaaagaacccaagctatcaaggggagactgtaggtcttcttacccataaactttttaaccatagctctctgacttccccagagggtgtactaactcatttaagaatgtttacccaagaaacttcacccttagagagccagtttattctacccagggctatgaatcaccatgcagatgtcactcttgatttattgagatgatgttgcttcctgacagcttacatcattcactcattgtatgagaaattgcttttaaaattcatggtctacatatggataaggcatgcatgttatggtttkctataaatcagaaaaagatggtatatagaatgtcccaactaggaacaaaccctccctgtgctacataagggctgaccctgctaagagtataaatggaattaaacatcctaactgacagaagccaagggaataaaagggtaccgttaaatattagtgtcctctagggtacctgtccttagcagccttcactgcacttttgctaatatcatccagtttctattatgttacctagcaattctctgctagcatctatatgaaatatttaataattatgttgtagaaaatttaaaaatctgtatcccaggttagatctctttcctgaactccagatctttatattcaattacccagaggacacttccatatagatatttaatgcatatctttaatttgatgtattgaattaaatgttactcactaacttcattccctgaaaatctctttgaatctttttgtttgtttgtttttgtagtatcaaagaaggagattgctttctttctgaattccacattccaaggcatcaatcatccacagtacaatctaggggttcttgacttctccttcttcttcaatcacatacacaatctgttatcaaatcccgtcaatctactttgttaatggctctacatctatcaaaagtattacactcccttttcacttctttggaatgatcatcaaggtctcttgtccggtatgtcagttatcaacttactgcttttaggctccaacttcataatgcattgtctgatctgttaaagtaaatctaagatctacaagttattttattttgttatcatgacttcaagctgtgtaaatagagggtgctggacagacactggaagaggaaagagtttttgcttcctcgttctgacatgctaatgtaggtagcttttttttttttttaatcaccctgctcttgcagtttatagagaccagcatttaattcccccagcaaaccttcttggatggttttgtagtagaatgccacagtaagacactatttagtcaacatatttctgttaaaggacatattttcagcaagttccacaggtgcagaaccacagtgacttctctgccaggcagggagtcagaaccataacctccaatgagttctaaatgtcagccatggatggggaaaaagagaggagctaagtctcttttctgatcttcctatctcaaccctagttctttttgttattgttttgtacttctggctgcttcttacatttgttatttagttttcctcttactatcctacccttcattactccaaccctatttaatatttaatgtttctatatattaaacttgccctgttcgaattacttatagtttccctgtcctgattggatcaagactacacaagtgcagtaagctagtcctccaatttactgtcgttcccattttgattcatttcttttccctccagctaaaaaaattaattgaagttgatctaattcagcagcttgtatctcttctctggcattttgggagaatttccaccttagtttgagatgttcttcctgcaacttccatctgaataataattactagaataactgaactagacactggggattcacaaatgaaaatatggagcttagattcccatggatgaagaaagataataaatatataaatatacatgttaagtgaaaaaaaagtgctataaaaaatgaaacacattagaggaagcgtatctgctgttttatataaggtaataatccctgaaaataagctaggttatactataacaatcaaaccccaaatctcagaagtttaagacaataaacatttaattattgctaatattacacattaatcataggtcaaacatggcacttttccatgttgtcttccctctggtgttcaggttgacaggacggcttttattcagaatattagaaggcatcctggcagagggaaratgtgaactcggcaacaatgtgaagatgcttaagccttatgcatagaagaacacaagtgcctttgcatcacatactattggaaaacacaagtcacatggccaaacctaaagtcaactggacaagaaagtataattttcccggaggagtgaataattgtgaacaacaatacaatttaacacaagtggtaaaaaaaatactttttgaaaaaatgacatttgatcagtgaaatctgaagctcataaagtagaagagagagtttgtgaggctrtttcagagcagatcattccataataggcacctaatgactacttttattctttttgttttaagtgaaaacactttacagagaaaataattcttttaatagtaatcctcttgacagtaattactgtgatatgtcaggcctcatatagtaagcatgtgaagaaaatgaatcaggcatatttcctagtaatgattattctagtaaataatgattcaaatagacaagaggataagaatgtccttaaatgcttgtctctcttgaaacttaatggaagttttgtgttttaaacaaagtatcttcaaagatgttttttgctaaacactttgtcagatccatctgattttgccattgagaaattcttacttaaacctctgctattcaattgattgctttataaaataattgttttctgagcatgtagagactgaatttatgaattggtccaagttatatttgatttaacacctgatgctaacagtacattttgtataaatgccttcataaaagttaactatatctatctgcatgcatatatctcatatttgacctaatagcatttaactttgggtgcattaattgttgtgatcattaattcacctaagtatgttgctttccaacttttaaaggcagaaataattcttaataagctttcttcatgattattaaagtaggctatgttctytatagaatatttaaaaagtactgaataatttataaaattctgcaatcatagtaatctataagcctggggaaccaytgtttttaggttattgtgtgctttaattttcaaagaacatcttgaatatggtgccttttcagtgaaaatatttcactgtattttaatttgctttgctggtttaagcattagaatgcttctaagatttatgcttttcagccacatttttaataaaatcmtccagcatatttactagtatagtattgctcataacattctcatatttttaattgctcccatgctagttataattgttttcattccaagtttctttaacttttttctgtgttgattagacttgccagaaatttatgaattcagtatattttaatgaaataaaacactgttacttttgaatgctatagttatcyggttttcttatcacctaatttctgcttttacttttctaattttcctgtatttctttttttctataatctgaagttaaattcttgagagtgctatctaaggctcttaaggccttttttacttctttcattcccttctttacttcctctttttaaatatatcctactgaagaaagagcatttctccctatggtcatgaggacattctataatgaaggatttcagcataagaattatgatacaagaaaaagcccattactttttgccccacttacattgttttcactcaaagctttatatgttttttcttacagattccttttagacttttccacttactgacttgtatgccagattttgcttttatttaatatttgcttgccctcttttctggtaattttttgaaattagaatataatggaagatatggcaagtgaattctaactttctgcttctcacttttaggatgcaaaagttggttgatgtgattcttcttagaagtcaattcacatataaacaaaatgcacacatagttcttatacccatgtaagtgacatttctggtattatgggctttcaaaattgttagaatcaaaatgtttgaacatatttcaagtagctaaatttaaacaaaaattaagaaaaacataatttcaaatgtaatcctaaacctctactgaagctctatttatgaggaagtcaattaattagaaatgtgttagttaaattctcaggtatcagatttcaaaagcaaagacacacttggctgagagcatatttatcttagtaccaaaagatgtttgtgttctattactccacaaaaaaaacacaaggtttcagaatatttccagctcacgaagcatttttcacactcagtgtactccttaagatgttttctgcaactgttatatcaattttggagagtaaatcaaggaaatggtaaatgctgtgaaaagttccagcacacatgtttgaaatattccagttcagaaacctggtcctcatatggattgttttaatacattttctgagtcagccaagaatattgattcagaaataaagcataggggtttgagaagtggagtcatacttgttagcctaccatgtctccagtatctcttctttgttgacaagctgatttaccattttttgatattgatcataaaccctctaaaatacacaaattaggtgtatacttgtttttttcaaaatgtttttattgttaaatatactcattttcttcatgttgaaatactctttcaacttatttccaaaagtatatatacatatatacatacacaaataaatttatcagtaacataatatgctatgatttaccacggaaagatcaattattactttttactatggtactaaatttttctaacatatttttaggcagcttaaattttaaaaaataacataatttcaaatgtagtcctaagcctttactgaagctctacttatgagaaagtcaattaatttgataattaattaatttgatagtcaattaatttgataaacttatcaggcaaagtaatgatttgcctgtcccatcagtatggattctagataaacttatcaggcaaactcaaccaactcacacaactcgtgagcatcagacccagaattcaaattcaaccctcctcgtgtgagcttttctgccattctctgcttctaaaactttttaattcaagtaccagtaataacaggggacacttattttactccactgtgtaatgataagtgacagacaggatttgaaacgaagaagcatggttctaggatttgttctaatagccaatctttttaaatgcagagggagaatgtaagcatacatagtttattaaaagcaggttatgtaatattttgtattaggatgaactgagccatacattcttttacttcagtggcagcatgcttgaggaataatagacaaaaaatacatttggctggacaaataaaattttttttcattgaatatggcattcaagttgtggaaataaagctaaattgtgttgcatagtatttgtgtaaaggaaagaatgataagaaagcccaggactgagtgctggtgaaatacattgatgagggagaaaattagaaggcaaaaagaaatatcaaaatacttgtagtgtccagtgacttttctctatgcatgaaatgtacagtgaaacacacattattcaacaaagttttcagagttgaatggagttgaaggggaacagggaaaagaagcaattaagaaccgcatagtatttcttgttctagatccttgaggaattaccacactgycttccacaacagggcagggaacatcacacacccgggccgattgggggctgggggacagggggagggacaacattagagaaatactgaatgtaaatgactagctgatgggtgcagcaaaccaacatggcacatatatacctatgcaacaaacctgcatgctgtgcacatgtaccctagaacttaaagtataaaaaaaaagaactgcatagtattcaagacacgtataagtcaagagcaaaagattcaaaaatgaacacaatcacatatttattacctcaccttaatgcaaatttttactcatgttctataatttatttattttcatatatcaataatggtccttccttccacaaaaagttctagtaattgatgatcttgaaagatgcttcctgtttatcccccgcattttcctatcttcaccgcaatacacaacagcaatatgatgcagtttctttaataagcgtcccagagaaaaattcaaagagttttcatatataactttaagagaaaaaaaaaaaaaggtacagggaaaagaaggccttgccctaaatcatataactatgacattgtttgttgagattctgggacttttgattctaagcctattttcttacagctaaactaaagaaagattccataaagaggccaggttgaatggatattaaacactctaacttgaagaggtaattctggttggatattgtcccgaaaatccacatagaaaatttgatttttcttttaaacctctgatgttttgaagtaaaactttttcttggaatgaaagaagacgtggttgctgatcgtgcatgtttccctatattaatgccttttatatcattctatttttctaccactttgataagaaagctgatttcgattgttgtcaggaaaaaaaaaamcccacaaacttattttctattagtttctaacttctatattaagttatttctaactttctcacattagctataatttgtagactttaccctccttgtctgatgcaatcagtgtaaattaaacggagaatcaaaaggtcaatacctttctaatccatgaaacaccttttcatttttactttctccagtttctcctaagccataaggcttgttcatcagtgattaaaattgtggaagtgtagtgattttaagaatawagacttttttgtttagtgctttcttacctcatcacaatttttcttagaacgttatggcaaaaatggcaatgtattctactttgtgtaacatttgcttgtttttatttttcccttctgaaaccacatttcttattcaatttcttattagcacttgcaatatttctaataagttatttctaataagaaaaactttgtaatgagaaaaatgtcctttaaaattgatatttaatttaatccacatttaattttatttaatactacatattttgttgtattaaaatatatttcttcttccaaataagttttatgcatatatatatatcctgaatagaatctttaaatgagtgaaaactcattccattgataattgacaaagtctctacctccatcaacctatgatttctaagtattactattgttatacaagaaagatacatacaaaataagtgagaggattgttcattggcagagattctaatttctcaccaatagttatgtcttttttccttttactaataaaccgtccacatccaaattttagcaggtctgaaggctaaagctaaaaaaactccttatacagctaggtatgagcattcggataaagccctactatagcaatatgagcagatggcatgcatgcaccttcatgatatttccatagaataaagctctgtcattaatttcccctttattcctttctactggttgtggaatggacagttttgtaactactacattggacaaacagtagaaaaaaagctttttgaggtgaryggaagttattgccaacctgagtatccagataaagacatgaaatacagctgccctggaccacttgtctacttggaaaattgtatgtgagagaaataaacttctgtattacttaatctgactacactgaaaactcaatgatacaaatgaatataattatattgcaaatgacaaaattaaacatcataatagtttattgtatctaaaataattctacagcatactccacaagcaaaatatcaattaacttctcatttaaaattaaaacaaaatattagtttaataatgttgaaagtaaaaagcccctatagctttaatttctctagaaaagaataattctgttgtgagtactaaaaaaatgacaaattttggtatgattatctttgttaatacagaatcataatcaaggatgtttttattataaaataatgcccattcaaatgagtttaagtgaaataggaataaaaaatatgaaggaattaattacaaggaatataatgtggccacattagaaatgtacatttgcagagcaccttcatttatttgcagggctgcaagatttttcatctctctatgcatttaaattttcctctctgaagagtggctacttaggcgtggtatttcatttttttgtttttcacaattttcatttgaccattgtttaagctgtcattgtcagcaacaatagtgccaaatatatggacacttgaaactgttgtttatgcctacctaattcagtctatcagcattccaaactcctcaaagaaacacaaaattatttkcccagctagaatcaggtattcattctcaggcttcccaatctcttgcttcatgtaaacagctgtattggaggttgggtgtggatgtgttaacaagaaagagagtaactgagatctccagcaacaaatcaaacagaaatttaaaaatcgttcatgagctaaatgcatttattatatattttggatttccgtcataggggacgtaggcaattacttctttttagctggactttaggtgtccaaagtgtaaaatatgtctatggggaaaggtaatacacatgtgggtttagttattctatccataatcatcattgagaataaaaattaggtttgtatttctcctacatccattgtcattatattaattatgattatgattatttcaagtttgaaagataatgttctggaggaggacatagtggttgctataaacataagcaatgcaagtaagttgcaaaaaaactacttattatgaagttatgaccatctaaaaatatttcaaaagtaatcatgtatgtcttcaaacagagactggtctggtttggtgtctgtaaaaagcatatcttcagatgttttcacccagtcattacgtcacagtctcaaatagacaatatcttgtaaatttgacttgatttattgtttctaattaaaaataatccttaacatattttctgtaattctcacagttgtctatgaatataaattattagcctgttttaacatcctgtttcataagtaagcattcatctactcatagattacagtgttagtctaaatgaaatccagtgatttcatttattttaatcacccatccaccttttttaaaaaagtgatattattagaaaatacaattgttggaagctacgctagaaagattcatttatgggctattttcaaaagtttwcaatgttaggcatcttgtggggaagaaaagtgatcattaggtcatagcagaattttattttttagttattgtatttacttgtaattaataagcaaactcatatttaacatgaattctagattgccaattaaaaaataatactcaaaatattaatggagttaggtattacacagatctttaacacaatataattttatgagaacattaatgacaaaacttctaatttgaaacttaaattgttggattttaaaatttatatcacttgctgctctgtggctacctgacatatttagctgtttgttcatgccaggcatatcaatgatttttttcaataaatagatttataattacttggattcaggcttcaattaccctaatatttcatatggttaatataccatgaagaagaatctgtgcttctctaatagatcacagtagtataaatggattagaacttttgtaaaaggtggatagcacacacaatatattaccatttaacgtatcttattacatataattagaacgttaaatgccaccaactacactttataaattatagctaatgcacctctcaccaaagacttgctcacctactgagcagccatcatatttaaagcccttttttaagtgttcttatgccctcaaggataagacaggctaaagtaatgatacttttggaactgcacataatcagctcctataaaaacatctagtcctgattccaattatgttacttcattgcagcaggactgtacatttcaatcaccaaaaggttcagtgcttttctgaagccccttggcaacacacagcagtccctatgaaagtatttagcaaatccctttgtgatrcatgaggggtttaaagcagtaataaaccaatccctttacattgataaattcctcttaagtcaatgagggctttgcagggactgaagtctaaggatttttcttctccagttcaatctctacaagaatcacagataatatatagtaatacagacatctattttcaacttctagacccactagagggcaagagaatcataagtcaaattaaaaccacagtttaaatctgggctgcccaatttcagtcccttggaaaagctagtggcacttttctgcagcacttggtatttaaatgtgtcactgctgtgttcctgtgcacctaatggagctctcaatacacatttctggcgctgtagacagggttacattgcaatatgctagctttacctatagaactccttttgtaataatggggttcctctttgagcccataacagagtttctagcataatattctactgatgcagaagcacaactatgtttgaaggcacataagaaatatacttggtagaactctaagcttattatgagtattaacatgctctctgatgtaactctttgttgtaggatatgtggagattttccttataatttttttctttttccaaatatgaagctatgtattagtgactaatatgcccaatgttgtcagaggatatatattctgagaggagcagctattgtaaaatatagaatgccatgaaaaagtatattaaagtttataactccaaaagcatgacttaattaagaattgtgttctgcaacagctatttagcaaaccttgacttttttcaattttccagactgatggtgcattgcaggaggggaagtctagcaagggttgtcctactgactttgaaattctttttaacatttttaatattttcaaatgttttaaatgttctaatttataaaatagtataggtattttaaatatatgactcaaaatctactcagcagaagttttgatgttgcaaattatcaataccctacagatatattattaagatcttgatattttacaggattttgggttcaaagttttaaaagaatacataaaataatggcctttagatttaaataagaccatatcttcagttaaatggtacattttccttcaatctggctcttggccagggataagcttaaaaacacccaacttagttttatataaaaagtacatgttgtcaagygggcttacaacagcatcgacctgctttactctcttcttataacagaataatatttggcttttatatctgcataaagaacgtatatctgtgtctctgcataatccttattctattaagattttaaattatttcttatattataaattagaaattattgtctaatacctaaagctgatcgagttcaaagtattccttaaacatctactacattaaagatcctgtgttaataactagaaataaaaagctcaacaatattttgcctcactcatcaaggagcttatagcctactgaatgaaaagaacctgtatatagatcatttcaatgrgtacaaaactattataataatgaaattccctgaagcttatagattcagggaagggcattcagagtggtctgaagtacagaggtttttggaagaagtaacacttttgtaggttctcaaaaaatgcttaggtgtaaatattaatatatgagagcaaacagaaatctggaaaaaatcacctattgttattactataatcattgaaacaaaattacatgtgtttaaattcctgaataaatatagcagggcttactatatgaagcccctaaataaaattgttataatggattaaaataaacaaacaacaaaaatgcattgaaattaagaactccaatttcagagtatacataggaaaaaaatctatagagagaacaattttaaaacacaagaaattagtattacttgcaattacatacgaattttgaggagtgacattcatcactaccaaaactagtctaacaattatataaacaatttaccttgtacactacaatatgatcataattagattaaaatgctgtcttagccagttctagctgctatgacaaaataccataaactgggtggcttaaacggcaagcacttatttatcacagttcaggagtccgggacgttcaagatcaaggtgcctatctattcaactccctcagtgaatttcaatttttggtgagggctctcttcctggttggtagatgtctatcttctcattattttctcacatagcctttccttggtgtctacactgggaatgcgatatacagatcttgtgactcctcctctttttcacaagggtattaatttcaccatgaaagccccaccctcatgacctaatcttactctaataacctcccaaaggccccatcaccaaataatattacattgtagactaggtttcaacagatgaatatgctcaccatattttctgacaacaaaaccacatcaaaattatgtgaattataacattaaaatattaacattgtcaagtgaagttggtaggtaattagagtatgcaaatgaatactcaacaacagtgttggattcaaaacaatattttttctccacaataacttatggcctttatgtttctagactaaatttacatcttttaatataatacaaataattgaataaataaccctaaacataaacctagattgaaccttcttgtgttcaacagagcctgaaatttggaaacagttaaatttactctttattcattgaataaggatttatttggcaatcacattgctagaccctgaagtcacaatagtaaacaagaaaaatatgtcctttgccctcatgggtctactggcaatggacgaaaaacaattgactaagtttatttaaacaaacaaacgttaaaagaaacaggaacatataacttgaggccctaaacctggtacagggaattaggaagacttctgggagaaaatgacactaaaattcagatactcatgtagtttatcataatgctgataaacgttcattagggagtcaactaacttatcatatagtgaatacctggtgttcttgacatgtagaatttagtcgcccttcattccacaaaatacttgttatcattctgagtaattttatatatcagatgggggcagtaagccagctaagaattgtaacatgtgatctagagtaaagacaattagtgtatttgaggtcaataaaacccaagaagaatttcctaggaatcataaaaatacacccattttaagacaggcaatgatttaattcaaaagtaatatataatgacagagtgcagaactgagaaaagagaaaaatcaggctctcttcatcagtatcatttgaaaccttgatcaatttacataaacacctgaaactgtgtctctagatttcagacttaggtgaagcaaaatattttctaacttcttgagcaagtttggcttaggttagatttattttgaatgcaaaagaaaaaccctaattgatgatacatgcaataatcaaagtaattgtatttttttctgcataaaatccacgccaaatttaatgactcaaaacaagaacaatatataattcctcatgattctttgagtggctgtatattttctctctgctctcatgtgggataactcatgggactgcagtcagcttgtaggtcagcaggggaccagtctctcttggaacaggtgagaagcttagctcagttgggccgatgtttccatgtctctcatcttccatgaggctgttttgggcttcattacgtgatagtccaacgttgtcaacagcaagactggccaagcactgatgagcaaccactttgaaagcctctgctgtgtcaccttggctaatgtcactttggccaaaccaatttgcacggtacaaactaaatttagcctggcttgatcattccacaatacatacatgtatcaaaacataatattctaccccatacatatatgcaattattatatgtcagttaaaataaaataaaacaatacataaataaatttgagacatagagatataaattcctcttgattgcaggagtcatattgtgaagagtgtacacactggtatgagagaaacatgtaaccattttggccatatactaaaatgaggctttagacagaagtgaacttgtaacagaagtgaacacaagaaaatatttacagagagaaaaataaagtagaaaataaaatagccagrgccgcataaaatgtgacatttcctagacagaatacattgaaataatatgatcaacttagattttcttttctctagagaacttgtagtctatactcagcttgaattataatagtgtttctggatttttgaaatctcaaagaaactaagtttcacaatcatgttctcataatacaagcagccatacaacattatacatcttattttcacaacactttattttgtatctagaatacagtatatgttcaatgaatatttattgaataaattaggtgaatttttatgcttggcaatatgaaagaactcaaaaacaataatttgtatagaagaaaagccacttatcctggtctttaaccatagccattttaccacctttctaaccaatgctgcttcgctaatagattttatataaatgttgcccatcctcacttttttccaaatttgctgtcattttgacagacttgatggattttttctattattccaattattttacagacaaatcttagaaatatgctgcactcaatgaaaagaaatacttctttcctccttcagtcttgcttctaaatttatcacttgagactttgaaaaaatatttttattcattttgctttaaataaaactgattggaacaatactgaatatatagattaattaaaagtattcttttattttacagggggtgggaaacttcaataattacagaatagtgccaaggagcatgttaagcataggcattacctatattgagtagaaaaataataactagaatctcactaaataatgctgtttttaatttcctggtgtggttacattctacttttgaaaacaagggtaaaaggccactgctgtcaagaagaatgaaatgtagaaagtatctgccatatagatttggcataggatcataaaatattgaattgtaaaattttaaaacagatttatgagagaaatgcttccacataattccactgccctgaataccttaaaaacttgctaagattttaaactttgcagatttaagaaagtgtagagtatagggatagaaattattgccaagattgtactttattgcttgctaaatattgttccctgtctgaaaatgccttgacacaggtgactgatttttaccaccgagcatttcttctgtaatggtcccacgctatactgagatgatttaaattttataattctgaaaacattaatgagaaaaaatgtatttaatgttgcttatcattttgtattaaaattcatatatgtaatacatgagtgatctcagtagaataaaattttaatttttcagaaggaaatactgagtgtccctgctagcctcttccatcccaggccaatacccagaaatatgcactgctaaaggttgtgtttcattcaattagaactttttcttggtatttataaatgctatattttttacatcatatacatgtaatgcatttttcagctatgaacacagactattttaaatataatgtatttataaataatatatagatatgattttgtacagaagtattcatatatatgagatcacatatgtatataagttgttaacttaaattttaaataacatttgcatggaagcacaacatacaaaagaatgcagaaatcacaatgggtctgctcagtggttacgtaaccgtacctaactcaaaatatagaacattaccagcatgttagaagttcctatgttctcttctagtaaataaatgctcttgtcttcctaaacttcatcaaaatcgtgactttttataccatatattaggtttgcatgtatttttaattaaattaataacatgtctggttacattatatagataaaattaaattttatttttatatgctattcatatattttcattgttgatgaaaatctaatataatctattcgttgatctattcgtcagtctacaattgatggactttgggctaaaacagcaatgcaatgaagcttcttgtatacatacaggcattttgcatttggctcgttgatacttcgggtagaattgctaggttacagggtatgtatatgtctatttttagtagataatgcctaagagttttctaatacaattatacaaatttgaacttccatcagcaatatggtggatatactaataccttacattgttgccaacacttgttattactattcttaaaattctatttattctgatttgtttgcaataatacatagttttcatcttaacttgctaaggataaatgagcattttctaatgtgactgaccattttaaaatatatctgacatttgaatatcctctttgagaattcctgttcgagtctgtttatcaattttaagtaagattcttagtttattcttattgatttaagtgagctttagtgtattgtgaatataaactctttgtcagttgtatctttttccaaacttgaaattattttccattcacacacagtctatgttaattaataaagcattataattctaatataatcaaagtgattataaaaagcttaagaaatagtaaatttgttgttctaagttaactttctctagtcaaaattcataaataaaactataaaaatgtagaacctgaattattttttacagttaaccttaaattccacctataatgtattaaattttattattcttattgagattaattcacaaaacaacaaattcaccttttaaagtatacaatttagtgtattttactatattcataaaagttttacaataatcactctatgcctattgagattaattcacaaaacaacaaattcaccttttaaagtatacaatttagtgtattatcacatattcatawagttttacaataatcactctaattccagaatatcttcattaacccaaaagaaaccagatacccattagmagtcacatctcattttcccctccaggcctccttgtaaacctactttctgtttctatgaatttgtctattttggacacttcataaaaatataatcataaaatgattagccttttgtgtgtagcttgtttcatttagtataatgatttcaagattcacctatgttgtagcatgagtcagtatttcgttcatttttatagatcartattactcctatgagtgggtatgtcacattttgtttattgtgtatcaattaatgaatattcagtctatttccactttgggctattatgaacaatgtggttatgrctattcatgaaaatgttttgtgtttgcatatgttttcaattattttgagcattgctatgatttgaatgtgtcccccaaatttcatatgttggaatcctaatccccagtgcaatagtgttgagaagtgggacctaacggcaggtgtataggtcatggcggctctgccctcatgaataaattaatgctgttattgtgggttcattatcacagcagtgggcttgttataaargcgagtttggccatctctatctcccttgctatttctcgagctctcttgccctcctgccttccaccgtgagatgattttattttctttataaattacctagtatatagtattctgctgtaacagcacagaacagactcagaaaagtatatgcctaacagtggaattgctaggtactatggtaactctaagtttaattttttgaagactgttaaggcatttttctaagcagttacatcattttacatccccgaaatcatgtacgaaggtttcatttttgccatatcctcatcaaaacttatcttctgtcttttttattataggtttcctaatgtatatgtggtatcacatagatatacatataaaatatatatatacatataaaatgttttatgaaaaacataaaaatatatattctcaaaacatgttaatataatgagcaatgtaatctaattaggaaaatgaaagaaataaagacaaaaccttacaggtgaatgtccaatgagtttgaatgatttctctaatgtcaaatttttagtatctggcataacctagtctcgtgactcctttacatgctcctgccaggacaccattaattcaaatttaatttgcaaactcctctcagtcttttggcaaatgctggagcttgaagccctttacttagcaacattaataatagtattctatcatgtataacataacacagggtattctattatgttatacttaccaaaaatatttcaatattgatggattatgaattctcctaacttgttcataacttgttctaaccctctcctgtagagtttctttccatgaagtgttgccaatggaaaagaatgaaaagccatgtagatttatgcacacttggtcatttaaactgatcaggaacatattagcaggataaatggcaagagagagaaacttccaagatattatttagctaataggttgaacaaatgtgtttttatacgtatctcaaattcttgtctatataatctcagtctttgttcacagcattaattccttcttatctccatatcaattactcctccaatttgtaggaacaataatgccacaactacacactctctttctatttgtcattcctatttcgttcttgcatttttaagtagcatgtaaaataagatatggtcctcctgactcaaacatggtcctattgacaaaatattttactaaatgaatacataacactttatcaaaattatttcttaggaaaaacaggtaatatatttccaagcaaacatgagcatttatagaacaattggcatgtttctttctccatacattatttcacttaatgatatatctttagttaaatactaatgttccttcccaatcaggactatatttgaattgtatattatactccttttttgcggaggttatgttttcctttgctttcatcagatgttctctgttaatttgctgttatcacacaatcctatttcagctaaacatagttgcctatatatctctgcagtaattcttcagtctgtttgttcagtaagctggagaaaagcaatcaaaatcggcaccgtcaccttctctccacattcattcttatcagggatcagtacctctccttagaattcttttatttttatttttatttttttattttattattattatactttaagttttagggtacatgtgcacaatgtgcagattagttacatatgtatacatgtgccatgctggtgtgctgcacccattaactggtcatttagcattaggtatatctcctaaagctatccctcccctctccccccaccccacaacagtccccagagtgtaatgttccccttcctgtgtccatgtgttgtcattgttcaattcccacctatgagtgagaatatgtggtgtttggttttttgttcttgcaatagtttactgagaatgattatttccaatttcatccatgtccctacaaaggacatgaactcatcattttttatggctgcatagtattccatggtgtataagtgccacattttcttaatccagtctatcattgttggacatttgggttggttccaagtctttgctattgtgaatagtgccgcaataaacatacatttttttccgcaccacaccacacgtattccaaaattgaccacatacttggaagtaaagctctcctcagcaaatgtacaagaacagaaattataacaaactgtctctcagatcacagtgcaatcaaactagaacttaggattaagaaactcactcaaaaccgctcaactacatggaaactgaacaacctgcttctgaatgactactgggtacataacgaaatgaaggcagaaataaaggtgttctttgaaaccaacgagaacaaagacacaacataccagaatctctgggacacattcaaagcagtgtgtagaaggaaatttatagcactgaatgcccacaagagaaagcaggaaagatccaaaattgacaccctaacatcacaattaaaagaactagaaaagcaagagcaaacacattcaaaagctagcagaaggcaagaaataactaaaatcagagtagaactgaaggaaatagagactcaaaaaacccttmaaaaaattaacgaatccaggagctggttttttgaaaggatcaactaaattgatagaccactagcaagactaataaagaagaaaagagagaagaatcaaatagatgcaataaaaaatgataaaggggatatcaccaccgatcccacagaattcttaaaacttatggacaggttgaaataactttccatttgtattaggagttctgcttttaaaaatttgacatatttctatctaaactttattcaatcaaaataactcaagtacttattaccatagcaaactatactattgtagcatttaagttgagaataaatagtgaatacagtagtggttattcaaaacagtcctcctagaatgtaaaatacttatatatggtgggtaaagctatctttttaattaatatgctaacttgtttttattctaaaatatttcttcttagatatatttatggggtgcaatgtgaggtttatgtttatattaatttgttaaaagtcttctttttgaataattagaaaatgaaacaaaattgagcataaataagtatgggttagtttaaaatcaaatttatttgaaaaaataagtgtaactatatatatatgatgtttcataatttagaagtttaggaaatttatatctgattgggcctgttactagctgattaagtagccagcacaggaagccaatcagaggaggaaagtaatcaaagaaaccttataatcttgatgttgctaaattttctgtttcagatttgggaggtttgagttgttgattccaatcaaaactaaagttaaatcattgaaaatatcaacagctattggatatctattatacagcatttaaatgattttctccattcctattgggagattttatctgacacataagatacattatgagcaaccattatgccagataattgtaaaatgataattttgctcaacttcaactaatataggcataaactattcttggcaatcaaagaacttagacactttttaatattttattttataaaatcaaataaatgtattttttcttatggttctggctgcctccatttgtattcttctaaatatttgataggttgactttgcatttcctcactttttgtttcacctaaatttaccttgtaattcaggcaaaatatatattttttatgttcattaagaatgtcccaaaaaccaataatagaaaatacttatacaaagttctcttattgatagactacttcagatgactgtttgagaatttgtgatgaaatagaattagtattaaaataaagaatagattgcctgatgtaaaatgtaaatcaatacacagagacaaataagtctactttgttttgaaatgtatcttcattatcagatggatttttacaagaaacaaaaatatcaytgtgcccaaggtaaagcaaaataattttggtaaatgacattgtgcaacagagagcagagtgtcccaaaaggtgaagaggctggaatttaaactgagtataaaaagggccaaagtgattattgagattttcaaattgttatttttcaagataatatttatatctgcaaaaccaatagatagaaatattattttttaaaatgacattttttacatcatattgcactataatggaaagatattagggctctcaagtttactatgaagaacttgaaatagaaaccaataattgaattccatgtaatgaatgctattataaaagtttcacagcagtgcagaaataaaatggataatgggttccaggcctgagaagaaagcagagtttcatagtacacagctgtttgaggaaaaattaatatggtcagagtatttatttataataaaatattgttcatgctcacctttggcttctatagtcagatttcttgtatatcagtcactagtcttacagagctgttacctggcacaagtaaattaaacttggcagttcttttatctgaaacatggagacccaaattttacttaactcagagaattgtggctattgattacaataatatataaaaagcatagagaataaaagcaagctctggtttcttttcttataaaggtactaatcccatcatgaaggtcccatatttattacctcatcttatcctaattacatccccaaagcccaatttccaaatactaccatataggtagatagaacttcaaaatgtgaatttgaatagagcacagacattcagtccataacagggcctctagatgtgctgagttatcactttgtggtcagctgtccagggtaatgtctaaaagcctttctcataggaaagtgcctgctcaacaaagctcctcaaaagcaattaaattgaactggtattttcaggaagatattagggggcaaagaataagtctactacatgtactaagaacacagttctagttcccttagagatttaatttctgccatattatatgcagtaagtccaacatttgatttttttgttagataaaaattaacaggtaaattgtttacggataaaattaatacaataatttttaaagacaaagagggcacaaaacaatttaacaaggaggaagtctgcgtacagggtctaactacatgctgcttggccatgttctctgaagtattaaaataatcatgcacaaatagtataaaatgtctgagtaatttggtttcagcaaaaatagctgtacataaaaagaatgcattatctaaagcctcatgatatagttagaggaaatatgaaaatttgtacagtcctatcagactaagatgtatgtagataacgtgggtatgatctgtcttctcctgaagaaggaagtgctactgattgaaatattttgaagaggttctgagttaatatgatttatgggaaaaatgagatttaaaatgcattgactcgataatcataggaaatgaaatctcggtgccattttaactggcctgaggagctttaacaagttatacctagcatatttgaaacgaagtagtgggaagtgagaatatcctcctaagtcaaagagaagcactggaacagtttttacttcagaaataaagttaaggacaggaattccagaaagtggaggagaagctttataaatctggcctgattataaccttaacatatttggctactaggctaaaactcaaacattaaaataatcctgggtattcactcagggagagaattttgttacattaattgaaatggaatcagaattgtgtagtctgaaatcctagaataccaagctaaaattttaaaaagttgtgaaaaagatatgcaactcagagtacctgaatatataaaatgaaaatgtagcttatagcacagcttcctaactgcttattaccatgaacaaatatttatgttcaatatataatcagtaggaatgctccagatagtagaagattagaggctattgcccatgggaatcaaaaactgtaatcaatgaatgctactttggaactcatttctgtacagaattgtcctgttataatcagtcagtggctatgactccagaaaaatttggaatataagctctaaaggtgatgtataatcctccttctacttgctacaggggacaaaaaacaggatatgtctgggaaggaaatacccttaataatgaccaacacttaatacaaacaaattactatgttgaaatatgctgataaagatgtaattatggaattattatagggtacagcaaataagtgtgaaataaatatttttataatattgaccatgtaaatgatttactttgataatttaaaaggataatctctagtactctttaaaatatataaaacaactgccaaatttacacaagattgacaataaagtcacaaattagcaattcagtctacttgctaaaagcaatatattattttataaaggttattcagttgttaaacaacatgaaaatttctctctgtgaaaaagtgtcatttacttacctgaaaatatctttcccaatccagttaaccccttggatatttgaattatttgatgacaataatatatgaaaagcatagagagaaaaagcaagctctggtttcttttcttataaaggtactaatcccatcatgatggccctgcctttatgacctcatcttatcctaactacatccccaaagcccagtctccaaatactaacatataggtagatcgaacttcaaaatgtgaatttgaatagagcacaaacatcctagagtactattgacacagtagtaagatattttgagggaacttactggggatataatcattactgtggaaggtttataattttaaaaaagctaatgagttaataaggtgactctacaaaaacacaagccaagaagtgtatttcagtacagtcacgtgttgcttaataaaggggttagattctcagaaatttgtccttaggcaatgtcctcatgcaaacattatagagtacaattacacaaagctagctggtctactagtactagcctgctacacaccaaggctatatggtatagcctattgctcctaggctacaaacctgtgcagcacgttactgtactgaatactgtaggcaattgtaacacaatggcaagtatttttgtatctacacatatctaaatatagaaaaggaacagggtatggtggctcactcctgtaatctcagcacactgggaggccaatgcaggaagatctcttgagcccaggagttcaagaccagccttggaaagagtggaaactcatctctactaaaaattacaaaaaaaaaaaattacctgaacatggttgcatgctgagtagtcctagctactcaggagaccaaggtgggagcatccctggagcccaggagttcaaggttgcagtgagctatgattgcaccaccgtggaactccagcctgggcaaaagtgcaagatcctatcttaacatacatacacacacacacacacacacacacaatgtatatagaaaaggtacagtaaaaatgtggtattataatcttatggaactaccatggtatatctggtccattttttactgaaacataattatgtgacacatgattatattggatttcaggagagaatgagacataattctacttatgaaacactgaggagaagcattcgggcactcacccacaatacacctggcctacattaatatctgctaataatggtgctagtactgtttctatactatgtaattgatgtgtgactgagaccttattgcactaactgaacaggccaacatcagctggaatttatgccctcacttgtttgagaatggtcacaggtttaattaacttttcttaccccagcaaccaaagaatctgactggttcttcaccttcatgaggttataaaattggcatttgactttctgacaatgcaaaaaccggagaatcacatcactaacttggcagtttagatgcataaagacagagcctgtgatcagtggtgcagaaaaagaaagagagaaaatactataaggaaacttgtaagatgacctaacagtggaagcaactgaattcataaagcaataggaggcacaaagatactagaaaatttttctaagtaaaaagctcagtaagacgtaagagctacaattactgaggatgtgtttatgccaacaggattataaatgttttacctggatttcttgatttaatctttgtgtgtgggacacaccctgagctgaccaccaatgagtcacatgtttacataatctccttcttttcatgaaggctgaacctatgacttgctgctagtcaagagaatatggtaaagaatatggaaatcactgtcgtgactattttagcttatataagattccattttgcagacaggaataagacagtctccagctggtcctgaagaggcaagttgtcttattaatagaagacccgtgagatggcctgacaaggcttcatggcagggaattataggatgttttttgtagctgagagcagctccaggatggtagccagcaagaaaataggaacaccagtcacacaaaacaagacactgaattcagctaaccatcacatggagcttcaaagagagctctgagctccaaaaggaatgcagccaaaacaattgccttgtgaaaccctgagcagatcttgataaactgtgctagactcttgacttacaggaactataataattgtatcttgttttaaccagctaaacttgtggcaatttgttacaaaacaatagataatcaacacaccttaaaacaactccataaattcagtcctgttattctaaatgtggtaactgaagtatagatggattaaataacctcatgaagtttacacaattggtaaatctttgaactagkatctgaatccaggtaacacctggcagattaaaaggcaatgactttctgcagtcatgatttcaagtatagaaaattagaaaattcactgttaaataatcagaactgcttttagtctactaatctgtatgtcctctaattgactgtgaattattttctaaatttcaacaaacctgttgggaaagttttaatttttatatcctcatatcttcagtatatacttacaataagctccatttaattatattaaccagagcatgtttctgtttccccgttgatttcttcacatcagagttagaaacacccatgggaaggtgtatttatgtttcacctgttgcccattgcgataataaaaaaaaaactcgagcaaaataaagtaatttacacaattcatatacaagtatggaggaggyaacttaatgatctaagaatctcatttcatccctgagtttctcagatgaactcctagaattatggctaaaaaacaaaatatgattaaatcttatcgtctagtttacccattaggttttacataaagcaaacattttaccgtaagtgcaataagaatggcaacaactatttcagttttagggatcaaattaaatattttaaatgcaactgaactggcacatttttctacaactgcaaagctgaaatgttagggattttgccataatttattgcatctaattatttttgagattactggcattttttgcatcctaataggtatagtcagattaaattgtattattttcttagtaatgagtattggaaaggatggttgtcacagtctcttactatggcctgcaaagtatgccaccaagtttgagatatagaagatgttggggaaataatatttaagcattactgtaagtctaaaaacaaaaggcagtttctcatgacaaattcttaaatgacctttgatacctaaatgacaaaaatgatagtaaatacagcctaattatgtgttttataattaggtaatattagaatatctttgtcacatacatctaaaaatattttaaaacaataatatagattagaatggaaataagtgcatattttatctctaatcttctattatgttctcagacttcctgccttaaaacttgcaataatcggttattttaaaggtatttattacttcaattatggtcgtatgtggcagaatataaaatgtgatctataatatacacattatcccttcaaatatataatatatatttggtatatatgtataaaataagaaaacacacttatgctatgcaatatagtacccataataaaactttttatgtgtaaatattgtacctttgacattaaatcccaatagttatttctcccacacaaatttccaatttttttattatactttaaattctagtgtacatttgcacaacatgcaggtttgttacacatgtatacatgtgccatgttggtttgctgcacccattaactcatcatttacattaggtatttctcctaatgttatccctcccccatccccccaccccacaacaggccccagtgtgtgatgttccacaccctgtgtccaactgttctcattgttcagttcccacctatgagcgagaaactgcagtgtttggttttctgtccttgcgatagtttgctcagaatgatggtttccagcttcatccatgtccctacaaagggcatgaactcatccttttttatggctgcatagtattccatagtgtatatatgtgcccattttcttaatccagtctatcattgatggacatttgggctggttccaagtctttgctattgtgaatagtgccacaacaaatatatgtgtgcatgactctttatagtagcatgatttataatactttgggtatatacccagtaatgggatggctggttcaaatggtatttctagttctcgatccttgaggaatcgccacactgtcttccacaatggttgaactagtttacagtccccccaacagtgtaaaagcattcctatttctctacatcctatccagcacctgttgtttcctgactttttaatgatccccattctaactggtatgagatgctatctcattgtgattttgatttccatttctctgatgaccagtgatgatgagcattttttcatgtgtctgctggctgcataaatgtcttcttttgagaagtatctgttcatatcctttgcccactttttgatggggttgtttgattttttcttataaatttgtttaagttctttgtagattctggacactagccctttgtcagatgggtagattgcaaaaattttctcccattctgtaggttgcctgttcactctgatggtcgattctgttgctgtgcagaagctctttagtttaattagatcccatttgtcaattttagcttttgttgccattgcttttggtgttttagacatgaagtccttgcccatgcctatgtcctgaatggtattgcctaagttttcttctagggtttttatagttttaggtctaacatttaagtctttaatccatcttgaattaatttttgtataaggtgtaaggaagggatccagtttcagctttctacatatggctagccagttttcccagcaccatttattaaatagggaatcctttccccatttcttgtttttgtcaggtttgtcaaagatcagatggytgtagaagtgtggtgttatttctgagggctctgttctgttccattggtctatatgtctgttttggtaccagtaccattctgttttggttactgtagcattgtagtatagtttgaagtcaggtagcatgatgcctccagctttgctcttttggcttaggattgacttggcaatgcgggctcttttttggttccatatgaacttcaaagtagttttttctaattctgtgaagaaagccattggtagcttcatggggatggcattgaacctagaaattaccttggacagtatggccatattcacgattttgattcttcctatccatgagcatggaatgtttttccatttgtttgtgtcctcctttatttcattgagcagtggtttgtagttctccttgaagaggtccttcacatcctttgtaagwtggattcctaggtattttattctctttgtagcaattgtgaatgggagttcattcatgatttggctctctgtttgtctgttgttggtgtataagaatgcttgtgatttttgcacattgattttgtatcctgagactttgctaaagttgcttatcagcttaaggagattttgggctgagacgatggggttttctaaatataccatcatgtcttctgcaaacagggacaatttgacttcctcttttcctaattgaatacgctttatttctttctcttgcctgattgccccggcctgaacttccaacactatgttgaataggaatggtgaaagacggcatccctgtcttgtgccagttttcaaagggaatgcttccatttttttgcccattcagtatgatactggctgtgggcttgtcataagcagttcttattattttgagatacaatccatcaatacctagtttattgagagtttttagcatgaagtgttgttgaattttgtcaaaggcctcctctgcatctattgagataatcatgtagtttttatcattggttctgtttatgtgatggtttacttttattgatttgcatatgttgaaccagccttgcatcccagggatgaaaccaacttgatcttggtggataagctttttgatatgctgctggattcagtttgcgagtattttattgaggatttttgcatcgatgttcatcaggaatattggtctaaaattctctttttttgtgtgtctctgccaggctttggtatcacagtgatactggcctcatcaaatgagttagggaggattccctctttttctgttgattggaatagtttcagaaggaatggtaccagctcctctttttacctctggtagaatccggctgtgaatctgtctggtcctggactttttttggttggtaggctactaattattgcctcaatttcagagcctgttattggcctattcagggggtcaacttcttcctggtttagtcttgggagggtgtatgtgtcraggaatttatccatttcttctagattttctagtctatttgcgtagaggtgtttatagtattctctgatggaagtttgtatttctgtgggattggtggtgatatcccttttatcattttttattgtatctatttgattcttctctcttttcttctttattagttttgctagtggtctatcrattttgttgatcttttcaaaaaaccggctcctggattcattgatttttgaatggttttttgtgcctctgtctgcttcagttctgctctgatcttaattatttcttgccttctgctagcttttgaatgtgtttgctcttgcttytctagttcttttaattgtgatgttaggrtgtcgattttagatctttcttgctttctcttgtgggcatttagtgttgtaaatttccctctacacactgctttaaatgtgtcccagggattctggtatgttgtgtctttgttcttattggtttcaaagaacatctttatttctgccttcatttcgttatgtacccagtagtccttcaggagcaggttgttcagtttccatgtagttgggcggttttgagtgagttccttaatcctgagttgtaagttgattgcactgtggtctgagagacagtttgttgtgatttctgttctttttcattttctgaggagagctttacttccaactatgtggtcaattttggaataagtgcaatgtggtgctgagaagaatgtatactctcttgatttggggtggacagttctgtagatgtctattaggtctgcttgttgcagacctgagttcaagtcctggatatccttgttaaccttctgtctcattgatctgtctgatatttacagtggggtgttaaattctccctatactattttgtgggagtctaagtctctttgcaggtctctaaggactgctttatgaatctgggtgctcctgtattgggcacatgtatatttaagacagttagctcttcttgttgaattgatcctttaccattatgtaatgcccttctttgtctcttttgacctttgtttttttaatgtctgtttaatcagagactaggattgcaacccctggtttttttttctttccatttgcttggtagatcttcctccatccctttattttgagcctatgtgtgtctctgcatatgaaatgggtctcctgaatacagcgcactaatagcgctgatgggtcttcactctttatccagtttgccagtctgtgtcttttaattggggaatttagtccatttacatttaaggttaatatgttatgtgtgaatttgttcctgtcattatgatgttagctggttattttgccctttagttgatgcagtttcttcctagcgtcaatggtgtttacaatttggcatgtttttgcagtggcttgcactggtttttcctttccgtgtttagtgcttccttcagtagctcttgtaaggcgggcctggtggtgacaaaacctctcagcatttgcttgtctgtaaaggattttatttctccttcacttatgaagcttagtttgggtgtatatgaaattctgggttgaaaattattttctttaggaatgttgaatattggctctcactctcttctgacctgtagagtttctgccgacagatctgctattagtctgatgggcttccctttgtgtgtaacccgacctttctctctgactacccttaacatttgttttccttcatttcaaccttggttaatctgacaattatgtgtcttggggttgctcttctcgaggagtatctttgtggtgttctctgtatttcctgaatttgaatgtggcctgacttgctaggttggggaagttctcccggataatatactgaagagtgttttccagcttagttccattctccccgtcactttcaggtacaccaatcaaatgtagattcggtcttttcacatagtcccatatttcttggaggctttgtttgtttctttttactcttttttcctctaaacttctcttctagcttcatttcattcatttgatcttcaatcactgataccctttcttccacttgatcgaatcagctactgaagcttgtgcatgtgtcacatagttctcctgccatggttttcagctccatcakgtcatttaacgtcttctctacactgtttattctagtttgccatacatctaatcttttttcaaggtttttagcttccttgtgatgggtttgaacatcctcctttagctcagggaagtttgttattactgactttctgaagcctacttctgtcaactcctcaaagtcattctccatccagctttgttccattgctggcaaggagctgcaatcctttggaggagaaggcgcactctggtttttagaattttcagcttttctgctcttgtttctccccatctgtgtggttttatctacctttggtctttgatgatcatgacctacagatggggttttggtgtgaatgtcctttttgttgatgttagtggtattcctttctgtttgatagttttcctcctaacagtcaggtccctcagctgcaagtctgttggagtttgctggagctccactccagatgctgtttgcctgggtatcaccagcagaggctgcagaacagcaaatattgcagaacagcaaatattgctgcctgatccttcctctggatgcttcatctcagaggggcacccagctgtatgaagtgtcagtcagcccttacttggaggtgtctccaagttaggctacacggggtcagggtcccacttgaggaggcagtctatccattctcagagctcaaacaccatgctgcaagaaccactgctctcttcagagctgtcagagagggatgtttaagtctgcagaagtttctactgcctttgttcagctatgccctgcccccagaggtggagtctacagaggcaggtgagcctcgctgagctgtggtgggctccaccgagttcaagattcctggtcaccttgtttgcctactcaagcctcagcaatggtggatgcccctcccccagccaggcttgctgcttggcagttcgatcttggactgctgagctagcaagtgagcaaggctctgtgggcatgggaccagctgagccaggcatgggatataatctcctgctgtcccatttgctaagaccattggaaaagtgcagtatttaggtggcagtgtcccgatattcctggtacagcctgtcacggcttcccttggctaggaaagggaaatcccccaaccccttgcacttcccaggtgaggtgatgacccaccctgctttggctcaccctctgtgggttgcacccactgtccaaccagtcctaatgagttgaaccaggtacctcagttggaaatgcagaaatcacctgtcttctgtgtcaatcacactgggagctgcagactagagctattcctattctgccaccttggaacagaacaatttccaatgttttagggaataattctattaccatttatttagtaatgtgtctcaagtactttgctagttatttagtatccataatcttaataataacactagaaaataatggaaagtttcaaaaatttgcctaaataaatayattttatagcagaaattcatattctggcttggattacttcagatccrttctcttttatcttaatctgtactgccttatagagtaactttctctttaatagtttaaaaacaaccacaactacaacagcataagttgtttaataaaatcagaacatattaaggttgtctgatttggagagagtaaaaagtactttgctcaattttatttcatccgctcggttataattattttatccagaaaagtactttaaaataagattctactgtttgttttaaatttcagacagttcaggaagagaattaggtcatttgttttatatgcacacattgattagagtcatctcttttgtgtatgactcctgtgtacttactcaatttttatattcctagctagaaaaaaaatcttcttcacagcaggaattgtgtaaaaattttaattcaaatcttcttcacagcaagaattgtgtaaaaattttaattcaaaactttatctagcatagagcctggcttgcattaatatagccacttccccattcttttaattcacatttgcatccttttcatccttttgtttttaattattcatatttttaggtttaaagtatgtttcttgaaggcagcatataggtgggtcttggttttttattctgtctaacattctctgcctcttaattgagacatttggtccatttacatttaatgtcattattgtatggatatatttactatgtttctattaattttatatgtttctgatttcttttctatttttatccatttttagattgaggattatttatataattccatttccattttacttttcctatttctcagtagatataattcattgttttatttctagtgtttgttttaggacttataaaatacatattaacttactatagtcaacttagagtaattcttactagtcttcttacaggactcccaatatatctgttagtatgctttccagtgccccagaggtctctgaggatgtgttcattctctttattcattttcttatgttcctttgatttcatctcaactgacctatcttagggtttgctgattctttcttctaccagctcatagctattgttgatcccctctagtgaatttttagtttctgttatgttccttttcaaatccaacatttttactttattgtttttaataacttctatatctctattgatattttccaatgtgcacaatattgttctcatatattcctataattctttatacctagtgtattagtccattgtcacactgcaataaaaatactactcaagactgggtaatttataagcaaaggaggtttaattgacttacagttctgcacggctagggatgcttcaggaaacctgcaattatggtggaaaggaaccaggcaccttcttcacaaggtggcaggagagagagcagagagagcaaagagggaagagcccctttaaaaagccccctaaaaagagccacttatgaatagcccattaaaatccccttataaagggccccttttgaagagccctttataattagctctcatgagaactcactcactatcacgagaccagcatggggaaaaccgccctcatgatccagtcacctcccaccagatccctccctggacacgtggggattatcaggattacaatttgagatgagatttgggtgtggagacatggaaccaaaattttttattttataaaaataaaaaatatttataatagctgatttacattattctaaaaattaacccaacatttgtctttcttaatggacaacttttattgagtgctttttttcccatacatagaccatacctttctctgtctgtgcttttcttatgattgttgttgctgctgaaaactgcacatttaaaataatataatgtggcacctctatgtggggaaactaaagattcctcccttccccttcttcctccactgtccaggatttattttgttgctatctttgcttttgctgctgctgtttgattgtgtagggactttcatggcctaatttcttaaagtcactgttttatgttgtctgtgaccattgacgtttccacttcattaggttagtggtcagctaatgattcaataaagattctcttaaatgctttaagccaataagtctctcattctctgttaagggtctctgtttgtatgttggggcaagttttcaatacttgggcagtttacaattctgccttaaccattacttcctgcttgtgaaaaacctcaggatcaaccagaattgagagaacagtgcttctcaggttatttttctgggtacacacaatgctccctgtatgtgtcaactttagattcccttgtatatgttggggtactcagagtcccctgtggacatctcattttgtaaaatgtagttttaaatttgtgggtaggcccttgcctcagttggtatcactgcccccagataactgccattttaaataattaccactaattattttcaacttatatatgacatatgtccaaacaccaacatatgtctggtggtgtttaccctgagtgagctctgagtgaagtcataaatgggacatttgtagggagctaacagacaggtcaaatagtgaaaattctctggtgacaagaattttagtagaacttgaatcttatttggatgcctccattttctgctaggttgcttgtattcaaagctacaatgattgaaagactgctgattttcaatgtttcacatagctggggagaaatggatggagatgggctaaattaaaacaccacaaagctcaatcttcctaaatatattaatctaattttgtttgacaaatgtttcatacattgttctcagactggtgttaacttttagagttctgaaatagctggcttttaacaattttgccaatgttctttttgcttttatggacaaacaaattttcagatgatcatattctgtcattgtggaagcatttatgtccatatgtatttttgaaagatatttttgacttgatatagaattctagatgaaattcttaaaaaaattaatactagtagttttctgtcagttctttaaaatattggcccattgtcttttcaacttgcattgtttccatcaagaagtctgctgtcatttatatctttgttcattgatacattttaaaaaaaactgataacttttaatgcttactgtaaatataacccgttttaagtcagatggacctgttgttagttactattctttatgttacctatgcttgagtttgttttggatcttagaaaatgtaggaaattctagtaattttcctaaacaaagacattgcatagcagaaatagaaactctggcttagattactgcatatccatattcttggtcctgatctatgatgtttatattcatgtttttattaattttgaacaggtttggttgttttctcaagtatatgtatttttctgctttccccttcttcagagactctacacaattattaggccaattgaagctgttccatggagttcactaatgctctgcttcataacttttgtttctatgaaccaggttcactaatcttttgttctgaagtgtctaatttgttgttaatcctatcaaaagtagttttcacttgagacattgtagttttggctctgggagttttgttttttatagctttcttgtttatgtttaattttctcactcttttctgtcagtttttgatgaagtgaaatataataataatagctggtttaatatacttgtctactaattctctcattcctgtcatttttagatttgtttctattaatttttcttctcgttatagttgcattttattgctttcttgaatttctagaaatattttattgggtgcaagatattgtaattttttaaacttgtttatgctacatgttttgtattctcattaatattcttgagctttgtcccrgaatattgttaaattattttaaacacttttattattgtgagtcttgcttttaaggtttgttacatggtgctggtacagcttttagtcatgggctaattttgtcacactactgaggcataatatttgttagtgttttacctggtgctccctcaattaccattttttaaatattattattaatggcaaataaattatttctagacctgtgtgaactcttaggtttttttcactctaaatatttcacatgagactttctatgacctagtgtagtttcctcaaatagatgggttactctgaaattagtagtgacttgaggaaatcctctgcttgaatacagagctctctatacaggcttatcatcactagtactctttcctgaagacttttgctgcctatactccttggattcctgcattgatctcttaaccttagtccatgtcttcgccttatttcactttccctgaatgttggtgtgtatatacagatacttccccatttaccaataaaattacgtcacaataaaccactcataagttgawaatgtaaaataaaaatgtattcaatacacctaaactaccaaacattgcagctaagcctagcctaccttaaaagcatacagaacacttacattagcctacagttgagtaaaatcacatggcaacacagtacactttagaatctgtagagtattagttgtttacctttataatcacatggctgactgtgagctgcatcctgccaccactgccaaacattgcaagaaagtatcatactgcatatcaccagcctgagaaaaaatcaaaattcaaaatttaaaatgtggtttctaaaatgcatatggcttttccatcactgcaaagttgaaaaattgttaagtcaacttagttgcagctgggcacagtggctcatgcctggaatcctcatatttttggagactgaggtaggaggatcacttgagcccaggagttcaagagcagcctggacaacatagtgagacctgtctgtacaaaactataaaaaattagccagccatggtggtgtgcacctgtagtcccagctactcaggaggctgaagtgggaggatcacatgagtccaagaaatcaaggatgcagtgagctttgatcatgccactgcactccagcctgggcaacagagtgagactctatctcaaaaccaaccaaccagccaaccgatcaaacaaacaaaaaagcaaacattataattcaggaaccatctatactctcaatatagtaagttgtggtcactcatagagttcatctcttttatttccactctctcaggaatcagtgtcctgtgcagccttttgtttcaatatgcaaaaacaattatttcaagtattttgtccagatgtctatttgtttcaagtaggaggatacattcaccctatgttatagcactttctccagaagcaaacatcacttcattatatttatatctattttttaatttaaaaaatttgaatgtgtactatttttttatttcacaaataaataccattgaaaaatgattgggtactatataaaattataattttttaaattttatttttgtagatttagagggtatagtgtagttttgttacatggacatattagttcattctcacgttgatatgaagacataccatacctgagactgggtaatttataaagaagctatatttaatatagcagcagtctgtacaggcttttgcttctggggaagccttaggaaacttacaatcacagtagaagccgaaggggaagcaagtgtgtcttacatggtgggagcaggaggaagagagagagaaaggggagtttctgtacacttttaaacaatcagatctcatgagaactcattcattaccacaagaagaataagggaaaaatctgcctccatgattcaatcacctcccacaagactcctccttcaacactggggattagaattcagcttgagattctggtgggaacacatagccaaatcatatcaatggatgtactatgtagtgttgaagtatgggcttgtagcgttatccatcatacaactagtgaatattgtacccaataggtaattttttaaccaccatccccctcccaccttatagaatctccaatgtctcctattccattttccatatccatgtgtacacattgtttatttccatctaataagtaagaacatgcagtatttggtaatcagtttctaaattatttcttataagataatggcctccaattccattcatgttgttgcaaaagacataattttattatttttatggctgaatagtattccaggatatgtgtgtgtgtgtgtgtgtgatattttatctaattctcgactgatggacacttaggttgattccataactttgcattgtaaatagtgttgccataaacataatagcacaggtgtatttttaatacaataatttattttcctatgagtaattacccagcagtgggatttccagatcagagggtagttctatttttagtatttgagaaatctccatactgttttccatagaggttgtagtaatttacattctcactaacagtgtataagtgttcctttttctttgcatcctcaccaacatctgttgattttttaataatagtcattctgacttgtgtatgattagtgattagtgatgttgagcattttattcacgtttcttggcaactcattttaattcatttatttcttcaacaattacatatcacttttctaaatttaggtttattctaaagtaactatcagaggatttttacaaggttttttcccttaataagtttgcaagctagtggaaaaaccagacaagtatatcaagaaatatttttaggttattcctgccaggggaaacagaataagtatatgctataatgttgatgttttattttccctttcactagctagtagtattttttaacagatgaaatatattatactaagagtatctttcaaaagaataaactaagctgtataaaaaaaggccaaaaaagaaaagagcatatatgggcacaggagacagagtgaggcagtatgaaaaataaccttatgttactgttgtatagaatatttgaaggacagtataaggaaacaaagcttcaggagaaaggaaaataatattgagaagcataatatcactttttggtgttgagagtacatttgtgaacagtgaagaccatgaaaagagggagagaatcagaattatgtggaggtgcaagtattttgtcaagctggtgtagtatgagatatacccacagtagggagaccaactgacatgtaatgtaactaagatttcttgaagatctcatcctgagatactatgagagaatgacattatcaataaaataaaagattaaggagttgaagaaagtttaaaagggaaaatttagtttagttatattgaaaacaagacatatatatctagatatagagatatagttgttctgttatatccacggaagattggttccaagactcctgtagataccaaaacccataaatgttcaagttccttatatgaaatgatgtagtatttgcatacaacctatgcatatcctctcatgtacattaagtcatctctagattacttataatacctaatacaactctatgtaaatagttgttagatgcattatttttatttgtattatattttattgttacttttattatttttctaattattttattgttatataatatttgtacatatttatgtggtacatgtgatattttggtacatgcatagaaagtgtaatgatcaagtcagggtatttaggttatctatcattgcaaacatttgccatttctttgtgtggggaacatttcaaatttcttttagctgtcttcaaatatacaatatattgtcaactatagtcactctactgtgctatttaatattaaaacttattctatctaactgtatgtttgtgcccattaatctacctctttttatcccccaccacagacgcacaccctccccagcctctggtaaccaccattctactcactatttccatgagatcaattttttaactctcatgtatgagtgagaacatgatatatttatctttctgttcctggcttaattcacttaacataatcacctccagttccatctatgttgctcgaaatgacaaaatttcattcactgttatgaccaaatagtattcagttgtgtatttatacaccacattttctttacctattcatctgttgatgaacagattgttgtatatttttgctattttgaatggtgtggcaataaacatggaggtgcaagtatccttctgatatactgatttactttcctttggataaaatacccagtagtgagattgttctatcttgtgctagttttaatttttaatttttggggaaatcgccatactattttccagaatggctatactaattttcattcccactaacagtgtataagaattctttcttttcatctttgccaccattagttattttttgtcatttggataatagcaattctaacttggataagatgatatctcattgtggttttgatttgcatttccctgaagttagtgatattgagtatttttaaatatacctgttgaccacttgtatgtattcctttgagaaatgtccattcagatcctttgcccactttttaatgggattatttgtttttttgctattatgtgagttccttacatattctgggtattagttctttgccaaatgaatagtttgcaagtatttcctttcattcaccacgttttctcttcacattgtcgattgtttcatttgctatgcagaaattttttgctttaatatagttccatttgtctatttggggttttgttgcttgtactttgagtgttagccataaaatctttgcctagagcaaagtactggagcatttcccctaggtcttcttctaatattttattgttttagtttttttttttttcaattatttttttgtgagacggagtctagctctgtcttccaggctggagtgcagcggcaggatctccgcgcactgcaagctccgcctcccgggttcatgccattctcctgcctcagcctccagcatagctgggactacaggcatctgccaccacgcctggctaattttttgtatttttagtagaaacggggtttcaccgtgttagccaggatggtcttaatctcttgatgttttaggtcttatttttaagtggtttatccattttgtgttttttagtggtgagactcgagatgtccaatttcattcttctgcatattaatgaacactttcaatttggagttggttgaatctgtggatggttgaatctgtggatgcagatcgcaatgataaagcaagttactcaaatacatagctactatgaagacaacgttagattgttaaaattgcacaaatactaaatctatctaaaaaattacgtgaaactattacaaaactaatcaagattaggtcagtttgtagagaaaaaatgactactaacttgctctcagtgtttgctttgacctcagtttaatttttagcgaactaaccaacctgtttcagtccatgaggagagtgacttaagggaatagtaaatatttttaaaatacagtccattgctgtagttatgtaatcaatgtattttaattgctaaaattatttttttttgctagatacgattttctccagtgtcatgttcttgttagtcaaacacaacaaataacaggtttttgagaagtaagatttgtgtaggtggactaaaagtgaaaggcttctgtccctctactactcttctaaacatttattcccctgtctaaatggtttgcaatatcaaaagattgatagatatgtggatacatatgtttacttttctctctctgggcttttgtttgtccaaaggttgtgacaaacattttgagagaaaactgttttcgttgaacttggagaagaaaaaaaaaaaaagaaaccctgttaactytgatgaaagtcagtttatacaaacagcatacagcatacagaaataaatgagtagcatgtactgtgtaaaatgttgatatttttgaagaagatttatattgttttcagtatttcaagaatatcaaaactgacatgatacattttctgctcatgatatagcaactcttacatgaactacacttgtgaaatatcctcacaaatgtcaacgttcactattgcactttcttcttgctctcattcttacaagggttttaatttaatgttacttacggttacctatgtttacttatgcttattctgctattgcttttaacaaaagattgatttaagggttgttctagtagattattaatttgtctaatctagaattattctttttgcaaaacacagatatctactcaacaatcacaagtataaagggaaagaagccattgttgcaagtacagcaggggttttataactacatgtagaaattgtaaagcttgtaagtttccaaagctgctagcaacaaatatggatgctatactctaaatgatatcagatcattacttaagttctcaatgaatactggttgcagaacaaaataatcaccactcaaggcattgtgtacatagctctattctggaagcaaataaagtttatgagcttgaatactacaactgactagaattttgtagacattctacaactttcttactggagccttgcttaaaagatcaagctaaattaaatactctattggtaataaatgcttctccagttttgcaagagtctctcacaatagtgggtttcatcattcattgattctcttgctgtggtatctgaccagactgagcctgatctattctagttttgattagagtgtgtccataaatttatggaaaaaatgttgagattagataagtttgggaaaatactaaaatgtcatctctccaggatttcacagggtcatggatttgatgtgatttgttattctcatttttttatgttcccaatttgcagaatatctcataggattagcgttctttggaatgcattttggtcaatgatgctccagctctgtttaaaagagttaaccttatttctcccaaattatggtattagtttattagccattcctcccacactcaagcatatcaaactgtttttttcttaacaaaatatgaggctagatttcttgggaaacttggtagaaaatgagcaattgagtttaataccgggtttccattgttagttacttttatcacctcagagatatttgctgtttcaaggtgttaagttttgggacaatttattacacaacaataaatcactaatgtacctgtcttcttaagcaccctccaaccccttaaactacagtaaactgctttaatattttttcagtcaaatattttcatagccttttagtatagagttctgggatatgttgctgcttcagaatcccagtcatttttttgagtgatatatcaattagaagtgacttgattatccttttcagtatattgccctagtatattgttcactgtaatgagagaaagtaaacccttctttttgctcactggactgtcaaaataatggatctatcctcaattaaccatatataatacctatattctagatacagcaatttcagtaatactgccaattgtttttttctttttagatacattttatataaacaagatgatatactctaatacaccttatgaatctaagtaataaaataatacccataatcccaataccaaaagaaatagaatattacttcataagattacaagtttcgatgggtctgactcttatacaacttaggggaaattttctaagaaaagtgtacacaatttccaaaattaaattagatagaaggatcttgaaggaaatgatccaagtgaggaacttcataaactccacagtgaatctacctatggacctatggactgcatcaatactatttaatgagcctcagggtttttctttacagtggaaattttgtttaccttttcctaattaacttcataatttaaacatatatatatatatttttgcaaatatattgtttaacttcacttgttttcaggtaatcagtgcttaaaaatggtatttaaatttatacagttttctgttatttgcttccccccacctaatattatatttataaaattgacatgttaccacacaattgtaaactaaatgatatataactaagaattatttttaaatattatcatttgcagagattacctaaagcatatattatccataatccctttaattattctggcttttatcccacactcactgcatcgtcagaggacacagtttgaaaatgtcctgctttcacctctcaaagtgctatgttctattgaaacaaatgtcatgctgcacagccttcggtgattctgtactcttctgaaactcacatgatatttattttaggtattctctggaggatgtaatctgcttgttacagagcagcctatcataaaaacacactggatagaaccagaagttattgcctgacttctaataatctggtctacattttatatgatgggcacactaaatattttatctaattacttttctttatactccccattaagaagtccaaagtccaatttacattccatttttagcaattatagaggatgttgtggcataaattttgtgtactaaaatcagcttgattcccattgattgctctgctcatgtatctctttgtccctatctcctcatgtatcttttgatagtgtgtttttatgtctttcaatttatgtataaactatgtgtgagagctagaaaagaaaaataaataaaatatgttttaaatgtacttcctgttttgttcaacccttagatttgtctttgttgtaattttgtaatcttactttctgtgttccatttgacatttatgaaaagctgtatggtatatattgaacctaaaatatataatttttattatgttgaaaatcatataaaatatattttggtttattcctctctatttagggtgyttgcagttatagtattcctaggatcctaaaatattattagttaaaatgttgagaaagtttttaagtacatactttaaaaagtcatatttcaagattatgctttttgacagctgtgaaataacaatgtaattgcatcataactgtgaaatatgacttcctcttgcttgtagaaagtggatattttgccaattctgacatgtatacaacagcctcagggcatcccattcttcctgactaattaagtcccaatacttactttgtcggattgattgccactttatctaaaagttgagataaacagattaaatacataaaataaaagcaggtattttgaataatacaagtgtaatttttcttgtaattacatgttgagagaacctatatagagaaaattcatattaagtaattttaagctaataagtcactttgctatttttttaaatttttctttattgacagttgtggtagacaacagagatttcatataaattggtagaatcatcctcatatattaatttaatcgttttcatttagccccaagttggtgttttaatttagatatataattgtagaagtttaaatcattaacttacatatcatttacaggaaaatagattatgtaattaatccttttagagaaaaatgaattttagatacaatcattcagtaacaagtttggtcatgttatcatcaaaagagtgtaaatgccattgattcacattttctaattcttctgatgaacacttcagattagaaagtagaacattaattgcagcagttttgcagttacatgagagctttttacaatgataacacaagatcataatttatgtaggaataatttattttacaatgaaagttttctttctgaaaaacagcttaatttggtgcaggggcggtatgtaacatctacttttttttttttttttttttttgagacagagtctcactctgttgcccaggctggagtgcagtggcatgatctcctctcactgcagccttcgcttcccggattcaagcgattctcttgtctcagcctcctgagagctggtactacagatgccctctaatttttttgtgtgtttttagtaaagacggggtttcaccatgttggccaggctggtctcaaactcctgacttcagatgatctgcttgccttggcctcccaaagtgctgggattacaggcttgagccaccgcgcctggcccacatctactttttaaattgtctttttcttctttaaaagatgagtaaaccctcattcttgacctgaaaatctatgtgataagatgaatgtataacaggcatctatggaagatgaagaacagagaaagatgtacagctagctaatagaaatgatagttaggccaagactttaagcatgcatatgattttagtaggttgagaaaataagtatatggggatcattcacatatagaaaatattataataaaataaatgcaaatctcaagtagcataatgcattcaagtatcatgcatgcaagttctttgttatcattagagtataaagtgtgaggtgtggaatagtagaagatgaggctgattggacaaataggtagaggtcccaggatgaaatgctcaaaaatttgaattatattctgagcccagaggttgattaaacttagagatcctccaagttgtgataaaccttcaaacaaatagtggcttttgctttttcctgatgtttccacataaattcaaatctcaaattaatttcttaaaatgtatttaaagtattaaaacatttatatgtatcaaactattataataaaatataaagtacttaaaatattactaaacagttaacatggttgctaacaaacagttgcattctaaatggtaaaatctacaggttgcctgctgtgacataaatttcacattgaaaataaacaccataaataaagtataacaataaataaatttgttataaaaagatttagaaaaatgcagttaaaaacaaagcaattttctatattgaactattactattttaccaagtatgattaaattgacattgaagaaaactgagatgcgaggagataaggagtgcaaaagcagtactacaaattgctgaaggagacgtgcagaggagttgttcagttatgaagggtaatttcaggtaaactrtccagaggaactgccatacaaacatgtatctatctatctatctatctatctatctatctatctatctatctatcatcyatctatctatctatctgtcatctatctatctacctacctacctacctacctacctacctacctatctatgggacctctatctgtttgtctgtctgcctgtctatctatcatacgtgtgtgtgtgtgtgtctgcacgtctttgcgtatctgctgtagagattccagaacagcaggcttcagggaaggtgcacaaaattttggaataacaattatttcaaaatgtttcaatttgtttcaattaacaccatttctatcctttaaaatttttgtatcgttctctaaatttggcagccatggaaatgtatccatcagatatcccttcatcagcaaatacttccaaggagtcgttagctgacagcctccaagtgctgtacattcaggatctatgttcacaccgagactatacaccttctggttgtctccagcctatgactgagcacagcgagagaacttaccagagtcagccatttctgacccacatgtaattcctctaatggggaatctctgctctgaatttccaaggttttcttatagcctgaggctctgcattctttcttctttctcctctcttcattcactgatatcagacctgcattgtggtctgaaggtggaccccacgtactactttcccgtctctcatttacttttacaggtatttttctcaaggaaggggaacatcacacaccggggactgctgtggggtggggtagggggaggggggtgggatggcattaggagatatacctaatgctaaatgacgagttaatgggtgcagcacaccagcatggcacatgtatacatatgtaacaaacctgcacgttgtgcacatgtaccctaaaacttgaagtataataataataataaacaaaaagaaagaaaatgaaaaaaaaaacaaaaaacaaaaaaactgttgcccttttacctcttccttggtgtctgcttccaggagaatgacgcaatgagatacatcaggcaatattaaaatgagggcttttcatcagatggctgatacatgggaggataatgtttagctttatatttgcatggcgcatacattccttcaaagtagatggcacctgtggtttgactacgcatctcttgtagctatctccatcttcttcaagccagggttatatatcctcctgagcaagtatagtagttaatttatcagcatgggagttcaagaactcttcagcatttttaaattaacctcttcaaagttaacatccctctcaagaaaaattttcacgctatcctcgaccacctttacaaaaccttttaaatcaatcacaaattgtggcatttgttctttattatatatcccttgatgttgatggagaaaaaaaaattgccatgcatggtcagtgaattccaaagcctttctaaatgttaaatagttcaaaaaatttttagcaaagcttcttgtttgacaaacctagaccatgaccaggttttgaataagtaattgagaataataagtcttgacaactgtgaagacttataatgtgatgaactataaaatcatggttcatggattgcaaaagcagtgtcaaagttggagggaagacaatcacctggatgttaggggtatattctacatccctctttaaatgttaaggcatcaaaaatgtctacggccttgtttgcaagtttttttttttctggtagtgccttatttagcataggaggtaaaactgtacatatttctcaaaaaaaaaaatcttactttttaagtagggtttgagggcctccacgcaactcgtaatttcctttggacattcctttaagtaaacagagttttcagaaaaacagattattttggattttaacataatatttttagcccaagtaccaagatcagtaaaattatcctgttaacttcataaccagacactttattcttctgaggaataaacccacaggacaatatctgtttcttaaccctatctgatctacaatcaattttgtttatcagtagtctttttttttactttttaaaaaatacttaggacagaaaagtaacagtcttctcatgaagagttaatgcagcttccacggttattttgttgatataagcataacaaatattgattctgttgaatttctaaggcttgctttgaaagtcaacttcattgacaactcctttccccctgtcatggtcttcacgtttaactttgcaaacagtcatgtccttattctgagtcaatttggtagataatctgagtctttgattatcctgtctctccatttattttcccaataattttgcatgttttttctaacaaataatgctgtattcttgtcacatagtgcataggaatgctaatttataaatttatttattttactatttataattgcaatgtgtaccctaataatgcatttttagcatgcctacaatttctttggcatgctcttttttgtcaaaatatcttagttttactctattatttttttattctctatgctttcatctctacattttcttcaaaagagtttcaactggttgttgactcatacaacagtatgcaaaagcaggaggcaaatataaaatacagtgtgaaaaagtgtttgagacaagactagaaagaccaagaaagtctaacactatgtataatattgtgatgcctttcttctttctgtcaacatcatacatagacatcttatgcacatttcaagtgatttccatgtacaaaatmcatttatagtaggagatgtagatcaagttggttmttttttttttttacatactggtttatttaaaatattgcagtacattttatgaaaataagtctattttttccacatgaaattcagtcaagggttttgagcaatatgtatgtattataaagtactagcacattgaaagaggtcattattagagacagcatctcactctggcacccaagttgcagtatagtcccatgatcatggctcaccataaactcctgggctcaagcaattcttccaaatcagcctcctaagaggtgactacagatgtgcaccaccatgccttgttatttttttaaatttttttgtagtgacagagtctttctatattgcccaggctggtctcgaacttctggctttaagtgatctccctttctaagcctcccaaagtgctgggattataggtgtgagtcaccatgctggccgaatcttttcatttttcctgtgatataagatattttgtggagaattcttttatgctttatgtgatacatctattttgagctctttccattatggactttatcatatggtatgataattaggtttatatatttgtctttcttatcagattactaacttcttgaaggcaggaactatgtactagtttgtattatatatttcagtttttgtcatagtaaattatggtaacatattaacctcaaattaatatttattaaagtgaatatagggtgcacattaaaatattgatgtttctcggctttttggaaggctgagggagaaggattgcttgagcccagggaagacctggcaacatagtgaattcctgtctcaatcaatcaactaatcaatcaatcaaataatgatggcataaagatatccaacaggtgacatgtgtttctcccccaacccygcaccccgccaggtgccatgactcttaatttattttactaagttttacaaatcaggcaaacctcatggattgagaaggagcattcaaagaaagtgcaaatgatagatcatgtcaaattattttttaaaaatggactgaagtggatttttaaaggctaatcctatctatgatttcacctttttaaaatgtattatttgtgtaacagagagtatagatgataacagcatagatgatatgcagcataacacaagagaccactattcacattgttttctgtgaatgtaaataaaattctgcaaataaacagccctgtgatggagaataatgtctcatgttagtaaaaattttgttattgacaaaacaaaaatggatacaaacaccaaagagacataaggcataattactatacattttttatacaggagtaactttaattctgttatgttgtatgtacattgaaaggaaattttaatgatgaaatcagaaaatacaagtactaacattgagcactatttttatacttatttttacaatcactgtctaactcatgggtcaaatattagtattaataagttaataataaatgtagttttaaaatattaggttcttccatttttcaaaaatcaatatatacattatgagtggtaggaattttaatttcagtgttttttactttctagaagagctaaatagcatgtgtttctaatgaaaagggaaaaaagtatgagaatttctctttttctcaagtattactcttttaaaatattcttatggaaaaatttagcatattttcagttatagttcatcatatactttccaagttcatcatatactttccaaaaaatagaagataaattttatacacaggaataatgttaaaatattcagtgtatttactgttaaatcattttatggattattgaaccatctaaataccaataggtaaatttcaaattaagaaatatcctaaatctaatgtgtcactctgccatttaatgtagagataatttgaacaaaaaccaaacatccaagtggtctccaagagagtagagatttagggatgaaatatttgttttacctgtaataatgcagcctttttttttatccagcaatcttggtagttgtttgctttratacataacactgaatttgaacgaagacaatgactgttaaaaatgcatctttttgaggtgggcattcagaggtaacatgcacagctgtgttttctgagtgagttaacaggaactagggctatgaaattcccaatcaggagagcaagctgcttattctctgctctagctcacaaagggagtcacacaagctaaatgacatcccaaatgtctggtactttatgtagttcattgctaattacagaggagtgatagaagaatatggcaatctgtatttttgttattttacatatttgcatgccagatggcatttaagaggatatgaaagcaaaataattacttaagttaaaaatatttatccacgtccacaccgcaataacattttggtggtatagaaatatatgaaataggttacataaccttagtcagagtttatatttcactagtgtctacatttagtatatagttgctgatacggttaagctttgcatccccacccaaatctcatcacgaattgtaattcccataatccccatgcgtcaaaaaatagaccaggtgaaggtaactgaatcatgggggtggtttcccccatgctgttctcatgatagtgagttttcacgagatctaatggttttataagaggctctttccccttcacttagcacttctccttcctgcagccttgtaaagaaggtgtcttgcttacccttcgccttctgacataatggtaagctttctaaggcctctccagcaatgctgaacagtgagtcaattaaacttctttcctttacaaattacccagtgtcaggcagttctttataacagtataactgactaatacagttacctatgcctgctacatttgcattttctcttagcctataaactgtgatctcaggggatactatctggccaatgaaagtgaaaaaaataactgcttgagattgacattgattctctatgttaataccagtgcttgctgggaatggaatgctacacagtttcactcaaaatggaaatcttccaagtggtcagagcttccagaagtactcaccattgctcagctttcctgaatggatagccttaatgaaagatccatatcactttcaaagtaatgattgtttaaaatagtaaatgacttagataatgaggttgttccaatggaaaatcgagagttagttatggaaatggacctctcagaaaaatatggagactagaaatatttttgattgattaccagaaaattatcattactattagcactactattattattattctgaacaggctgccgagttgatctacatatgccagtggtcatgtttactcatcaaaaaatctactcagtaaacgggtgaaagaacaatgatcataattccaaagatgaaggaaattcatggagcagcatgaaactcccatccctgaaactgactaatatatatatatctggcaagaataattaggaagcaattatacaagaatttacccttcttgaaaagtacctttatatcccaaagcatctagacccataaaacaaaatactgccatattaaaaattcagttatgtggtcagttataatgagaccacaccctgtgaggattggcaagcatttttcaggattcaaaacattccctgaagcactgttccctaatcatgacaaatagatcagaattatgtagtaacatttctctgtatcccacttaatagtccataaatattaacttcctgtattctgtggtctttgaaaggaattcccaaaggagaattcttctgccccagtcagctagaataaaaggtgaaggcgaagatgttgagaagagacatggtacatgctccctagagtcttatgaccttcaaagatgagaaccgaagcttttttcttgtttgctgcatggaataattttttatttttaattctatctttaagtatgtattttatgtgtttcttttgttcttcagtatataatatagacaaggcattaaatttccatttgtttctaaagtatttgaatattgagatggaattataaaacaactgtcagtattgaacactctaaagaatacggactaaaatatctgaaagtgacttccagttttttcttttgtgaaagaagaatgagtgtgtagtttatgtggatcatgttagatacgtacatttggatagaggggaataactttatgtgtatctatatgtctgtgcatgtgtgtgcatgcctgaaaacagccataaggtagagtctaaaatatgccattttggtttagcttctggcatacagaaatgttctgttccctggaaagccctcagttaaaaaaaaaactgagcccttttgggggtcttacatctgcagctctagctgattgatccagaggtaaatcaaagctgggtcatcagatcatccttcctgagaattttagcctagaatagagagacctagaaaataaaaatcactagcattgaactttggtaaagtcatttcaaaagaagttctcccaagcccaacttctgcagtttctttagctgccattatttccattctcccaggtggagcacattttcttagctgttcttggcatcctgtcaacaaccaggctatccgttgattaaagcctctttgtaatttagttaggcagaatccccttctgttcacaactacagcaactcttctttccctcagctttattgaggtttaattgacaaaaaattatatatgtttataatagttgtaatgtataatatcatgttctgatatctgtgtacattgtgaaatgtaactatatcaggttaattaagatatccagcacctcaaatagttatcttttgtgtgtcccataagtacttaagatatactctcttcacaaatttcaaatatgcaatatagtattcttctatatttactattattatatactatataattatatatactatatattatatagtatatataattatactatatattatatataatatatagtatatataattatatagtatatagtctatagactatagataatatatagtctatatatagtatatatactatatataatatagactatataatatatactatatatagtctatagactatataatatatattatctatagtctatagactatatgactatatattatctatagtctatagactatatatagtatatattatatagtctatagactatagactatatatagtatatattatatagtctatagactatatatagtatatattatatagtctatagactatatatagtatatatactatatactatatatactaatatataatatatattatatagtatagtatatatagtatatagcatatactatactatataataatatactatattatataattttatatatatactatataattatatgctatactatatataattaattataattatattatagttatatagtatatataccattatataatatattatattatattatactatatagtattattctatatagaatatagtatagtcatcatgctatacattattcatcctgcccgattaaaactttgtacgcttttgctaacatctcccaatttctctcatatcctggaaaccaccatcctactgtctgcttctgtgaatttcactggtttagattcctccaataagtgacattgtgccatattttgtttttcgtgcctggcttctttcacgtagcgtaatatgcttcatattcatcagtgttgtctcaaatgacacaatttccttctttttaaggctaaatgatacattttacacacacacacacacacacacacacacacgcagatgggcaggtgtttgagatactgatttcatctgctttacatacagatggcgagattgttgcatcgtatggtaattctacttttaagtttttaaggatccttcattcagtaatcttaattaaatcaactcattacaggtggtaaaagtaataccacataattacatctcttgaacaaacatttgtaagggagacctcgaatcagaggttcagaaaacatttaaaaaagtaattcctgcagagtttaaataacttttagggttggaaattgcttttcagatttgtaaatataacatactggtatatcagtattaaaataacattactggtctattaacaattttcttatgttagatttcggtttctccaagccaggtttctattcatggatgtagaacaaggaaattttggaaggatgacattgtgctctttgatattatttccagtgcttagagcacacctcaaaatgtgcagcccacattccttgggcatatacatgatcactttaggaagttgattttcattctttaacaagaagtaccaccttattgtcacaggatccttagggtatggcttcgccagccacaaacctctgtggccactggcgcctctgcttgagttttgtccgtgcctgctgggcttgtttcacccacttggcccggcaggctgtgctcggctcatgctaccagcccggatcccacacctgccaagggtcagccaggcgaggaacagcaagggagaaaatgaacacgggtctggccactgtgcacagccaggcatgctggctgctgcctcggggtgggcagctccaggtgccagcacaggctccggcttcatgcgaggctgctactggaccagacgtaccgcggcttccgctgcaggcgccagtttctggacaacgggaacgcggtggcaccccaaagctcggagacaccaggaaccacagagccccaaagagrgtattacagcatgttacagccctgggtcagagagcctgaaggcatggactcccagaaaggcttcagaccttctctccttgtcgcccacagcaagtggatgagggtggggtgtgtgtgtttagcctgtttgtgttacagctctttcagtccctctgccccgctccggccccaccacttcttcccggttgggtggggtggccgctggcaaagggtgtgagggttaatagtggtacaggccttttagctccagcccacagctcagtgagccagcagggaaatgttacagcttctttcgctcccgcagtctgggggtcctgagttcctggcctgcttcaggaaaaatgagattactcagacaattggagggtgagcaaggtggggaagagctttattaggtgaccatacagctctcaaaggagatgagaccggacacaggtaaccgctatccacaggcagtagtccccaggggcttgagtgcaaggtttttatggggctcaggatggaggaagttcatgctaattggttcacgggtaggatgaagtgagtgctgattggttacaggtggccatgggagggcttgaaaaaaacaccattccattggccaaaagctatcaaaaaaaattctcactcccggttgtggtctccatccggaaatggccgtctcgccgccaggcctgaaggtcaggacctgccaggtacacaccccttcccacctaggaaactgtctgctcccgctgccatcaacaggccgttcatggcccccaggctgactgctcccaggggtgcctgtaggcccgcaccgagccaccgtcagcccccagcctctcttccatgctcatcagcacccaacatttcagcctcagaagcagtttctggagggggccgagacagcggggagctggcgtgtcagcactaccgcgagtgtgcacacacctggctgggtcgctacagcgcctgggctcggctatcagaacatagtcgcaactttgctccactgcagagcaggcactgggagcagggaggggccagggagtgggaacaggaacttctgagcctgtggaggcgggggctttcccggccccgagagtacagggatgccggagtccaaagccatggctgggcggctgcagcgggaacgcaagctcctgtcccaccaactcagtagggcacagggctcccctgggatcacctgtttccagcacccactggctccgcagagtgcgcagccctggccgagccttcctcactggagctgtgtcttcacagcggctgctccaaccgggccactgctgccatcattatgatgaaaatgcttctttagatgggccatactttgtgctggctaagagcccagtctccagagataggctgctgaagatcacagcccagtgcacacctcacgagatttgtgacatcctaattaatttccctgctgacattcttccacaactcaaatatgttctcttccaaatgaccttttatactataaatgagatcatgagatcacatcatgtccttgtttaaaaccattaacgagcctccatctaatataaaacaaaatgtaagttcttatgaacagctaccgatgcacgtcccacctatacccacaggctcaacctgggcctttctttcttatttcattgtgctccagtcacactaataggctttcagtttttcacaactgaccaacttatatcccaccacaaagcacctgtcataactgtccttctttgtctgaaatgttttccctgcttgtcacttttactcttcatggcttctagagagtaaatataacctgtagaaggtgacgttcccttagcattctttctagatttagagaaagtaccccaaaagtgtttcttttcttttagcaccctgtttgctactttcatggaacttgtcacctgtgaaattgtttaatttgtttctggtttttttgtttattttcaatatccttccctggactgcaagctcaagaaggaaacaaaacaaaacaaaacaaaaaaaaaccactgtgtacttcatggaggtacctgagtccatagaacatggtccaggtttgataaatatttttgaataaataactatagtagacagtatgtaaaactatacactttttatttctcccaaaagttacctcctaatgcctttaattatacatttctaagaatgtttcacaaagttatgcgatataaacactatattctacttctgtgaatttagagaggaatttaacatccttttgctccattttttttcagctgtaaaatgggataatgttcaccccaccaccctgctgtgagctcagatatgtgatactttagactgtaaagcactataacaatgtaagtctccattatttggcaacaagtagcaaccatacttatttctcacttagcactattgttttgcagtctaaatcaaatgaagtacattcataatgctttaaaatgttttaaaatgttgatcttatttgggttgtgttatcttgcgtttgtagacaggtatttatttctgccaatggctattttttcatcaataagctagaagttaaattgtaatatttacagataacgtaatgaaaatgataataatgattggaatttttaatgcatctaatctgccaggaaaatgtgaataaatatatatgtcttacttttttaatctaatcaaccagattgtgcagtatatacatttattattcatatctgacatatgaagaaataggcttacaggctctatgggttttgtctaagcttctaaggttgataaatataataattggatttcaagactagacatatagacagaaatggagaaataacactctccccattctacctttagcagtttatatgcagtgaagaaggaatggtgtacttatactatttttgtatattgtgtattcctcaaaggaaacatctcttctttcttctccatccataaatcccttagttctgttagcttcagtatttatttacttatttcagtgtgtaaagtcttcccttgctaaacaaaatggtgtagacagaatgtctattatttattttactatgtgaatatatgtgaatatcagcaaataaagcaaaagaagtaagcagaagacttttgcctccaagaagtttaaaccttttccattaggtactgtgaaggcactgaagtgttttagtatcgtgaataatacaagtagatttaaattttagaaaaattactataataataccttttagggtagtttagagagagctgaagacaatgaatttccctgatgagcttatatgataattgttgaaacagatgtgtaaataattacactacatgtttaggttttgtgatgaagggaatttttgctaacttttatcaacacaattagaaagtagagtagctttcctttgaagttttaaagactagcttttcctaatcttataagaaaccacagctcacagtaaatttataccaaatatactatttgtttctatactctgcttctaaataggtggaagaagtattattatatacttaaatgtgatgtataaatacatatatctctatacacaaacatatatatgaaggttttaatgttttctttatttttcaatgaaaggaataagtatactttgagtttattttatgatagttttacaattatatataaattatacattgtgaatcactactaaatgagttataaaagacttcaaataacttgcatacaaataagtaaaaatctttaaagaaaatagttttctacgaacatgtatacattggcaattgtaacacaatggtgtttgtgtatctaaacatatataaacatagaaaagtaaaagtatggtaaagtaaaaagaaaagttacttttctttacatagaaaagtaaagtataaaggataaaaatggtacacttgtataagacacttaccatgaatggagcttgcaggacctgaagttgctctaggtgagtcagtgttataggaccaacaagttcgaatgcccactgcacagtaacagccccattacaatgagatggcagggtttgcagcagaggaagagtttagttatcacagggtgccaagggaggaggtgggagaagtccctcaaatccatctcccacaggactttttaaagggattgtggatggaagggggctgggaaattggggtgattgattgagaggggaataggggatgaaatcatcaggatatagagactgtactctttggtaagtcagctcctgtgtggtccttcagatcagctggcatctgtggggattgttcaaaccagctgagtcagtagtttcatcagtatgcaggacctgaaagaacatcagaaaggaaaaacttaacattatgtaatgttcaaattattatctatacaaaagttaaagagaactataatcttttaacagagtctacatgattctgaggcaatagggacaacacaactgtgggaaatccagtcagacaacaacctggcctaatgattaatgctgcatgagctgcaagcttggtttattttcatttctccctcttcctttttccctgattaattttataaagtttacagggatggtttcggttccccctgggctttatcatatgtcaatctggaggcaagagctaatatggtgggaattgggtgaagagcactctagctttttcttgctggcaaggacaagagttagggtaagagtcagaattacaggaatgaaactgccgggcagtaacctacaagtatttaccagttcctggtccaggatttcaggcatgtagcatgaatatattaggactgctgtccactgtatagattagaattcctgttgtcagaatcatgagccaaaattttaagagtagttttaaaataaactgaaaactttatggtgtttgtaagatcttattgccacaaagagtctgttctgtccatcttatgatatctgttttaacattaatgatgctcagttgtgtctagaccctaaaagaagaagtttgtatgactttccatgctgttatggtcaggaatttagttttaagcttttttggggcctctaagccacaaggggatctgttcagtcagttcagtagagggcttaggatttatcatctttaattcacattcccccattttggtcaaaatatgccaaaagtagcatcaatagccaagctcttatttcattccatattattaccaggtggtgtggctatctatctcagatatattctgttcttcaatgggacccatatagccaagggacttatagccaaaagacttacagccaattaaacattctaggacaaaagggaatggaggtgggaaggcattcattattccttaaaaaccttttgagcaatataagagccacaaaccaaaagccaaaaagtaagcttacaaaaccgatttatctataagttctatgtgttgggccatcggctcttaggcatctgtgagcccatcttttttggaggatctgaactaattctatccctcaaacctggccttacaatttcacgtggccatctctttaacgatagtccccgggcctaaagggattgaatagttttaatttctggccctgtgtttcacaaaagcagtttattttgattgtcacctttttctgggtctgaagatgaggctttggttaacttgagtttgatgtcagatactggtgtcaacattcatgattgagcaagagttggtacttgttttatttatttatttatttattttaatccgtgattttatttatctcataattataaaacataaaaaagttaataaatgtaacaaacctgcacgttgtgcacatgtaccctagaacttaaagtataataattaaaaaaaaaagagttggtacttgttttagatgagatatatgtatccaggagtcaaagccctgtaaattaatagtacaaggattagttaatagcgtctgataagggaccctttcaaggggggacggggtgggaagagtcgtttaactgatgcctctcccagtatatgtaactgttagactggaggtggtgatactggagttcatggtctgaccggaagctgtaaaaatattttataactttgtggtgactaattgtgtagctttaataaggcccaccaataagtctaagtcagaaacttaatttagaatttgattttaaggatgtttgtcaaaaatgttaaaaggcttaaaaaatttgatcaaagcagaatcacagtctttgttaaaatacttgttattcatttaaccaggagtaataatcaaaatatttgatggccatacagtaagttacaaggatgtaaaattcttaatatgcagtctatcatagactgatgtttggtcaaagaatgatgatatatactttagaatgggtttatttaatagttgattttttttttttttttgagacagagtttcactctgtcacccaggctggagtgcagtggtacaatctctgctcactgcaacctccgcctcacggattcaagcgattctcctgcctcagcctcccgagtagctgggactacaggcgtgtgccaccacatcctgctaatttttgtatttttagtagagatggtgtttcagcatgttggccaggctggtctcgaactcctgacctcaggttatcctcccaaagtgctgggattacaggcatgagccaccgaacctggccaatagatgatcagttttaaaagaacggttatttaggtttttaaggatgaaccaaaccttgctacttaaagagtaatccacagaccagcagcatcagtgtcacatggagattagtaaaaatataacaatcttaggcccagcatgactccctaaattagaacctattttaacaagatcttaaagtttgttgtgcatacctaatctttgagaagcactggaatagaatgtactaaatcataaggaaataaccttaatgatgaccccataatacggggctctgaggaccgtgtgtgtagaacaaagttagacagtagagttaaataaaatttacaggaggccacagatttagactgggctcctgcactggacccaacagaccaaaccaatataaagtttaatcacagtagctgagctttaggtaattgcaggaagctctgtaaccaaataaccaattttgttgtaaccaatttagttgtctctatgtctcagttatgttttctataaatgctgtcaggtcacatagttagctggagttctctgaacctgatttggatctgagagtggtctgcttcatgaatcatttttattttgttccattttgcttttaattgctcaaataaaccccattgaatttaattggcgaaataatttctctccttgaacggtagcaaaataatgggaatgtactgttcttctcagcagtttttcttagaatttacctaatataaaaacataatgtattttgtaacaagtggattttaaaagtcaagaaaggagaattccacttttagcatgatagcctgaggagctctagggattcactcccagcgaaactggtgagtattataaaataaccaccatttcaagtcaatggccctgagaacatacagtaaatgaagaaacacttatttttttaaatatactaaaattgataaacaactcctcccagcttagtgaaatgaaaattgcactccagactgatacagacactatatggagttccctttccctcaagttcccagtcagagaagtattctttcaggagggtaagatatcagcaattctcacactactcctagctacatatcgctgaagctgagttcctggtgaaaacagttcaatagtggaagcaccgttgttcttctcactccctacttaagaggcagacgatctrccttggacacagtactgcggagtatactggaaccctaaccgccattgtcctggcttttgtggcagaggttccatgctaggagaagcaagccgaggaatcttggggctgctgccttcgttatctatcagattttcagttcctaaagtggaggtgtcaccatgagaaaagcatgacattgtctctactcccaccaccagaggtatggttcagagattttgcctggagaagcatgacgtagaacagagactctaaatccctaccaactacatttaatggaaatctgtggagtacctcacccaacactagggtagacaaatatgcagccgaaaaaaatctcagtctatttaaaagaatagaaataataaaaagtgcattttccaataatcataaaatgaaattagaaatcaatataggaaacttacaagtatatggaagttaaacatcatgctaagtaaggaatgattcaaagaagaaatcaccaggggaattagaaaatgttttgaaatgaataaaaatgaagtcacatcataccaaaatttatggaatgaagctacagcagtgcttagagggaaatttatagctgcagatgcatatattgaaaaagaaggatctcaaatccacaacctaaacttcaacccttggcattggaaaaaaagagcaaattaatcctaaagctagcagagagtagaaaatattgaaaattagagcagaaattaatgaaatagacaatggaaaaacagtagagaaaatcaatgaaaccaaaagctgattctttgaaacaattaacaaaatcaacatttagctaccttgaccaaaaaaaaatacttaaattcctagaatcataaataaaagaagggacattgctctgaacttcctgaaatacatgagattattttacaaataaatattatgaacaattgtatgtcagtaagttatacaactttggtgaaatggacaacttcctataaaaaatcaaggaaaccagagaaacacaatctagaaagaaaaaaaaaagtacaaatgttgagaattaaaggaagacaaggcaaaagatagcttcaaagtgaaaagtttataaacagtgccaatattaagtatgatattatataaccaaaaacctcttgatactactgattactttgtgttcacaaatgactgctatgcaacttttcaatccaacagttgatatagacaataaaggtaaatgttgatatatcattaagggtttggctaggagaacagaagtcattcaatacatatttaggtgaaaatatttaatatcaggtaaaaagagactacacaataattggaaaatttagagaagcaaaaaccatggagagattagttaaacttggaggtatcataagcaaaagaccccagtctaaagaatagaggccagtgactcactagagtggttcactagctgggaatttcacctctgcacatacacctagctaaagctgcctctccctacagatttaatggtatatccctttcagccgcctaaaattgggcatgtgcctcgcattgacaaatctgattagaaacctataggaagtggattctggaagatgtacagagactttggaatttgatgatacttttttttaaaaaatgtgaaacttaacgtttttaccaattatacagtttgataacacttttatataaattatataagtaaattttcacagccgtttttgaagaaaaagataatactcattctagtactgagtctcaatggggccaaatgacgtgttcaaaatcacacagtaagtagataaagtagaaagaaattcatgtcttctaatcaaaatatatggattatgttctatcacagctgcttccatcacactaatgatatcttctatgttgtattttctacaaagagccaagtccatacttgatttggttcaatcaacttctgataaaataaatattagacctttagttacaaaatgaaatggtattaatttgcttcctaacttaagattccttaagaactgaatttctgccatgtcttttccatgctactataaattgatgaatacaatttcatttttaaaatatgtacacttatttaatgaaagacttaaataacaaagacttcataattttttccagaaataagatactattaatttgctgacaacattttgtctttgctggtttttaacaatagatcagtaaacatctaaacaggtaaaaaggtaatatagtaatttaccatttgagaaactatagataagtaaacaatttggattaccagaaaaaatgagatgattctttgaatttcatttgaataattaatgcttttatataattaaatttgcaaaaggtaatatattaataacctgggatgatttaaattctggaacatttgtatatctattgcttaaaatgtattgaactaaaggtataaatattacaagtttatgtgtattagtttaaatatatcatcttcataaaaacatacttttcaacataatgagttcttaagtattctctttaattttgatatttgttttgggaccttagtaatttattacattttatatcccttttagttagtatgtaaaaatcaattaaaaaataacaaagcagattgcaaaatttgtaatcattcaaatactaggtggaaaactaaaatgtattttattcaatatggcagaggtattayattgaaaatgatttaatttcataattgccataaattttaaaagtgaataaatagtatcctctaaatagtaacattaaaatctcctcacttattctattaatatcatagatctgatgccctacttaatttccagggactggatgtatgctgatcaagtcctatttgatcttaaggaggctatagtagatggaagttactatttgctaactactttgttattaagactaacattttaggtaaatgattattaaattgaatgacaaaacccaactccttttaaaatgagttaattctaataaaaataatttttgagtatgaaaccacctctccatccctattttgaaaggattatgcacagctactaataaaacagctgacacctctgtccatgtaacatatactcccaagaaatagatataaagttaaaatatgcaccatattttacttgattggccataaactttctgatgcatttccaagtgctgaaaataggccttcttgatgcatttcaggaataaatcatttgtatctgattaaaatgcagatgagcatcataaactattgtaatttgaaaggactgaactcataatgcaatctgcctccatctgctttcaggtgtaaagcaggagggagttctgctgaaagtaccactgaattcaatctaggttaaaattcagggaattaaacattccagtctgatctctcaatttttttttgtttctgtatttatgtcattttgttgtatgcctgtgtaagcttaagccatctgcataatcacattgctgttaattatgacaaaatatgtttttaatatattttttgaaaatagggagccatatgtatataagaaaaagcagctaagattactggcagggttttgaaagagctttggaattaaattgactgccataggctcattttgtcaataagttgtttgccttttctaacatttttcagcaaatataagagcagtgaaatgaagccatatgtagtgagcaggaaccagttaaatagcagacactcagctgaaagttattgcttcagggttgaaagcagaaagacaggggctttgaaagagacacacttaggtatgaaaactaagtctcatgcctaataattgtgtggttcagggaaattcttaaaatttctctgatggtaaatggtcatgattaatgttcatacacagggtttattagagaatcgcggctgtagagcacctagggaagtatctacattttactggtgtgaaatgcatgtattctgtttttactgttttgttttgttttgttttgttttaattcacacagctgtactcctctccctttgttaaagggaaacagagagaggtgcatccatcagcatcctacgaagtgttccctggacttaattttatgcttctagaagttctctacaataatgtttacattttgtattttgtattgttttaatttgaataatgaaatgcagaagcatattttgaatcattggatagccatctgatttaggccttgtgcttttgtttgtgcttgggaacattttacttccaagtaatattgctttaaaacatggagcctattgagataatcatgtggtttttgtcttgggttctgtttatatgctggagtacacttattgatttgcgtatattgaaccagccttgcatcccagggatgaagcccacttgatcatggtggataagctttttgatgtgctgctggattcggtttgccagtattttattgaggattttttgcgtcaatgttcatcaaggatattggtctaaaattctcttttttggttgtgtctctgccaggctttggtatcaggatgatgctggcctcataaaatgagttagggaggattccctctttttctattgattggaatagtttcagaaggaatggtaccagttcctccttgtacctctggtagaattcggctgtgaatccatctggtcctggactctttttggttggtaaggtattgattattgccacaatttcagctcctgttattggtcaattcagagattcaacttcttcctggtttagtcttgggagagtgtatgtgtcaaggaatttatccatttcttctagattttctagtttatttgcgtagaggtgtttgtagtaatctctgatggtagtttgtatttctgtgggattggtggtgatatcccctttatcattttttattgcgtctatttgatttttctctctttttttctttattagtcttgccagcggtctatcaattttgttgatcctttcagaaaaccagctcgtggattcattaattttttgaagggttttttgtgtctctatttccttcagttctgctctgattttagttatttcttgccttctgctagcttttgaatgtgtttgctcttgcttttctagttcttttaattgtgatgttagggtgtcaattttggatcttttctgctttctcttgtgggcatttagtgctataaatttccctctactcactgctttgaatgtgtcccagagattctggtatgttgtgtcttttttctcgttggtttcaaagaacatctttatttctgccttcatttcgttatgtacccagtagtcattcaggagcaggttgttcagcttccatgtagttgagcggttttgagtgagtttcttaatcctgagttctagtttgattgcactgcggtctgagagacagtttgttataatttctgttcttttacatttactgaggagagctttacttccaagtatgtggtcagttttggaataggtgtggtgtggtgctgaaaaaatgtatattctgttgatttggggtggagagttctgtagatgtctattaggtccacttggtgccgagctgagttcaattcctgggtatccttgttaactttctgtcttgttgatctgtctaatgttgacagtggggtgttaaagtctcccattattaatgtgtgttagtctaagtctctttgtaggtcactcaggacttgctttatgaatcttggttctcctgtattgggtgcatatatatttaggatagttagctcttcttgttgaattgattcctttaccattatgtaatggccttctttgtctcttttggtcttttttggtttaaagtctgttttatcagagactaggattgcaaatcctgcctttttttgttttccatttgcttggtagatcttcctctcaatagatgcagaaaaggcctttgacaaaattcaacaacccttcatgctaaaaactctcaataaattaggtattgatgggacgtatctcaaaatagtaagagctatctatgacagacccacagccaatatcatactgaatgggcacaaactggaaggattccctttgaaaactggcacaagacagggatgccctctctcaccactcctattcaacatagtgttggaagttctggccagggcaatcagtcaggagaaggaaataaagggtattcaattaggaaaagaggaagtcaaattgtccctgtttgcacatgacatgattgtatatctagaaaaccccattgtctcagccyaaaatctccttaagctgataagcaacttcagcaaagtctcaggatacaaaatcaatgtacaaaaaccacaagcattcttatacaccaataacagacaaacagagagccaaatcatgagtgaactcccattcacaattgcttcaaagagaataaaatacctaggaatccaccttacaagggacatgaaggacctcttcaaggagaactacaaaccactgctcaaggaaataaaagaggacaaacaaatggaagaacattccatgctcatgggtaggaagaatgaatatcatgaaaatggccatactgcccaaggtaatttatagattcaatgccatccccatcaagctaccagtgactttcttcacagaattggaaaaaacaactttaaagttcatatggaaccaaacagtccgcattgccaagtcaatcctaagccaaaagaacaaagctggaggcatcacactacctgacttcaaactatactacaaggctacagtaaccaaaacagcatggtactggtactaaaacagagatatagatcaatggaacagaacagagtcctcagaaataatgccgcatatctacaactatctgatctttgacaaacctgagaaaaacaagcaatggggaaaggattccctatttaataaatggtgctgggaaaactggctagccatatgtagaaagctgaaactggatcccttccttacaccttatacaaaaatcaattcaagatggattaaagacttaaatgttagacctaaaaccataaaaaccctaaaagaaaacctaggcaataccattcaggacataggcatggacaaggacttcatgactaaaacaccaaaagcaatggcaacaaaagccaacattgacaaatgagatctaattaaactaaagagcttctgcacagcaaaagaaactaccctcagagtgaacaggcaacccacaaaatgggagaaaattttcgcaacctactcatctgacaaagggctaatatccagaatctacaatgaactccaacaaatttacaagaaaaaaaacaaacaaccccatcaaaaagtgggcgaaggatataaacagacacttctcaaaagaagacatttatgcagccaaacaacacatgaaaaaatgctcatcatcactggccatcagagaaatgcaaatcaaaaccacaatgagatatcatctcacaccagttagaatggcaatcattaaaaagtcaggaaacaacaggtgctagagaggatgtggagaaataggaacacttttacactgttggtgggactgtaaactagttcaaccattgtggaagtcagtgtggcgattcctcagggatctagaactagaaataccatttgaccctgccatcccattactgggtatatacccaaaggactataaatcatgctgctataragacacatgcacacgtatgtttattgcggcactattcacaatagcaaagacttggaaccaacccaaatgtccaacaatgatagactggattaagaaaatgtggcacatatacaccatggaatactatgcagccataaaaaatgatgagttcatgtcctttgtagggacatagatgaaattggaaatcatcgttctcagtaaactatcgcaagaacaaaaaaccaaacaccacatattctcactcataggtgggaattaaacaatgagaacacatggacacaggaaggggaacatcacactctggggactgttgtggggtggggggaggggggagggatagctttaggagatatacctaatgctaaatgaggagttaatgggtgcagcacaccagcatggcacatgtatacctatgtaactaacctgcacattgtgcacatgtaccctaaaacttaaagtataataataataataaaaaaaagggaaaaaaaaagtgcctaccttgtagtgttgtgagaaattcaagaagatgtatgttgcatgaaagggcttaaaaagtattagtcataatcatcaccttcagttaaaaggtgatcagctcttcctcaagctgcagcctgtcatctgttgagtgaaaattgtttcaataaagtgggggaatgaaaaaaaaaaagaaaaattaaaaaaaaaaataaaaaaaaataaaacatggagcctatttgggaaagtatggagatagtcttcatgatgccttaaagaaaaatgaagacaagtgataatacaatatcctgtagacagcaaaggtttcagaagccaaaaaggctgagaacttcaagtcatcacatggttcattaaattattaatatgtcaatctcataagaaattatagccatcaataacattttcccattgcaaatagcattttacctttaggcaaaatttttcatttttaattaatgtaatatgtttttatagtatcattttgtaaaatttaaattcattttgatcattttacatttcacgttatttaggagtcatagacaaaaagaatgtctagttcaatgcattacacataattaaacaataattaaactgttacattaactctgaaaggctgtaggaattttagtttggaatcatttttccagtcctacaaataagtggaaatttattaataatgaattaattttgaaatactaaaagcagctattacttggaaagaaaggagagtcccattttatgctatgtacaaagctataaaactataatatttaagtataacataaaggaatataggtacagtacaaattacattaaattaaaattttagtttttaaagaagtgataagcaattcaaataacaaataatagactgagataaaataatggttgaaccatactctaatgtcattcatgtagaacaaaaattttcactaattgacaaatacacatggctcaacctgctatatgagatatttaacagataagaagttaatattgctgctttacataaaaacatatatgttaataaaatgaagagaaaatgcaaatgactatcaatgaaaatagctccacttcacaagccatcgtggacatgatgattgaaataatgaaatctatttaaacaatcaagttgacagaaatctgagattgatgatattcagtgttgcaatcataacctttccaataaaattggacttcactcaaaactttgtgaaattcgtttagcagcatctttaaacattaaagtatatatacgcattgaatgagcaacttattttctaggccttgatccaatagaaattgaagtttaatcacatagaaatactgtgctaaaaggatttttattatactttatttgaaatacaaaaaaggtaaaagaaatattaaattctggtaagtcaatactctgggatcaaatgtaaatatttaggttgagcaacatatattgttaagttaaaagagcaaattacagaataatatattcatatattattgttttcttaggaaaacttgtaattaacttcacaggaagaattccttagagactgtggcatcaatgaggacataattttaatgtttgataatatgaccaaatcccattaaaaatattatattattttataaattaattttgtttgagacatcctaaattctctatgaactcatcaatgtagcgctatcttttaaaaatctatttttctaataggcaaaactttatttctgtatctctcatttgtgtttcacagtgtttgaaatatacatagcactcaatgtatatgtggatattcactgaattatcagtgagttttaaactcactgataaaactcactgataaaaattttataaaatatttgacttttatatatcgtccttgtyattccttatctatgagccaattatcttctgataatgtttgacttgtatttttaaatatgtcaaaataatatacattaaatgtatcatagtaacttattttattagtagtataaggtaaaggaagagacagtctaaaatttagctgccaaataatttttaaaagatttcccaatattcaagattgcaaaacgttaagaaagattctttttctagggatacaataaatactttaaaatatatttcccacactgaaggacagtttacaattttatgcaaataattttaatttaattttcatttttgacattttaaactattaatgaaggattattgaactcattatgtatagaatatattttcaccagaagactgcttaaataagctataatggcagtgatacatatagtttatttatattttcaaaacggaataaaggaatagttaaactttgtggtactatttaaatacagtattaaacttggaaatgcaaggcttgaaagctaatgttggtatttattagcagatgtgttgaccctgataaatagagttcagttatttgttggcagataatgccactgaaatatagagaggaaaaataaagcactaagtctgaaaggacttttgcctttaaaataggttactgttgctaatggttttctttattacttttgttattttgagaaaagtcattgaatatttcattcactttcttttcagtagatattttgatagcctgaatgtccctttgtaggaaactcatttcctcaaaaaacattttaaagtaaatctgtgagatttgaaatccctaggggtcttttactttgttttctgctttcttagtgtttcatgtgaaatatgtagtcctgaaggcgtaaagctatttaacacacaaactttctgaaaacttctttcagagaaaatattctgattttaattttctaaaattttatgtgaaagaggtcattgcatccttaaaatagtttgtgtaagccggaggcaatataatataattttactgtccttattttctcttttatattatttcccagtttgtgccattttcttatctgtgtttatatgctgggtaaagtagtgatgttttatttatttatgtagtctttactgtaagaaaattatattcttaaatacctcatcttgatttgtttggttaacccgaaggagtttgaatgttgacagggttagattcattcctttattgccattactggatacagtctgggagtcacttggtcgacataagtcccaatgtccttgggactctacttctccatttctaatttaagcataattgaaccagcctattcaatatcaccaggatacttgaccagactgtgtatcagattcagatatcaccatgataaattgtgggataaaatgctagacagaaatttaattcattatatttctatgtgtttatcataccaataacctgaaagtaaaattaaaatattccaaatcctactaaactatcaaatcaactacagtaacacttctgttcccttccaactgttacccatttgcattcatgaattttacatatttattatcacagtgtaggcataattgtatttcattcaatttcaagcaaacaaattggctctaaacagctttgttcttctgactgtgaggtctaaacatactccatgtaagttctcattgactcagcttcacctaaggctaaaatattttactctaatattgaattattgaaaggaggtactcatcatttcacattcaaagttataacattctaaaaaaattataaacagtctcctgaagactttgttgttgttatcagcagatgcaacaattgtctcaacacaaacatctgaaaagattgcattggtctttgtatatacatgatcatcttgtactatcattaataataatgctttctaggaagcttcagaaaaataaatactaatgcatttatactcttttacaagaatgccttaactcatgtgcattatgccaacccaaaaacttgtgaatgaagtcaaaaacttgtacttatcatagatacttacaccagaatatcccagaaaatctataagacacggactgtatctttgcttattaataaaagaggaagccagcagatgttaacctaagtcaactactaattaaagattaatcataaaaggtgagcatagttttatctagacagcacagcacattccttaattgttaaaaacttgacttaatttgtggttatgtattttcactatcagaagaactgagattagataagagtgttagtgaatatgtgtggcttttccatgcaatccaagaaaacatcccagaaatattgatccataacagacatatttaagataaaacttccagagaagcaaccaattagaaagagtgatagttcttctatattcttgactaaagtgaagatgtatttcaaaatttgttagtatgctgtttaagcagactggccaagactactcactcacttatgaaaagatcatattagcactaagtggagaagcagtgctgtgaattaggaggctctgttagtatatcttgtatgttcgttaactctcagctgcaggaaacagtaccatccctagcagcaagcatttaatatgggaatgcaaatgcttacaaatcacttgaaggtcttttggcctaatattcagaatcactccatgaagaactggcttgccagtgagctgctgtctttttcggactttaataaaataccactgtggctattatctaggcacaaggaagacaccactatcaaaactgtctctcaacaaccactaaggtagtggctagacattagtctctgttatagaaaatctcaacatcactgtacttgtctgcagcaacagctaaagcaaaggaagtatgccctttcctatgcttataccctctgaatctcatattaagcattacactggaaaaacctaattaatactaagaaaacttgtgcaagggcrtcttgagaaatgtttttagatacccaacctctgaaaatgatgcaaatgatactaagtgccaacccactatgccagcacactggtatgcttttaattcttttcaatatctgaatttgtgtgtgcttattaggtaggctaaccatacgttctggtttacttgtgacagacctgatgtacatctgttgtcccaatataattataaatattacccttttttgctcttaaatgagttctggtttgaaagataaattacactttcactttaccttcatgtatgtttatcttaycctacagcatatagagaagaaaatggaagaaagtgttattaactggtatatgtcttcttattcaataccgaaaataaggctatgaagaaattattaacattttacattaaaagatgcaaggtttgaagaaagtgctaattacacccatcacatagtaaataagtgagcaaggatgaatttaagtttaagcctgtgtgactatcggacataattttagttaattatgtagattatagctataatcaattctgtgctgataaatgtttctgtcaaatttattatggayttcaggcattttttcatgcattattatttcattcattggtatattccacaaccattaattgagtacctactatgaaccagactataatctataccttagggatagatatagtgttagactaaagagagaaaattcttatccctgtcaagctagcaatctagagagagggaatatattacaaagaagagagacaaaatgtgttaaatgatttaaaaagtgcctagagaaaatatagcatgtaggtatgatagggagaggtgtaggtgagagttgctatttaaatttgagcagtcactgattaatagaaattacactggagatattacagaggtcaagttatcattaagagcacttaggcagaaaaatagaaaatgtaaactaggggtagaaataagttttaatcccaaacctagagaaagatatcaatatccaagtacaagaagattatagaccaccaagcaaatttggcccaaagaagactacctcaaggcatttaataatcaaactcccaaatgtcaaggattaagaaaggatcctaaaagcagcaagagaaaacaaataacagataatggggcttcaatacatttgacagcagtcttttcagtggaaaccttagaggccaggaaagaatggcatgacacatttaaaatgttgaaggaaaaatcttttaacctataatcgtatacctggcaaaaatattcttcaaacatgaaagagaaatacttccccagacaaacaaacctgctagatttcatcaataccagacttgtcctacaagaaatgctaaagggaatactcaattagaaagaaagggacattaatgagcaataatgagtcctgaaggtacaagactcacagctaatagtaagtacacagaaaaacacagactattacaacattgtaactatggtgtgtaaacaactcttatcctaagtaaaaagactaaatgataagtcaggaaaaataattaccgcaacaacttttcaagacgcactcagtacaataaatagaaacaatgagaagttaaaaagcatttttaacttcttaaaatttaggtgtagagtttttattagttttgtttttgcttgtttatgcaaatagtatttatatcaggttaaaattatggcttataagatagtatttgcaagccttatagtaaccacaaaccaagaaacttacaatggatacacaaaaaataaaaagcaaaaacctgaattatatcaccagagaaaaatcaccttcattagaggaagacaggaagaaaagaaaggaggaagagaagaccacaaaacaatcagaaaaccaataacaaaatgaccagagtccctacttatcaataataacattgaatgtaaatagactctccgatcaataaacatagactatctgaatagttatataaacaattgatctgtagcctacaagaaacacacttcacctataaggacacacatagactgaaaataaaatatgaaaaaatgtattcaatgccaatgaaaaccaataaaaagcaggaatcactatacttatatcagaaaaaatagatttcaaaacaaaaactataataagagacaaggtcactatataactagaaaagcaacagcaaagcaaaaccaaaaacattagaagaaaaaaataaagatcagagcagaaatagatgaaataaaaaatacaaaagatcaatgaaacaaaaagttttctgaaaatttaaacaaaattgacaaacgtttagccagattaagaaaaaacaagggaaggtccaaatattaaaatgagaaatgaaaaaggaaacattacaactgatactgcagaaattcaaagtatcattagtggctaatatcagcaactatatgccaataaattgaaaaatctagaataaatgttactaaatacatacaacctactaaaattgaatcaggaagaaatctaaaacctgaacaggccaataacaagtaacaaggtcaaagctgtaataaaaagtttccctgcaaagaaaagcccgggacctgatgccttcacttctgaattctaccaaacatgtaaagaactactaccaatcctacttaaacaattcccaaaaatagagaaggaaatacttccaaattcattctatgaggccagtgttaccctgataccaaagccagagaaagacacatgattgttatgtagctacagataaataatacagaaggtaggtgaagtctatatttctgatgtcaccacatgtccttctgagaaaggaagaggagggagagacggaggcacaagggccagggcctgtgagagcaattctgcctatgcattagcattcaccctcctattcgactatcttggacccagactctcttttcctcccttaccacacagataggtcctcctcatcctattcttgccatttggaggatataatgaaacatactggccacagaaataacaatcttataaaccattataagaggtaatcaggttacaggtttcctggctggccctcaaaaggtactcaatatgccaaacacggacatgtttagacagcaagagaactgtgaccattgtatgagctgtcttatgaccctacccataataaaataattttaatgaagaagtatttaaaatctgatatattggacttaaacaatgaatraaaaaacatatttgaagagataagttggagacttgtattagtggttttgagaacttaataaaaattaaaacaccctccccaaaaagaaataaaatgacaggtcaatatatctgattaatatttatgcaaaaatcctcaataaaatagtagcaaacaaaattcaacaaaattcaaacattagaaaattcaaaattagaaagatcattaatcatgaccaagtgagatttatctgtggaatgcgaggatggctgaacatatgctaataaaacatgaaacattatatcaacagaataaagggtaaaaactatatgaccatttcagttgatgctgaagaatgtccctttatgataaaaattctcagaaagctggatatagaagaaaacgtaccttaacataataaaagccatatacgacagacccaaaactagtattatactgaaaggggaaaaactgaaagcttttcctctaagttctggagcatgacaaggatgtccactctaaccactgttattcaacatagtactggaagtcctaggtagaacaatcagacaagataaatatttaaagaacatccaaattggaaaggcataagttaaattattcttatttgctgataatatgatcttatatttggaaaaaactaaagactacacaagaaaactattagaacggataaattcagtaaagttgcaggatacaaaatcattgtacaaaaatcagtagcatttctatatgccaacagtgaaaatgtgaaaaagaaataaaaaggaaatcctgttcacaatagtcacacataaaattaaataactaggaattaacataacaaaagaagagctctataatgaaaaccataaaacactgatgaaataaagaggacaccaaaaaatagaaaaatattccatttgcatagattggaagaatcaatatcgttacaatgtccatagtatccaaaacaatctacagattcaatgcaatccctatgaaaataccaatgatattctttatagaaatagaaaataagatcctaaaatgaatatggaagtaaagaaaactcagaatagccaaagctattctacrcaaaaaagaacaaaactggaagaatcacattaacttacttcaaattatactacagatctatagtaaccaaaacagcatggtactggcataaaaacagacacatagaccagtggaacagaacagagaactcaaacacaaatccagatacctacagtgaactcatttttgacaaagctggcaagaacatacactggggaaatgacagtctcttcaataaatggtgctggaaaaacttgatatccatatgcaaaagaatgaaactagacttctttctctcaccatatacaaaaattaaagtggattaaaggctaaaatctaagacctcaaactatctgacaactgcatgaaaacactgggggaagtctcaggacactggtctgggcaaagatttctggagcagtaccccacaagaaaaccaaagcaaacgtgaacaaatggaatcacaccagattaaaaagcttttgcacagcaaaggatataatcaacaaagtgaagagacaacccacaaaatgggagaaaatatttgcaaactacctctctgacaagggattaataatgataatatataagaagctcaaacaaatttagaggaaaaaaatctaataatccaatcaaaaaacatacaaaagatttgaatagacatttctcaaaaggaaacataaaagtggcagacaggcatataaaaagatgcttagcatcaatggtcatcaaagaaatgctaatcaaagctacaatgagatatcatctcatcccagttaaaatggcttacatctaaaaacaggcaataacaaatgatgataaggatgtgggtaaatggggacattgtacgttgttggtgggaatgtaaattagtaaaatcactatggagaacagtttagaggttcctcaattaaataaaaattgaacagtcaataacaaatgacaaggattggagaaatggggacattgtgcattgttggtgggaatgtaaattaatacaatcactagggagaatagttgagaggttcctcaattaactaaaaattgagctactatattatccagcaatcccactgctgggtatatactcaaaataaaggaaatcagcatatcaatgagatayctggactcttgtgtttgttgtagcactgtttacaatagctaagatttggaagcaacctaagtgtccatcaacagatgaataaatcagaaaaatacgatacatatacacaatggagtactatttagccataaaaatgagatccaatcatttgcaacaacatggatagaactggagctcattatgttgcaataagccaggcacagaatgacaaatatcacatgttctcatttatttgtgggatctaaaaatcaaaacaattgacctcattaacatagaaagcagaaggatagttaccagaggctgtgaagggtattggggtttggggatgggaagtaaggatgtttaatgggtgccaaaaattaaaaagaatgaataagactgactgtttgatagcacaacaagatgactacagtcattaataacttaattgtgtattttaaaataaagaatgcaattggattgtaactcaaaggataaatgcttgaggggatggcttaagaaaaataaatttgaagaagggcaaggaagctaattccggtgacatgaatgaatgagggcataaatgagaagagatgagtctagagagattatttgtgtttatgtttatagtgtgtacatgtggtttgtgtgtgagtgtgttcctacagggaatgtaacatagacctggaaaacctaaggttttgattttgaagtgaaatagaaagtgatcttactgatttagcatactggtatatttcagccagtgatagatgtagatactcactgtatcaacttggtaaaagagcattaatcaaatatgaactttaggataaaaatcagggggttaatatcatgcatattgtctaattaatttaatgctcaaattcatcaccaatataaataggttaataaaaatattatagtagggattcaaataattcataaatatacttgcctggcacacactaaattgctcaatcaatgaaggcagttattactagcttaaatgaggaataatttttaatcaagtaagcagcatacattgctaattgcattcactttgctgtttatgaaccaaataactagattattaaatattatacaatatttaatcatgcatccatatatgaacatcactaatcttaaacattttaacatgctcaagagaagaatccagctggttccaaatataatgactaaaactaatataattataagattgagaggattacttaattgtaaaataaattaggaaattggtgctagggttagaaaatgcattctaatattcaggtgaagaaataactattgagtatctgtgatgtctggggccctatgtcaggtgctgacactgcaaatataaatatttcatcttaatatggaaagtgatgaacttgaagttttcactggacactgtgagcagaaaaatgtcatccctacttgaatatggaactgaaggctctttgatagaagttttctgaggaggtggatcccaactcatactctctctttttctctcaatatcctaatgcatagatatccataccataattatggctgagaaaagaaagaaagaaaatggggtcatttagaggggtaggggaatagaaaatagctaattttcatacaggtttttttttaggaaatgaaaaaaaagtatctctaaagcatagtttctattccaagattattcaacgtaccttgtgtaagagtatataaagtctggtgtcagtgtagtttcttaagagttttatctaagacaagtttgttgctttgaagatatctgttcaagttacagattcaaggaaatgtatcttatgaaatgtgattaactttagaagaatatgcaatcaatgagttctggaatttgaaaatgatagctaatattctgagagaaaattatgtcaaagtcaagctattagaaagttatataataaattctaacaagccaatttaaacatgcacttgaggaactcttttccagaacacctaaattaaaacagatattgcttctaccacatttagtgaacacatactaattgccaaggagctctttacagaatagtaaagaaagttcacattattgttgccctcatggagccatattctagaatggtaatggtggtgatgttggtggtagggaagttctacacgtacaataaaaatgggttacatgtcagcatcaaaattacgtcactaactmaaatcaaacagtaagcatgttttgaatgtgtgggagtttataaaatgaaaagattagtcagtaaaatggactcaatttctttctcttttataacactgaactgtaggatcatttacttctctgtcttaattttcttatagatacaattagaggaatacacagctttcagataacccctttagttcaattgcctctcgtattttctaattgtattctgtgtttaaaaatgcatgtgttattatgatcacaagtaaaaccttaaataattatttcaaaaatattaaaatggctaaaatttcttgtatacttaccatgagacaggatttatgttgttttctttatacatttcaacaatctgacaagtgagatactgttaggtactaaaaaggaaacaggtgtcgaagtaacaggtgactgcctttgctttaatagggtttgaaagtacgctggaggaaaaaaaaacagacatgttttatctacacaaatttaaaaaactaacatcctagattggatgcagttacaagtatctataattttgaaaaatcatgctttgattggttaaattaagaaatacaaaagccccttgccctcaaggtgtccgctattcttaggaaaaaggggaaggaagggaagaaaagagagaagggcagagtgagacagagagagagagagatgatttgataattgatgtgtgcttcaggctccgtgaaaaagaggacagaacactgcctgattaaggttgggagagccagtgttgatgtaacagagtgggcagattttgagctggtttgtttaatcatgtgtaattgaggcagaccagttagaaaaagattattgtagattaagaggactgtgcataaaaatacaaaggtcatatgcaacagcaggacacatttagagaagagtaagtagttcagtatgtctacacagacataggatccatgtgagctagatgtgggtgatgcagatacaaagataggcagacatgatagtaaagagtgtgtccttcaatagcatccttaaaagatttttagcaatggagtgataaaatcagggttatgtatattaataaaattgtaagggagtaaagcagaatttgagagacatattggttatagaaaccacaggattgtatgactgattgagtacaaaaggaataggatgtgagggaaagaaggggatgaaggttattcccagaatttgtggaagtattttctgagcagacactgcctggttgtgttgatttatatatttttatttgtaaactaagaatgtttatactattttgaaatgtattcccatttttagtttaatctcacacactcttccagtgcacaaagctaatcttaaaacaattcttcaagttaagaaattctctccattttcatgtgagcaatatggcaaattatccatccttgtccaatgcatatctaagttcaaatgagtaaagataagatgtggttcaaatgccatcataaactaccacaaattatcgctttaagttgttggaagggrcataattttattgataaaagtaaaagaaattctagacctaaaataaaacatgaagtgagttattttaaatgggatttataaccatgcatttaatgtgaactgccttcttaaaagggcttctgaaaattcaggtagaaatctaagtgcctaatctacatttcatgtctttgaccttaaactcatagaagaacatttagcattcagcagtgtggggattgtctttgagttttcctattcagataaaattaaaacattttacagttaactctccattatccatgctaaggtaggattaaagcttataatctatacaatgcatgtgtccacatgtacatatataaatacacacatatgcacgtgcacacacatacacacacacagacactcacgcatactgtattcataaagagtataccctttatttccactctattaaggattttgttaaagactgtataagcaatgctactgaaacaattgcaatactttaaatttcagttttgccacctatacaaggttttctttaatgcatattttagtgtatgtgtatatatacatttttttcatatatatatacacacttatgtatacctctttcttcctatatatagtatactgctgacaaaagagctttcatgttttatattcatctttgaaattatcttatgcccagtagagtaaattaattgtttacaccaaaactggtttcctcaatataccagtgtagaaaatatcactactataaaatgtatttctacattaaaagtattttagaagaaatgtattaaaaaataatgagcattaaaactcaaggataaatgggtattattattcaaataaagctaagaaagagtgattaaagttaaaagagggcaggcaccggtagctcactcctgtaatcccagcactttgggaagccgaggtgggtggatcacttgaggtcaggagttcgaaaccagcctgggcaatatggggaaacccaatctctgctaaaaaatacaaaagttagctgggtgtgatggcatatacctgtaattccaggtacttgggaggctgaggcatgagaatcgcttaaacccaggagttggaggatgcggtgagccaaggtcacgccactgcattccagcctggatgacagagtgagattctgtctctgaataaataaataaatttaaaagaaaatattaagtaaataacatgggggtaatagatggacacggctataattgaagtagttgtatatgaattaatattttggggcttttaccctgtgaatctgatgtcttagtcataaaaccccatttgcctagaccattgtcctgaagcatacatgtatattcttctaattcaccaacataggtgtctttccatttgttttattcccccgccactttttcacctccttgattaaagttattcattacatatttttgagccattttaaatggatgcgcttttttagtttaatttttcagctagtttttaactcattttgagctgatttttgtacaaggtgaggagtcggggtccatgttcattcttaggacatttgaaatagtacatttgaacaagtcttattagacaaaaaaattgaatctaaaaggatttgagactctcatacctttctgaatgtctaaaatacgtaaaatttttaaaatttatttttaattgacaaacaaatattatatatttgtgttgtgcagcatgacatttaaatatatgtatacattgtcaaatgacctaaagctaattacatatgcactacttcactacttgtcttttttgtggtgagaacacataaaatctactcttttagctattttcaattgtacaacgtattaactattgtcattgttagttacaataggtctcttgaatgtattcatcctgtttcattgaaattttatgacttttggtcagcatttccccagcctttgcttgcaccctcaacttctaataatcaccatcatactctctgctacaatgagttcaacttttttagattctatatataagtgagataatgtatttatctttttatgctttgtttattttacttaacagaatgccctccaggttcatccatattgtcttagatagtcttaggtagtaggatttctatctttcttaaagctgaatagtattccattgtgtatgtttacaccacgtttttgtaatcccttcatcgattgccagtcatgtaagttaattttctattttcgatattataaatagtgctgcaataaaaatagagcttcacatatctctttgatatactggttttcttttctttggataaatacccagaagtagaattgcccaatttttggtacttctatttttagtgttttgagaaatatcagtactatttttccgtaatggctgtgataattaacattcatagcaacagagtctaagagttccctttacatcttcaccaacatttaatttggggtatttttgtctttttgataaaagacaattccccagccattctaactggggagagatgatatcatatcaaggttttgatttgcatttctctgatgataagtgatgtcaaactttttaaatatacccrttgacaatttgtattgagaaagctctacggatatcctttgccaactttttaatggggttatttggttttctgctgtggagatgttaaattccctgtaaattttggatattagttctttgtcagaagaatactttgcaaatattttctcccattcaaccaattgtttctttaatctgtttaatgttttcttttgctgtgcaaaggttttcagtataatatagtgttatttttctatttggaggcttttaccctatgaatctgatgtcttagtcataaaacctttgcctagactattctcctgaagaatatatatatatattcttctaattcacaaacaaaggtgtctttctatttgttttattccccccgcccattttttcacctccttggttaaatttattcatgtacatatttttgagctattttaaatggaagcgcctttttagtttaatttttttcagctagtttttaattcattttgagctgatttttgtataagctgaggagttgggttctatgttaattcttccacatatggatttcccgttttcccagcacagtttattgaaaagggcatctttctcccaatgaatgttcttggtgcctttgttaaaaatcagttgtctgtatatacgtaaatttatttccaagttctctatgctttttcatcagtctatgtttctgtttttataccaataccatgctgttttggttaccatagctttgtagtatcttctgaagtcaagtagtgtgatactttgagctttgttctttctgttcaggattgctttggctatttagagtctgtattagggttctctagagggagagaactaacaggatatatatatatatatatatatatatatgaaggggagtttaaggaatattgactcacatgatcacaaagtgaagtcccacaataggccatctgcaagctgaggagcaaggaagccaatctgtgtctcaaaacctcaaaagtagggaagcgaacagggcagctttcagtctgtgagcctctggcagaccactagtgtaagtccaagagtgcataaggggaataacttggagtctgatgttygagggcagaagcatccagtataggagaaagataaaggccagaaaactcagcaaatctgctctttccaccttcctctacctgctttattctaatcaagctggcagcttattagatggtgcccactcagattgagggtgggtctgcctctcccagtccactgactcaaatgttaatctcctttggcaacaccctcacagacaaacccaggaacaatgctttgtattcttcaatccaatcaaattgacaactagtattcatcatcacaagtccaccccttgtcaacgtgaacccatatacatctcctgacatcaagcataatcttcaaataaagagaataataagttcttaattacacctaacataatacagctatcctttgtcgaccagaagcacactaatctttaacctaagtgctgttacataaagttaacaacactgaaatgctgatatgaagtcaataaatcagaaaaagaaaggaaataaaatgaagacattttccttgtacaagtgtgtacatgcacaaacatgtccttaacaaaataaggaagaaatactcatgacaatcacagtcctcatttctgcaactggtcacgtggttgtagctggtattgatgaccaccttcttctacccattctgtattccyattgccttcagcaagcacctcagcacatcgtggtttttacctggtggagtgacccaacycttcatttctgaagtgtctgggtcatctgtagtcctgcctggagtgggctgttgtaatttcccattgaccttaatcacagggcatggtaattctaagagatgccctaagggatctcctgtattccactgatactcttccttatcctaattgttgagtagtagactgatttcatcttgataatccaggtcaatcatcctagccaacactgtaactcttttcttagcctattgacttagaggtgagaggagcctaaagtggccaggtggcaatcttaacttcctgtttaatgaagtcattgttgtgtctcctggtgtcagcatttcttcctctgataacatgacttctaggccagcagaacgtaatgtcacaggaacaggaaacaaaaaaattgctactgagtcaccaggggtgatggtgattggtgtcacttcgacttctaccccttgattcatggacctgtgaatcctggctatgggagaaacagtaccatatattggatactgattcagaacacacacagcctcctggagtactttgccacagccctgcaaagtattgttacctagttgacattgtaatttgatttcaaaagggtattccactcttgtattaatccagctgcttcaggatgatagggaacatggtaagaccagtgaattccatgagcgtgagcccactgccacacttctttagccataaagtaattgctttggtcagagtcaatgctatgtgaaataccatgatggaggataaagcattctgtgattccatggatggtagtcttggaagaaacattgcttgcaggataggtgtattagttagggttctctagagggccagaactagtggaatatatatatatatatatacacacacacacacacagatacattgtatacatatgtatgtatatatacatataatacatatataatacatataatatatacatatatgtattatacatacatatacatacctatatacatttatgtatatataatacatatatacatatataatacaataatacatataatacatatatatacatatacatatacatatatatatatatatatatatatatatatatatatawgagtttactaagtattaactcacatgatcacaaagtcccacaagaggccatctgcaggctgaggagcaaggagagccagtctgagttccaaaactgaagaacttggagtccaatgttcaagggcagggagcatccaccacgggagaaagatgtaggctgggaggccagtccaagtctctcttttcatattttgctgcttgcttttatactctagctgtgctggcagcggattagattgtgcccacccaggttaagggtgggtctccctttcccagcccactgactaaaatgttaatctcctttggcaacaccatcacagacacacccacaatcaatactttgtatccttcaatccaatcaagttgacactcagtattaaccatcacaatagacaaacccaaatccgargtaactgtctattcaggtgaggacaaactgctgccctttccgtgatagaagagatccaatataatcaacttgtcgccaagtagctggctgatcaccccaagatagggtgccatattgagggctcagtgctgctgtctgctgctggcaaattgggcactcagcggtagctgtagccaggtcagccttggtgagtggaagtccatgttgctgaccccatgagtaacctctacccctgcccccatggccactttgttcttgggcccactgggcaatgacaagggtggctgggaaagaggctaagtggtgtccacagaacaagtcatcctatccatttgattattaaaattctcctctgctgaggtcactgttggtgagcactcacatgggatacaaatrtcttcacagtttttgaccactcagagaggtccatccacatccctcttccccaaatttatttgtcaccaattctctaatcatgctttttctaagtccctgggcatccagccacgccattgggtacagcccataaatcagtatataatcacacatctggccatttctccatccatgcaaagtgcacaaccaggtgcactgcttgaagttctctccactggaaagacttctctttgccactgaccttcagggatgtcctagaaatgggctgtagtgctgcagctgcccactttcaggtaatgcctgcataccttgcagaaccatctgtaaaccaggccctagtctttccttcctctgtcaactgatcatagggaacttcccatgaggccatcagtgcaggctgggagagagaaggcagggtggtaggagtggggaccatgggcatttgagccacttcttcatgtaatttgtgacgtcaggacctgcttgagcctgatcacatatataccacttcaacttgatgatgaaatgctgctgtgcacacccaactttatggctagatgggacagaaagcacccacttaatgataggcagttcaggtcacatggtgactttgatgacccatattcatatgttcagtttctaccaaagcrcagtaacaggccaagagctgtctctcaagaagagagtagttatctgcagaagatagtaggaccttgttccaaaatcccagaggcctctgctgtaattcacctatgggggcctgccaaaggctacaaacagcatccctctctgcccctgacacctcaagaaccattggatctgctgagtcatatggcccaagtggcagagcagcttgcacagcagcctggacctgttgcagagccttctcctgttctagacccaactcaaaactggcagcctttcaggtcactggataaatgggccagaataacacacacaaatgaggcatgtgttgcctccaaaattcaaacaggcccactaggcattgtgaatctttcttgattgtacgaggggcaaatacagcaacttatctttcaccttagaaggaatatctcaacaggccctacaccactggatccccagaaattttactaaggtagaagttccccgaattttagtcggatttattttccatcccattgcatgcaaatgtatcaccaataagtccagtgtgtttgctacttattgttactggacccaatcagcataatgccatcaatgtaatggaccagtgtgatatcttgtggaagggaagaatgaccaaggtcactccaaacaagattatgacacaaagccagagagttgatatacccctgaggtacaacagtgaaggtatattgctggccttgccagctgaaggaaaattgcttctggtgggctttatagacaggaatagaaaaaaaaaaagggatttgccaaatcaatggttgcataccagaaaatgtgttaatttgatcaaaaatgaaactactgctacagcagctgcaattggagttactacctggttaagcttactataatccactgtcattctccaagattcatctttcttctgcacaggccaaataggagagttgaatggggatatggcgggaatcaccacccctgcatctttcaagtctttgatggtggcactaatctcttcaatctctccacagatatgatactatttttgatttactatttttctaggtagaggcagctctactggattccatttggcctttcccaccataatagtcctcactctaccagccagggaaccaatgtggggattctgccagctgctaagtatgtcagtgccaattatgcattctggcactggggaaatgaccacaggatgagtccaggaacacactggacccactgtaagtcagacctcagctaaaactccattaattacctgacctccataagcccctactttaacwggaggaccacaataaccttttgggtcccctggagtcaataacttagagccagtgtccagtagttcccaaaaggtctgatcattcccctatccccaaagcacagttaccctggtaaaagaccagaggtctccttggggaaggatgggagaaagattaacagaataacttttcagtagtgtaattgggtccttcctcaaggggacccagcctcccctttatttaaggttctgggcctgtaaactggttcaagtttgaaaattgatttaggagccatgattctctatttttataattcaaattagtctttggtccactcaacctggaatttttctgcttatacaaattctgtaagaatgcagtaggcttcttatcaatttcacttctaggaacactgtgattaattagcccatgccagagctctacattctgattgctgctttgcctctgctgtccattagggtaagtgtgcccaccttgcctttgacagttgagtgtcaccagttggctcctgccactttgggatccaattattcccattgcatttaaattttccaattgagtgactatggttcccactgttagatctggcatgcagagaacagaaatcacagaactcttcagggatgcaagtgttcccctcacaaatctgtttcacaaggtattggtgaagggtatgtcttctggaccatcccagttgggatgagtaggtctaaagtgactaatcctctccagcaccccaatctccctaagcctttggatccctccctctactgtaaaccaagggagatcaggcatttccagctcactcaaaatgggccatctttttatccatgtttcagccaaccaagtatataaactattaggacctttttaaactcccctagctggaacattaaatgcagaatccctggttaggcccatatcaataaattcaatttgatgcaactttatgttctttctaccattatcccacacccttaatatccattcctatgggtgttctccagatttctgcttatataaattagaaaactcaagcagttgttttggagtgtagtgcacctcctcatgggtcacactctgaacctcacctctaggggcctgcaggactttagttataggtctagaagcaaacagaggtgttggggatgggttctgaggagaatcagcattgtcttgcctggaaattgcctctggggaggtcatttgccccagacaaatcagggttaatctcctcagacaaaggtgtaaaggctggtggtagcatgggtaggggaggggatgttgccactactaggagtgaggaggctttttcctctggcaaaaaaagcctcctcagaatttaggagctcagcgcccccagcatcatcagcatcctcccacctgtcccaattccaagtggcagggtcccattcttttccaaccagtgccctcactttaacagtagacacctggcaaggctgagagtgcacctttccttgcaggacagccactcacataagagcttgtgtctgattttctgcaatttcagccttttgtctacaggagataaaattcccactcagaacagtcttagaagatttgaggctcagagtgtgcttctgaagctgagagttagaaaccctgagaatttcattttctttcatcactttgtccagtgaacttagagcagccaaccaatgtcattatattcgttggttctccacatgtggtgaaaggtatatgtatagagtcactaaactccttgcctctcaagagcagtgaatcaggagtatcaaatgtgtatttattttgcacaactctctaaacagttmatgcccaggactatcagtgttctctatacttttagaagtagagtccttagcattttggagtctagtaagataaagcagccaactccagaaatgccaaagcaactaaagaaatccatatttaaaagttggtttctctagaaacacgcctggtaccaaaatctgtattagtcagggttttctagagggacagatctaataggatagatgtatatatgaaggggaatttattgaggagcattgactcacaggatcacaaggtgaagtcccacaataggccacctacaatctgagtatcaagcaagccagcctcagtcccaaaatctcaaaattagaaatactatgagtggagccttcaatctgggtctgaagacctgagagcccctggaaaaccactggtataagttcaagagtccaaaaggtgaataacttggagtctgatgtacaagggcaggaaacatccagcatgggggaaagatgaaggctggaaaactcagcatgtctgctctttccaccttcttctgcctgctttattctaattatgctggcagctgattagactgagggtgggtctgcctctctcagttcactgactctattttaatctcctttggcaacaacctctcagacacacccaggaacaatactttgcatccttcaattcagtcaagttgacactcagtattaacgatcacagggtcttttgtggttccatatgagttataggataattttttttatttctgataaaaatgtcatgagtattttgacagaaatctcatttactctgttgattgttttgtgtaatatgttttttaacaatatatattcttccagttcatgagcatgaggtatctctgatttctttcacctccttggttaaatttattcataagcatatttttgaactactttaaatgaaagtgcttttttagtttctttttcagctacttattggtgtatagaaatgctactgatttttgtatgttggttttgtatcctgaaactttactgtattcactgatccattctaatagtttgtgttttctttagtagagtcttcaggtttatctttatataagattttgttttctgcaaagaagtacaattttacttccttttttccagttttgttatgttttatttctttctctgatctaattgctctgaatagtactttcagtaagtaatatgtttaatacaactggtgaaattgggatttcttttcttgttccagttattataaaaaatgtgttcagcttttcccagttcagtataatattagctgtgggcttgtcatayatgactttttggatgtagaggcatgcatcttctatgctgaatttgcccagaaactttatcatgaaagaatattgaggtttatcaaatgttttgtctacatctattgagatggtcatatggctttgtggttttgtcctttattaatgtgatatattacgtttgttgatttgtgtatgttgaaccatccttgaattcstggaaccaacctcacttgatcatggtgtatttttttttgatgtgttattggactaaacttgctagtattttgttgaggattttggcatctatgttcatgagggtcattggcttgtaattttcatttttattactgtatctttgtctagttttggtatcatggtaatgccagcctcatagatgagacagaaagaattctctcatcttcaatttgttggcaaagtctgaaaaaaattgatgttatctctcctttataagcttggtacaatttatcaagctatttagtactataattttgttttttgaagatgttgtcaatgttgtaatttattatttatctgttcaatttttttttaattctccctgatttaatcttggtaggttttatgtgtccagcaacttgtccattttctcttttggtcttcccatttgttagtttgtagctgttcataacagtttctattgacccttsggatatctgtgatttaaagtctctttatttctgattttatttacttgggccttctcccttattttcttggttagtctagctagaagtttcttggtttcatttatcttaaaaacacacacacaacaacaacaactatttatttcactgattctttgtatgtttctttattctctaatttagttttgctctgatattttttaaatctttccttctaacaattttggttttgttttgttcttgcttttcttgttttttgagatacatcattagattgtttatttaaaatttatcctttttgatgtaggcatttattcttataaaagtccctttgagcactgcttttgctatatgccataggtttttggtatgctgtgttttcattttttatttgttttggttttggtttttcatcttaatttcttcattaacccattggttgttcaagagcatgttgttgaatttctatgtatttctacagtttttaaagtttttcttgttattgatttctagtttcattccattgtgatctgggaagattatttgatatgattttggtatctttatgtttttttgtggactaatatgtggtctatcctagagaatgttccgtgtgctaataagaatatgtcttctgtggctgttgaattaaatcttctctaaatgtctgttagatccatttgttgtaaaatgcagtttaaagctgatgtttctgcattaatattttgcatacctaatctgttcaatgctgagagaagagtgttgaagttctgagtattgtagtattagattctctctctccctttagatctaacaatatttgttttgtatatctgggtgctccagtattatattctattcctgaattgattccattattattatatgataatctttttcttttttttctacagtttttgacttaaagtctgttctgtctgacacaaatataggtatgcctgctcacatttggtttccaattgcatagactgtctgtagtcttttatttttagtgaagtgagtttcttatagttgacatgtagttggcgcattgttttttatccattctgtttatatttttaagtgaaaaattggatttgtttacagtctacattattactgataaatgagaattatttatattattttgttaattgttttctcattgttttgtgtagcttttgttactttctaattatcatcatggtttgatatttttctgtagtggtaatgtttgactcctttctatttctcatttgtgtatctgctctatgagtgagttttacacttccatgtgttttgataattgtagatactgtcatttaactttcagatataggactcacttatgcatttcctataggactggtttagtgatgatgacttttctgtttttgtttgtctgggaaaaattttatttcttcttgatttttgaaggacggcttttctttgctatgtaaaatatgcttggctgacrtttagtttagttttgtttgtttgtgttttgcttggttatatgtgacttcatgcttttctcttgctgttattataactttttctttgtccttgacttttctccatttgactataatgtgctttggggattactttttgtgttaaatctatttgggaatctttgagcttcataaatgtagatatcaatatcacttgtaagacttgaaatgtttttaaactattattctgttaaatgaactttccatgtttttgcctatctcctcgctctgaaactcccagactcaaatattttatcactttatgatgtcatatatgtcatataagcaggcttcatctttcttttattttcttttgtctgatggtgttattaaaaaacttttcaagttcagaatttttttgtgattgatctagtttattgttgtagctcttcattgtatttttaaattttcatttaataaattcttaatttccaggatttctatttggttgctttttattacatctatatctttatttaattttttattcagcttagaatttttttctgatttctttgtatggtttatctgtgttcttttgtaactcactgagtttccttaatatgattattatttttcaggtaattcatatatttcctttccattaggatctgttactgaagcactattatgtttctttggagttgtcatgtttccttgctttttcatgttgctgtgtccttatgttgataccaatggtgaaatagtcactgtttcccaatttaatggattggccttcttagagaaacactttttcatacagatatatttatagtgtttgtttactacagtgttttggctttgattctgagcaggtactgttatgtagtctccatataattatttgttggtaatcagcatcagtggtgtccatgacttcctcatgacttaggctgtggtttttagtgaaggattagtgaagcttttctaagaatagggacatcaggtgggccagtcctcaggcaccatggtggtggtattcattggagcatacttatccagagggcccagataatgtgcatgggtatcagcagttctgggaatagcaggcttgtcctcagaccactagatgatatctgcaggcatcactggtgactggcagggttggctgaaccccaggaccccaagcgacttgtacaggcaccaatggtgggtgaggcaggcctttcccaaaaatattttattattgtggtcaacagaaattcatggatcaaagttattatttatttatttctcctgaggataactctgctgcttttagatacaaaatgtttatagcaagatactctaacttccaaatttttaacatgaaataatttactgagaaatatctagagaacaaaaatagataaatatcaaaagtgtataccttatttctataaaaacaatgaagaaaattgcctaaaaattaatggaaatattcttactgaatctctcaaaactgatgtttttacattttttcctcctttcactcttcttatattttcatgagtctttcttcagttttctctttatctatcaacataatagctttcttcttaaaaaaatagtcgaataaaatcaactgaaaatttggaaataataaaggtcttataatattaatgtaacgtgcaacatttgtaactgaatagttgagctttacttatttttctgcagtattcattcattaggaaatggccaggtagttcagaaaatgccatcttcattaagagtataaatattgtttctagtacatgcagtgacttaaaagaaaaacaatgggtttatttaacattttaaaattatgacaaactaaaaccctatacttaatgcatattaaaggaaaaaatatcagcaataattactgcatgcattacggctttttaaaaattcagatatgtaagcctcattttgggtatagataaaacaaaaacagtaaaaatgccatctagtaatgtcaakggaatcctggaagaatatttacacaaaaaccctaaacattgactatctttccagtctttaggatgctgttgtttgctgcagctcttttggtagagcaaaaatgtaaaagatcaggtaacaggtaaaatcacctgttaacatattttagttaagtatatgtgaagtaagttataggtctccatgttgaaaagtttcttgaaagcaagactatagtttttataaataaatgtttaacttaaaacaaatattaagttttattcttgcagttctatatcatamcttccttccttcattaaaaaatactatacattacttatatttacccctcatctttaagtatttttaaagtctaattatttaacaatggtcactcaagtctcgctaagtggttagcagagcaacatccacatttaaaaatgcaataataaaaatgcaataataatttcttgaagagcaagtttgttgtctttatatgtaacaaaaagaattatagacttgagaaaatatcagttctacatattacatgcataggcatcgtgtatatctccgctgaaatatatcttccagtagttcaaatatcccatttatatttatattgttgaagtgatcagacccaacaccaggtcatgggggtgatgaagtcagggggagtcaaaggaatcagaaaagacagtttgagagagaaaagcaggtccagggggccatcatgagtgtggaggctgcgaaggccccaagctctggaagcccagactatttattggtgatcaaacaaagaaacaggtggtgagaatgtgggggtcaaaagggcgctctgcattaagcatatgatttacagctgtgatggtttagcatttgctctgttacttgagataatggagagcaggttcttttaactcaagatacaatcgatcctgggacagcaaggagcaaggattccattccagagccacgagccctggattctatccaagccatgaggggttttatgccctgggcttagattatggtgcgtcagggtagccttccaccctttagcacagagcttggtgttccaaagtccacaaagggttttagaccctggaccccggacatgttccaagactcttttacattatgtcagacatgaaagccctgcctcagcttctcccaatactcagcttttcccaacatatataaaatgtcccatttgtatttaattctaattgattgaaacaataatctttaaaattaatacagtatcatttcaggacaattactgtctttttttggacactgtggtatgcagaaaaatggtacactaaatatgtccccattccagtctcctgaactgtgaatatgttactttaaataccaaaaggtactttgcagagatcataaaattaaagatcctgaaatgggggtgtttatctagtattatccatataggcccaattaagtcaccaagccccttaaaaggaaaaggaggcaggagtgtcagatgaaaatatggctatctaagtacaggtcagagagagaaagaaaataaataaaagatttaaagttgttatgctgctggctttgaagacagaggagggggccataagctaaggaattcgggttacctccagaagcaggaaaaagcaaagaaatgaattctcctctagaacttccagaaggaatacagccctgtggaaacctagatttccaacatagtaagactcatttcagactcctgatctccaaaatgtaagataacaaatttatgttgttttaaaccagagtttctggcaatttgttatagcagcaatagaaagctaatatagaaatggtgagtttcagttggaggcctaatagagatatctggcagtaagaaagagaaaatgagtctagtgatatgatttggtggttgcaataacatagtgattgttgaaactacatgtattgatgagatctttcttatgaataatatgtaagttgaagacaaaataggagcacctggaagtcctggaagtatccacaattaacagaagaaggatcttggggaaacagaagaggatcttgtgaaaaggatacacagactagtatggtagtgaaaagcagcaaagctgggcaatatggtagacaaaaaatgagttaatttcaaatagaaggaagtagcaaataatgacaagtgtacctaaaagtgaatcagggtttgaagatggtttattttatttaataatagagcactagtgacctcattcagagaaatttcagtggcatgtcagggatagagagcatgcagcagtgggtcaagtggtgaactaaagatcagtggtgaagaccaagtgtttttgacttttaagaaatatgagaaatgtaaatacttaacagaaagggacatgagagtgcctgaacacgtgtgtgtgtgtgtgtgtgtgtatgtatgtgtatgtgtttacgtgctgtgtgtttttaatataggagaactttgggcatattgaaggtaaagagaggttgaaaactatgaaaaaaaaggaagaaacaaacataaggtctctgagatatgagtttcattaaataggaggactatttctatgatgaaatggaaggaagagataaagcatggttataaattggaagcatttataaatgggtaggagaccaagaagttctggaaatttctgactttctcaattaatttgtaaactcagaggcaggtattcatatatttatgcttagatgagtgaagtagtaaaggatggcacaactgaaagtcaagcttccaattacaatttctaaaaatgggcctaatagcaatgatttagcatttgagagagctagctttatgtcactgtattcttaaagtctttgtgctatatgggaagagaaaaaacgtgtagtcatgtgttcaagcaagctataggtaaactggtgtcatcaggaagaagcatgttttcaggtaaaacaaatgattggagggtgcaaatttaaagataaacgattatagaacaagtttctagggcagtatgaagctgattcaatgggagtgataacataatagtgaggagggtggcaagaagtagttatgaacaaaactggatttattagttatgggctttaaaagtctagggtaaacttattgtgaagctttattgattcaggataattttgtttattcagttttcttttgcttagaatttagagtaggtgtgagtttaaatatttaaagttaaaaatgactcttatacctttactagtgacatgaccacccctaaaaagaaatggcccaaggtcaatatagaatattgaatcacactttcattaagccagcaacaattagaattaatagaattttctgaacagaataaaggttatgccaaggttttgctgactggactgcaactttattgccatgtattagatataaaattgaccttaagtgatttgcttgataattatgtgccggtacacaagctctgaaattactttaagaaatacttacctaggtagtatgatatctagaaaaagcaaatgattattatttctgtattcttcatcactaagaaaaaatattatggctaatatcaaactagaatgtgacttgtacttatattagcttggtgcaaaagtaattgtggttttgccattacaagtaataacaaattaaaaaataatggcattaaaagtaatggtaaaaccacaattacatcagcctaaaacatatttttgatgcaagtcattaaaattgagagatatagttatgcaatttacttcacaagagttactgagctaccctcagaaaattaatagcttatttcacagacattaatttataactgtttttattttttcacattctctaccttcctaattctatttattttgtatgtattgattgtatatttttaaattggcacataataattgtacatatttatgaagtacatagtgatatttgatacatataatgtataatgatcagatcaaggtaattagaataactattcatctcaaacatttattatttctttgtgttcagaaaatttaatatattccctttagctatttgaaattatatgatatattattgttaactgtagtcaatctacaatggcatagaacactagaacttattttttctgtgtagctataattttatattctttgaaaaatctctgtatcttcctcttccccttgcccttcctaacctgtattatcctctgttctcctttatacttctaggaaatcaccttttttgcttccacaaatgagtaagaacatgcactgattaactttcaatttctcactaacttcacttaacataatatcctacgttaagtgagtaataaaaataatagtgaattattttcataattttgttgaattttctgtctatatttttctgtgtctcagtgagtgttcttcagattattacaataaattcttttccttgaattttgtatttttccttatgattgaggtctattactggataattttttgttattttagaagtgtctgttttttggttttttttttttttttgctttttttaatgtttaatgtgtgcctacacatctggtaaaacagttacctcttccaactttatggagggggttttctaggggaaggcttatttgtataggtggagcttggtgtatccattaggtgggatgcactggctttggttctagttggacacaatagtgtaatctctgtgtagtttcttcagatgtaatccatgctagtgacatttgcaagcatctcagtggcctaagttgagagaatttatggcagtggtggtgcagctttgcctggtgttgccttattaggctgtttctcaggttgggggtacgtgtgtccacacagtgggtttgccatcataaggtctgtttcactggggttagagccataaggctgttactctgggtgggggcacagccacctagttactcagctggcctgcgtgcatgtctgctggcagtgaaccacagggctgtttatcaggctttggatgtaggcacaaggctacttggccaatgtgggggtgtttcaaccaggagcagcccatgggactgtttctgaggcctggaacatgggcacacagctgtttggctggcctggaggaatgtctgccagagatgtcccatgaggctgtttctaccagtctggcctggagataagtcagctgggaacagtccacagggctgtttctaaggcccaggacacatgtgcaaggctgcttggctgccttggctatgtgcctgcccggtctggcccaaaagactgtttatcaggcctgggatatggtcataagtctgtttggccagcctcagggcttgaccaccaggggaaccttaaagggttgtttcttaggctgataacattggcatatagctatttggctggcctgggggcatgctcaccaaaggcagtccctagggctatttttctagcctggatacaggcacaaagctgctcagtagccctgggtgtgttcccttaaagagtgtcaattggtgctctgtcttgggcttgagatgtgggcacgtgactgatcagctggcctgggggcatgtctgccaggggtgacccacaggcacggctgtttccccggccctgattataggcacccacattgggcccggcagagaaatgtccatggagagtggggaagcaatgtagggctgtagggctatttgtcaggccccaggcgtgggcatgtatttatgctgccagccagggtgcatgtcaactgcttggtaactcagagacttttcccactagggaggggtgtacagtggtttggctagcttatgggcaggtttgcactgagtgagagtgccagactgtttctccagctgggagtgttgatcgtgggtgttagtttccctgctctgcaggaccacagtcatagcggatactgggccaagcttagcacagtgatattgtggtgttaagccacctttgtggacttggtggaatgaaaatgaagccccagtgctggagaggtgcagtgcctactggcctcaaagcagggcacactccagaggtggcactcatttccagatgaccctgtgctgaagcagtttggtcacagtagatgaagggtggagattgtccaccttgtgcttctaatgcatggcaatgcagctgtgtgaattcccagcagctattcaaagtggcctcagggctttcaaggactgtgggatttccctatagtacagactgtaagtgtttggagtggcaatgggactggtgaggttcctctgtgtattagtccattctcacactgctgtaaagaatacctgagacagggtagtttataaaggaaagaggtttaattgactcacagttccacatggctrgaaaagccccaggaaacttacgatcatggcagaaggtgaagaagaaacaagtacctatttcttcacgaggcagcaggaaagagagggaaagtgaagggggaaaagccccatataaaaccatcagatctcatgagaagtcactcactatcatcaaaacagcttgggggaaactgccccatgatccaatcaccttgctccctggacaggtggggattacaggttcctccctggacatgtggggattacatttcaagatgagatttgggtggggacacagaaccaaatcctatcagtctgcttctctttccccacaacaggaactcactcccgactctgggtcaatctaagtkggggagagtgtctgcagaggctgggtgtctccatatgtcctcctatgcttccaatcaccataggtgcgtttccactttcccattgttttcagcactctccctccagtcaaatcttagctgtctatgggttgtcgtggttcattttgtggtggtggtgagcatcaagcatctcttctgaggcgtcttgctgacgttactcagctacccacaaaataatactagtttaaacttgtcattcctcatttaacactctaagtagaagcattattaaaatgtttggggatgagaaacaaaacagtctttccaataggaaataaagcatcattaaacctaaaatgagaaaagcctagtctgtaaattatcatcttcaaattaaaaagaaaatcacattatatttccaactgtaagtcaataggtataacaagcaattaaactcctcagatgacttaataattaaatgcctttgacagaaatatagtaatatgcattagtgagcaactttatagaatctttctgatgaaacattggcagtcagatgaacttcatgttcaaaaagcactaatatttcttgtatttatttatttaaaaattatatacaatatattttaagtatgtatacaattttttaaaaagctgccagaaatcttatgatagtactcttaatattttggcatatatcttggatacctttgtaagatcatcacagtcaatgttaaaatcattaacaaaataaaatagttcactttttatagagtgctactatataccttatctggttttaaggattttccatattgtaactcaaaaaatccctgtgaagtaggcaggcagtattaccctgtgaagtaggcaggaagtattgccttcacagatgaaagaattaataaagccagttagcagtagagccaggttacaaaataaatctcctttggaattagcttcttccatccttttcgagaagtttccttcttacatatttaaaaataataaataaaacacattgattatagcattctatacacagttctaaattcttcacatacagtgagttatctaatcttcacaaaatatgtatgagtagtttttattacattttacagataaggagactatggcccagctagtaatcatgtacatttctcaaaaatcacacactcaataatgaaaagagctgggatttgaaacaaactcagtgtgtctgcagactctgtgctctgtgctcttaatcactactctattctttatcttagattttgcctaaaatgttcatctggctgatgtccctttgttttgtatgctacacagtagaccattaagatagttcacaatttattccgtgtatccaagcctgcgtaaacgggaatttgctaaagcaaattgggaattggggattaactaaagggaattgtgagaaagagaaagaacaacttttaagaagtatgttaactgtcatattttcacttaaggggaatatattaaataaattaaccttgagagattattctattgtggacatcttaagttctcaaataytaaatgagcacctcatgttttcccagtattaaaaaaaatcaagaaaaatgccctcccagtgtggatcatcttttaacacaaggaaatatcttcagtttcttactttgacttatttttgccatgcatattcctattgatcctgagtatacaactggaataaacagaaggttatcctgttctccaccctccatgaatttagcttctaatgtgggagacagacaactataaaatacacatacagtcatgtatatgcatgtgcatatgtatgtatcatgatctgaagatcctaagagctacagaattaccggaggtgggaagacttcttcagataacctaatgggaatacatttctcacaaagttgacatttgaactgagatctgaaatacaagaaaaagccaaccaaagtgttgaataggaacttttagggcagaaaaacatgcctaccctgtaaagtgaattcatgtcttctgaaaacttccagaaattttgcatcttcacaaatagggaatatgtttgtctgtctctttttgtggttggtttgcctaatcagacaagacttagcaaaattcatgatgttttgacccaatgatttaattccaccactttgtgttctgactgcatcgtatattcagatcatttaactctactctaaattagttttctttttcttccaagtaataaacaaaatttaccaaatatttatttaattttctgagcaaataacatctaacagatacaagcttaaattggacattgtcatatgtgttaaccaaaatttctcttggtatctttgagtacatgctatgaaccaggcatttttagatgcacaggtaagatatcaatgagataaacagtcaaaaatgcctgtctacatgaatattatattttttaaaaacatttagatgtgctaaaaatgattagaaatattggacttcataagaataaaggaagataagaggataaagaaagaagagaaggaggagcaaaaggaagagcaggaagaggaaggggggaggaaagaaaacaaggggagaagaagaggatgaggaagcagaggaagaagaagaaaaacaagcttcactttggcaaaggccacaattactaaaactttgcataagcaaaaaagaaagtattaatatgtcaaactttattctaaaatttacagaaaacattaaccctggtgaaaattcttatagcaaaataaaaataaaacatgggaaaataaaagcaacttcaatatatggacattaatcaataaattttactatctgatttaccctggaaaaagatttttacataatatatctgtgttgccataataataaataaattctttttatttattaaaatatatttaaaatgtcctcgaagtcaaaattttagaaataacaccatgggctcaacccactctgtttttctcctacattttcccctagcatttctgtttttaccatgacgcttttaggcggcatctagacagtggtgttttttgggggatgccttctcagttatgactatccccacacattattttagaagggttttatgacatttcagcttcccaattcagtatattttcagataaatgtatttctatttgtgtccatgtacttacagcttagaaaaaaatacaatttttaaagtgttggagtaaatacactttcacagcaggtaaaatttaattctataaactattccaccaaaagcatttttaaaatttgcctctgcttaactttgtgaactttaagtcaaagtttagttttacttgatgcctataaaggaagtcttttgtgaatttaaagatgtttggagacatatggtttcattttatcctcagtaatcagtagaaaatttttttcctaccaagtttttcacctaccaagtttcagaagtgtccatgcagagatgcaatagaaaaactgagcttctttttcttccatatcctatgttgacggctatttagtatatagaataatatataattatttaatcattttataaatttcagttttgaatgcagtaataaatagagatagaactttataatcctagaaaaagtaaagagtttctgaaggtcaatgatgaaaattgttttctgaatgtttgatactacaatatgaaagaataaagcaaaatacataaacaagcttaaggcctttcagtctgtaattcagttatacagatttatacacttccataattatctagttcagatgtgatcgaaagagaactatgaccataattcaaaaacgtcaacgttttgagcattgggatctatttattttattaatttaattgtaggaaacatagcaaataacctttaaaatgtttctggtaattttatatcatgataagaaaaaatataatcttttgaaaatgttttataatagcagtttaaagcttcaagtagtgttgttattcactgacacattcataaaagaaatagaactttgcttctatgacagtattcttactacctttattttttggtgttgtgagcctgactggttttttgagttaatttcagtttttgtttttttttctaggccaaaataccataattcccttctatcaagccgagagttaaagttcatttgtcttctctttccactatttatactttcaaatattaccaaaataaaggcttattttattttattgcttgagagaaaaaagcacactgtttctaaaatcctaaacaaacatttagaaacatatggtaattgaaaatcataatctgacactatagtaacagtctgtttatacaagaggattttttgatttgaatattgcttgtcatctaatctggcaacgagatgtaatatcaaatatgtgctatatttagaagagacatagcctgtggttatgtaaaattattcaacctatattgaactatagactgagtttgttctatttgaaataaatattttgtgacatagtatctacttgaggttatcaaaattaccatttcatattaagcattttagaaaaaagtgtactatattatctaattgctattgcatctattttagaaaaatggattcatatttgaaaacttttacaagcaatcttcatgtcagtaagttgcattactctctcagcaagtgtataagtcatcatttaagtcatcatttataaattgatttacattttaatatgccagagggtggctgttgaaaggaatactgtaacaaattgacttgtaagttgaatgatcatcacctaatttatccctttagatccatagcgagaaatatttatgaatgtttctgagttcaaggcacactttggacatagaatttttggaggctaacttataaaaaataaaagactaaaaatgttaagtaggttaacagtgagtataaaacaatcactattaaatttaaagagttgcatggtgaacataaaagcagactcagttatctttttttcatttcatatctctaagaataatgtatctattgagtataacagtttagttccctgactacatgctacaattcactactaaggtactatatttctaagttccaggaaataagcatttgtatctgcttttctttaatcctatgctatgtctttctttcttatttatagcaagccattccctgttccacagtacaatgatttgattggccaagcagtgctatatttaatagacaacattctaactgtatgtatactgtacttaattgtagcaaaaacacattgtgtacacttgagataaagcatgttaattgaggatcagtaactaaaatgtttgtatagaccatgtgttttaatcaacaaattcctttgaggttggagtggcttctacttcttgatcactatccaactaaaattaactttcagaaacattagataattatagaaataaacatcaaaatgttacacacaaataarctgaggatacaaataaatccaccaagaacatatatattgctttgcaaattagtattaaaatataattgaattgattaaacatatttctgagcaattgtatatgttttccaaaaaataataatcaaacttttagtcaccttccatgaaaatattagatgtcttctcaaatatgtatgcaggaatatgattttatctaaagtatgtacagtttagattatttggaaaacacacaattcagatcttgttctaaaaattgcattgtggaaagcttctcctctctttgaatccaggcttggctatgtgacttgtttggccactgagacattagttgatatggaagcagaatcaactaatgattctgaagtgtgaaacagcttctgaaatggggctcactatctagctgaatgtagtatccttatatcatcgtgtgaatagcctgagcccccctgatgaggagtccatgtagaaaataacatgtggcactgtggctgagagtgggccagctgcgtggtatgtgaataaggacctcccagactgtcaggccccagtaaagccaccacctgaccagaggaatcagctaaaccagcatagactaaaagaaccattagccatccacagaattgtagaaaataataaagattcattgttttaagtcactagattttggattatcttttgcacagcaagagttgactgatgtattattggaatcaaatagacttaagtataattcttgggtaaaatactagtaatgtttccctacagaaatgctgacattatctgaaagttttctattctgaaaaataaagaggcaaaaaattatgttagaatttttctatataaattaatgcaattgtggaaaaagtacttagtactatacctggaacatagtagatatgtaattccaacacttctatttaaaaaaaccctcaaagatagctaaataccatgtcttaaaaaagagaaacagaataatctaaggaattttttaaatttttataatttatatatttttactgtcagagactgtcctttctgggtgttaatctggaatgtttcaaggtttaaaaaaagaaatgtggaatttgttagtgaattttccaataaggtatataaaattaataatatatgattattatactattaatgtaaatataaaaattgccatatgattaataaggtaggaatataaaactaataatgctatgtaatttctttatcattttatcctttttgaactcttctgtatatgtgtgtgaaaaatttactcatcaacgctcttaatcatataaaacagaacccactcagtttggttatttcattgactaatcctaagtaaacaaaataaaatttctttaaacagaagtagggattagcaaaataaaagaaacatatgtctagttagacttaggaatatattaatgggaggctttaatgattagaattatggagagaaatcccccaaaaagacaaaaactatatttgaatatataaaatcaaaaaatatttgtaagtttaaaatgtttttaagtttaaaggcaaagcgcaagttgggaaaatagttttgatgcattagtaaatttattaattgaccaaatatttattatgtgcttgccctgtgccagttacaataatagttcagaagaatccagtgaaaactgatacagacatgacagtttatagtgcagcattcattcactttgtcattaatccattaattccatgcttatttagcatatttattaagtttctacagcatatcaggtactgatatagttgctggacattcagtggcaaaaaaagaaaaggcatggccactactctcaaggtactatgagaggaaaagatatgtattaaataataaaaacacacaaaaatgccatgaaagaagtaggaaaaattaaatggcccacaacataatggttgagagctaaggtaggagaaaaacagctctcccacagttcctcagatggtggtgtctacacagtaagagtggatacttcctttggtttggtttttattttggttgagtaacagattctgtatttctraaactaggaattgttgwtggagctgagtagaacctcttcctacttatttcctgaatgtgaaatgttttgtttttgcaaataggtgtgcatagtccacatcatgaatatcagtccaatttcttctacattctaattgttcctcaatctttagcatgtcttagaatcacaaagggcttgttaaaatatcactgagccctatttccccagcgtttcagattcagcatgtctaaggtgggatcctacaagttttcatgtgtaacatgttttcaggtgttactggtgcttctcactcggagtccacaggttgagaaccactgttctagttagtgacaagtcctctcagacacttataaaggctcaaatgtcatgtttttgttaaagaatattaattttgctttcctttatcaacatcattgggaacattttaataaatacttggatgaactacaaggaaagggtacctgacataagcctaaaccagaagtgagtacagaaatagaatttatttggcatgcctgtattgatttgcttatacaaagctaaagatgacatgaagcttaaggtgggagtgaaaatcaggttggagatgaatcaatgttgacatccatggttgaaacatttttataaatcattaaaaatgaataaaagtgattaagttcctatcatttgtaatagctttagactaagtaacatttaacttaaaatacaatttcacttctaaaattatctacttgtataacttggttgagtttttcataattctttagttataaaatctagacttgtcaagcaattgattaatgcattttaatttgccattttcagctgcttattttgtaaattttaaatgtggtagtgtgtaaatttggactgcttttggttaaatcaataacaagtcaatgccattttgggtgaaatcattttgaacttttaaatcagtattttgaacttttgcataatctaccatctcgtatttaccagtcattgatagattttcaacagatcgtagtccacaaattttatgttgctctgacttctggttgactttcataaatttagtctgattttatacaaagtaattttgatatctaaaacatattttcactagctaaagtgcatttaataatgttgcaattgaagactttgttggaagcatttcttttctcagtctatattggattatgtctccctatagagaacaacatgaaggataggaaaggtgttgtatatttatcttactttacaaaaccttacgtttgggctcctttaacttagacctttagtgttaccataggtaacttcaatgaacaatgtcttcaaaatcaactctttgaaacaaccttcctgtttcaatctgaaaatcttgctttgagtatgtatggtaaggataggccaagtaaaaatatgactgcttaaatatttgagatacctcacccacccttgtgtacctctagatggatgttttgttcattgcctattgctgcctaataagttgcctcaaattcagtggcttaaaaggaaaacgaacatttattatctcaaaatcattcaaaatttaaaaatatgaattcccaaattcaaactgagtggtttcagcttagaatttctctctctctctctctctctctttttggagatggagtctcactctgtcactcaggctggagtgcagtggtgcaatctcggctcactgcaacctccgcctcccggcttcaagagattcttctgcctcagcctcctgagtagctgggactacaggctcgtgccaccacgcccagctaatttttgtatttttagtagagacagggtttcactatattggccaggctggtctcaaactcctgacctcgtgatctgcatgtctcggcctcacaaagtgctggaattaccggcatgagccaccgcgcccagccaagcttagaatttctcatgaggtttcatccaagatgttgaccctgatacagtcacattgaggcttaacctgggctgctatacctgctttcaacatggctcaaatttaattgcctgagaaatgattgttagttgtttttgggaatcctcagtctctcaacattttgagctgtttttagggctgctggctttctccagaataagtcatccagcagaagctatggtggaagccaccatgactttaaatacctagcttcagtagtcacacttaatcaagatggattaaaggcttaaatgttagacctaaaaccataaaaaccctagaagaaaacctaggcattaccattcaggacataggcatgggcaaggacttcatgactaaaacaccaaaagcaatggcaacaaaagccaacattgacaaatgggatctaattaaactaaagagcttctgcacagcaaaagaaactaccatcagaatgaaaaggcaacctacagaatgggagaaaatttttacaatctaccaatctgacaaagggctaatactggaactacaaagaacttaaacaaatttacaagaaaaaaaatcaaacaacctcatcaaaaagtgggcaaaggatatgaacagacacttctcaaaagaagacatttatgcagccaacagatacatgaaaaaatgctcatcataactggccatcagagaaatgcaaatcaaaaccacaatgagataccatctcacaccagttagaatggctatcattaaaaagtcaggaaacaggtgctggagaggatgtggagaaatagaaacacttttacactgttggtgggagtgtaaactagttcaaccattgtggaagacagtgtggcgattcctcaagtatctagaactagaaataccatttgacccagccatcccattactgggtacatacccaaaggattataaatcatgctgctataaagacacatgcacacgtatgtttattgcggcactattcacaatggcaaagacttggaaccaacccaaatgtccatcaatgatagattggattaagaaatgtggcacatgtacaccatggaatactatgtagccataaaaaatgatgagttcatgtcctttgtagggacatggatgaagctggaaaccatcattctcagcaaactattgcaaggacagaaaaccaaacactgcatgttctcattcataggtgggaattgaacaatgagaacacttggacacgggaaggggaacgtcatacaccggagcctgtagtggggtcgggggagggggaagggatagcattaggagatatacctaatgtaaatgatgagttaatgggtgcagcacaccaacatggcacatgtatacatatgtaacaaacctgcatgttgtgcacatgtaccctagaacttaaagtataataataattaaaaaaaagtttttagaatatatgaaaaatataaataaaaatgaaataacctattaaattatgcatacgcagtagttatgagaaacaaaacatttatttccttatataaatgtattccactttgggccaggcacagtggctcatgcctgtaatcccagtactttgggagaccgaggcgggcagatcaggaggtcagaagatcgagaccatcctggctaacacggtgaaaccccacctctactaaaaatataaaaaattagccaggcgtggtggcgggcgcctgtagtcccagctactccggaggctgaggcaggagaatggcatgaacctgggaggtggagcttgcagtgagccaagatagtgccactgtactccagcctgggcgacagagcaagactcttgtctcaaaaaaaaaaaaaaaagaagtattacactttgagcacagacaccataacgttaatatgaaatattttatcagtaaaagaatatgagttaagccctagatttcagcttctggtgaccccagctgataacaccttacctattccaaaacaggtatgtttaaactcatcaggcattactgaaagatccaatccctccatgtaaactccatcatgagatcctctggactgtagtgcctggtgtccagccattgcagtcctcacagactctcatgaagctattctttccttggatccctgccaacttgagaataatgtttctcaaaatgcttatgtttctcctgttgaatatctaattcctctcttcttaactctgaaaaatcaatgccatcctggctgtctatacagtactttggccagttccctaatcatatcgcctcatgtgccttctcatctcagactctgatttaagactttttaaaaattaggctttcaaatacaaataaattttttattatttatttatttgtttatttatttattgagatggagtcttgctctgttgcccaggctggagtgcactggcatgatcttggctcactgccacctccacctcccaggttcaagtgattctcctacctcagcctcccgagtagctgggattacaggcgcccaccaccacgcctggctaatttttgtatttttagtagagacggggttttgccatgttggccagcctggtcttgaactcctgagctgaggtgatccacccaccttggcctcccaaagtgttgggattacaggcatgagccaccacacctggcccaaaaaaaattatttgtatcaaccaatgttcacctttaagtatggatgtatattcatgtacatggctctagaatcatcaatgtcaagaataaaatagtatttattcattgtccccaaattagaggcgttcactcaacaaatattaattaaagttctactgtgtgccagaaattgttctggacaggagaaatataaggacaatcaagtgagaaatgactcctgaccgcacagggcatgcaaaactgaaattaagcaccattattattatttatttcttcacttttttttcctttttggttgaaaatatatataattttatatggtaatctactgagttactatcaatactgtgtatcatttactattaaagagacatttacttttataactaagttaacaagtatgaaaaagccttaactgttgttttttttttgttatactttaagttttaggatgcatgagcacaacgtgcaggtttgttacatatgtatacatgtgccatgttggtgtgctgcacccattaactcgtcatttaatgttaggtgtatctcctaatgctatccctcccctctccccacaccccacaacaggccctgatgtgtgatgttccccttcctgtgtccatgtgttctcattgttcaattcccacctatgagtgagaacatgcggtgtttggttttttgtccttgcgatagtttgctgagagtgatggtttccagcttcatccatgtcctccctacaaaggacatgaactcatcattttttatggctgcatagtattccatgttgtatatgtgccacattttcttaatcccatctgtcattgagacaagagtcttgctctgtcgcccaggctggagtacagtggcactatcttggctcactgcaagctccacctcccaggttcatgccattctcctgcctcagcctccggagtagctgggactacaggcgcccgccaccacgcctggctaattttttatatttttagtaagaggtggggtttcaccgtgttagccaggatggtctcgatcttctgacctcctgatctgcccgcctcggtctcccaaagtactgggattacaggcatgagccactgtgcctggcccaaagtggatacattatataaggaaataaaggtttgtttctcatactactgctatgcataattataaggtattcattttattataatttcaatatctaaaactttttttaatattataactttagtcagnnnnnnnnnnnnnnnnnnnntttaagttttaggatgcatgagcacaacgtgcaggtttgttacatatgtatacatgtgccatgttggtgtgctgcacccattaactcgtcatttaatgttaggtgtatctcctaatgctatccctcccctctccccccaccccacaacaggccctgatgtgtgatgttccccttcctgtgtccatgtgttctcattgttcaattcccacctatgagtgagaacatgcggtgtttggttttttgtccttgcgatagtttgctgagagtgatggtttccagcttcatccatgtcctccctacaaaggacatgaactcatcattttttatggctgcatagtattccatgttgtatatgtgccacattttcttaatcccatctgtcattgttggacatttgggttggttccaagtctttgctattgtgaatagtgcctcaataaacatatatgtgcatgtgtctttatagcagcatgatttataatcctttgggtatatacccagtaatgggatggctgggtcaaatggtatttctagttctagatccctgaggaatcgccacactgacttccacaataactgttgatttttaaattttaattttattctcaagaaagaacacatgggtggtatattttctacaaatttgtctgtgtatggcaggtctctgctggatagaaaattattgaatcacaatcttttctgcttaaaactctctagaaagtgtactattgtcctcaactaaatttttgtttctctattgataaccattttttactacctgaatgcttaaagaggttttattttatttataattttcagcataaattattcatgacttctggattttgtttgattatacaatgaatccccttaactgaagactcattttaagtttagtaaagttttaaattatcatatctcttaaaatatgattttatttccttttttcaaaatttttattaagaacctacctattagcaaatgactatgcttccatcaaggatccatgtcttaacaggaatacatgacacttacacttccaaaggttagattgcaaatctatgtcctttatgaactgtggaattcatattatgtaaataatgattataggtgactgttatagtatccagatatgtgttttctttttcctttgtctaacaaagtctctttagtggaagacagtgatgaggttataataatgaaaaaattaaaggttagctggaggtgtatgctgccatatccacaagactgtgtattaacatggatggttctttaaagtagtcatagaacttttgcattttatatgcattgtactcattattatcttttaaatttctaatgtttcattatagttgtatacaaatgaattacatttaattaagtagataatcgtatcagtatttcatcaacaaaatactgacaagattaagaaaacacataatgaaaatatctacaataattttatgtatgttttgtttacacatctcttttgaattcaaactttcatacaaataaaggcttgaagagtataattactaacaaaactaactgttctccaggatagggcaaaaacaaatgtgataatcccaaactccaaattcacataggaacaatttatgtaggtatttgcatttctggatgccttattagtgatttcattggaatgctccaggaggattaattgtttrgatttgtacaagttctttttaaaagtcctgttgaaggaggtttctcattatataatgtatcactaactaaaactccctttttggcaagctgataaaaaagtaccttagctgttrtgctgtctaattacaggactcaaacctaacaattggaaggggaagctgagtgaatcagctgttaactctctttaaatgagatttatctatacttacagacagtgaacacagggtttaaaaaactttaatacataatgtattgttaagattgtactgaaaatcagacatgacattgcattactctattctgaagaaataatttcatttaaaaaattgtagacaaatataatctgtttatcttaattgttaagaattataaaacaaaaattatgatgtgtgaaaattaatattggtaaaacgtgtaatgtttcatgttgctttaattgagttaaattaggtcatccattttatgcgtgaaatacacgggtcattggcaaataatattagtttaaataaatatgttaaagatgcttttcaagcaacataattactatgatatcaataattagactgcaaatgctttcactctaaattatgtattcacaatatttcatttgttgtttgctttgtcttcacaaatgaacttctagttaaagatgagcttatatttagagtattttgcatgaaattttttcctagatattacctctgtatttttcttttgaagataagaagaaagggaatcagttggattggaaccattatttgaataggtgtatttcagtctaggagtcagggaggccttgctttatttatttgcaaacataaagcagcatacaaaacccagagctcctacacttcataacaaaacaggggcagaataaacagaaatgaaaagtaagtgagagttataattacatctattatgaagcaaaaaccattgaattgtaaatttgtaagattgattctctagggcaaaatgaatttgaagtcaaaagacatagttactatccatggttatttgttctgtaactatgggcaattattcaatttctcctggcctatttaaaggaaatgacaaaaatctacttcataaatatatggtgagagttaaatgaggtaacatattgtaaaatatttaaagagatttattctgagatgactgtgtgaaccatgaacaccaagaagtactgagaacatgttcctaaggtggttggtgtacagtttgatttcatacattttatggggacagaagttacaggcagacatcaatcaatacatgtaaggtatacattagttcagttcagaaaggcaggacaactcaaagcttatataggtcaggggtagattcaaagacttttctgattggcaagtgatttaaagtgttaagttattatctaaagacctgaaatcagtagaaagaagtgtggggttaaaagaagaggttgtaaagaccaaggttttgattatgcagatgaagcttccaggtagcaagcttcagagttcttatcagacctaaaacggtggcaaactctcttggtgaattgtctctggatcaggaatggacctgaaagggaaaggggattctctacagaatgtagattttacccacaagtgacagctttgtgaggccatttcaatatatatcaatgaaatatattttgaagtaaaatacctcaacttccttcagggcctactatctgtcatgagatactattcaagaatgaaattggaatttggtatcttattgctacaaagagtctgctttgtcagtcttaagatctctgttttaacatttatgctggtcagttgtgcctgaattccaaaggaagaatatataatgagaaatgttgggggtgggtggtgggggtgcttcccatcatgacctgaactagtttctcaggtgtactttggaatacccttggcctaaaggggggtccatcagtcaattgtgtggcttagaattttatttttgtttatatatatagatatataaagttataattatgtaatttaattaatgtgtgtatatacaataatgtgtgtatatagtagtatatagtacatagtgtgtataaataattataatttaattaattatgtatatacatacacgcacacacacatataaatgcctatctagtacattttagatattcaatatgactgttaaaaggatctgagatactggaaaatttcagtgtcagagtagaagagccaaactagaattcttgggaaaaaggtacaagcaggcccaaaatgaccttatgagaaataacttttgaacaatccaagtgactccttctccacagaatgggctatattttaagctaccaagagcttcagtagaaagttgtttgaaaaatgggtgacaacgtttctgagattatagaaaggaaactattagatgaactaycagactggaagagtagctcatcaagattcctccatttgtagatttgatggtttctgaacggtttgtggctgactactttgcagttaaacatttattctactataaaaaatgttgctgtatcgctaaaagttggggttctggaatccaaattaactgtgtttacattctgacatggccagtttatgattatgtgaatctgtagaaattatataacctatctgaggcttagttttcttatctgatatgtggaaaataacaatttttttcaaatggttaatgtgaagataaaatagtgcatgttaaagacttagcagaatgcctagaatataataaatcgtctctgtaattgtcagagttttattattattaatctatcagcttggtataactgagaggtcaaatctaactctatccaaatctctatgtgagtaaacatgataaagcaaagtgtaaaaatatcatgactaaaaatgacaaaagattgagcaataagttacctatcaaaaaataaatacataaaatggcattcatattaaaatgtagttgtccccagattgccagcctttaagatgcaatcttatcagaaccatatttaataggttgtttctaaatccatactattgccttaatttacagctagttaaactaaatttaatacatgaggcagtaacagcttggcaaatacaattggactattcaaaattattctttgaatgcctttttgccttttaactcaccaacattgtctttggcctttgacctgcattaatttatgctcccagaaaaattactgtggtgtacaaattttctacattgttaaaatccatttctattctatattaagaaaaacctactttgtctttagttaaaaatttcttagagcattttattctggaagatttacactgtagataactaaatttatttgaattcatttttcttagatctaacaataattttgagttacctatcaaaagataaaccttattaggtatttataactgaataagtgttatatgtatgaatccacagattgtctaataatagtacaatcaattatcactactagtagttacagttctgttcactgaaatacagcttatagcttattgtcccacttaacgtcatttaaagtataggaatttcagtcacttaatttaatgcccccaaaattatcctattcctaagttaaagaatctataaaaatgactatgataacttgactgatattcttattttaaaatagaagtttgagtatttagaaaattagtgtaaatttgcaatttaccaattagatgattccatagagttgactaatccattagccaatttgtaaagccagttgtttaagtttcattaattagcatgccaatatactagggatttcatgtttattaaaaaagtattttttaattttaaagttaaaattgttaccaaaacctatataacaaactcaaaatattaacagttaagtataattaaaataaaatattaaatgatgaaaagtaaatagagcattttgtttgtaatgctacctaacaaaaaatctgcaaacatgaaataaaataataaaataaaataaattgcatctggcttgagtctacaaatcatgtgttgtggagagtgatttcataactgaatggatgtaaagtctgaaaaaaagtggcttcaatataatattgtaaacttgagaagtttgagagttaaattttaaatatgcaatttgctgtcttcattgttttgactgctaatgaaggaaagggcaatcagtaaacaagtgaagccctttaccaaatatggctttagtgaccacaggcaatacctagcatcaaacagggaagcaaattggtagtcataggagactgctgtgcattgatgtgatattcattgaggctaaaaccaatcagcaaccaagccattctgtaccccgtgaagtctataagtggtttccaggggtaagctctttgagtgcacatttgaataatctaatttggattttcaaaagtagaggaaatgatggacagatcacatgctaactggcactgttccataaattgcaacacaaagactgtcatatctgaaatagtttatgatgcattttttaaaaatgaatgttgcataagctatttgttatggtacaaagataaaatttgttgtcaatgctctactattttatctaaaaacaagtttacatcatccatgagtagttggccaatgcccctttctttttgagaataatagagggggctgctatccttaccctcaattaagcatgtgtattattttgaaagactgaaaatttacagattctcatgtattatgcattgaacttggctatttctatctatgtaagatatatgtatataacatttgctgtacatagtgtatatatggtacataatagacatggtcttattcctaatggagtatatattatttcttcaaatggattggaaaagaagctatattgaagcctttagcaggacagtttcttctttcattggattcctaggatggcattcttgattgagaaatagtgaacaaattgtttatgttatatggatttgttcaggctactatattgctttttgaaacatgagtactttgttgaactaatgtgtgtctacattaagtactaacataaatatcaaacatgtaaatcttctggaaaagtaggagaccttagaaaattaaagagtacaacaaataaggtatgatttagtttgctaagttacctgcaagagttagtgttgcttttaaaagcatactatttatttttagggaatatattcattttatttatttctaaggagtacataatatgtctttgcttcatctttaaggaaaggagaatggttagcagcatctactagaaaagaagtgggatagaaataagattcagaggctatcttcctaggggatagatgaaatatttattcagtttagatgtttgaaagaaaataagcaaaaatcaaatatatagaagtctggagaattaggtaaaagtgagaactagttgctaatgccaaggattataaggggtttaggtttcaaggcaggactctagttataaggaacaaagaagattgcataacaacgaccagtcctaagtaaagaataaattttaatagacagctatataagttaatacattcagtcgtccatatccacagttctgcatctgaatattcacccaattaaagattgacaatatttttaaaactaaataaattaaaaaagatacgaaaatgtgaaataatataaaattttaaatacattaccacaaccatctacacagcatttacattttatttggcattttaagtagtctggagataatttaaggtatgtgagaggatgtatgtagacaatatacaaatactatgccattttatatgagacttgaacatgtacagatttttggtatccatgaaggactcctggaatgaatccctcatggataccaagagactaccatatatattctaaggaaaattccagacattgtgtacacaataaaaaaactaaaaaataataataatctgtagcctttactttggaagcttctgctatggaaacataaaaaaaaggaaatcaaaaaccaaaacaaattactagacctagaaggcaagttggtggaatgattgcaggcaataaaatcaatgatgggacttataacagagatatcatttaaaataagtttggcagtgcagttaataagagatgataaacgatttgttcatagctccttaaatcttcccttaaagaaaaaaaaattgcctgccactgaagcaagtgtgaatgtctgggtttgtggtttaaatagacaaagaactagttgtcaagagtgtattacatttcctacagtgtccacagagggaaaagagaaggtggaatgctcatactggtgcttactcacattactgtaataatggtatggtcttcaggtgcagtgaattgcctcatacccaaagataagagtgacatttaatcaaaatgtatactttattcaattacacatgaactttatgagtggagatacttctcgccaagcacataatctagaaatgaaaaaagttattttataggccaagagcaagtttggtatagttaatgcacttgcccctttggatcatgaccaaggctagaataccaaagaaaggaaaaggaaaaccattcccatttttgttgttgttgtttttaccctaacacctatctggttgtctgtgtcaaactggagaagtgagttttaatgtattttactttgaatattcttttagtggtttttttttcaacttttattttaagttcaggggtacatgtgcaggatgtgcaagtttgttatataggtaaatgtgtgccacggtggctttttagtgttaattaatgttttttgcatcactttgatgtgatagcttcaattatcaactgtcaaaagctgattatcagtcagaagaaaggaaagagttaaatgaggagtgaaaggaaaataaatatatgaacaaaagggctgaatcatacactaaagtcttaaatcattaagaatatcttacaaaaaagtgaaggacttatgattatatttttctaaaacagaaacacaaaattttcacattaacatttgtattttgtttaatttttgcataagttcatattgttcatgaaattaattttctaccagtcatcagcaaaatatacaacactttaatattaataggatgcattatgatatatttctaactttctatactaaagaaaaattacatttatatacagtatatttttatttggcctaagtacataggaagaagaaagataatatttaaatctgtctattgaatatttttgttttctagaaaagcaaatataacttatatgaggattttaaaacacttaaagatataaaatcccttgtctctgagaaatagagtgaaactgtgagtacattgagtccatctctgttttaaattaatggttattttgtggccatgcaagcttgagaccaacattataattacttcactcacaacatcatagcaataatcttctttacttttgattatataaaaatacataaattatttcattttaaaatgttttcaaatgtatttatgcagcattattctcctagaaagttaatgttttatagaaaatgaaatgaaattatattatgtgagatcatgttatctttaatcagctttaatgaactataattcacacatgataagatatatactttttatgatttttaacatttatttttattttaccatctttaccacatttaagtgtacagttcagtggtgataaatacatttacatttttttcttcatcacctgcctcactttcagccttgtaaccaccagtctactctatttttatgaagtccactttttagctaccacatatgagtgagaacatgtgatatttgtctttctatatcagtagcgtttataaatacaaatagcaaacaatttgaaaaagaaatcaagaaagcaatcccatttataatagctacaaacaatataaaataactagaaattaatccaacaaaagaagtggaagatatgtataagaaaaactagacaactctgatgaaagaaataaaagaggacacaccaaaaatggaaagatattcaatgcttatggattggaagaattaatattgttaaaatgacaatagtaacccaaagcaattcacagattcaatgcaagccctatcaaatcactggtgacattcttcacagaaatagaaaaaaaattctaaagtttatatgaaaccacaaaataccccaaatagacaaagcaggcctgagcaaaaagaacaaagctgtaggcattacattacctgacttcaaatatatgacaaagatacagtaataaaaatggtgttgtacttgcataaaaacagacacataggccaatggaaaagagatacaaattcatgtatttacaaccaaatcattgctgacaagatgccaagaacatacaatagagaaagaacagtattttcaataaatgttgctggagaaactggataattatatgcaaaggaatgaaactagacccttatctctcattatgtacaaaaatcaaattaaaattaacatctggcaagatggccaggtgccactagatccagccaggtgaaacagctgccaccaaaggacccagatgacttgtgcactcataacaaatattcagaaggaatgcaccaagagtggacagagggaagacacagaagttggactgaaggaggaggaagctgggaaccctgcacagggctaccacacactgggactcgttcctggcccccaacaactccaggacaatgggtgaattgaactggcaaggaggaacccactctcgccacaggcctctagaattccagcaggaggagacccctgcaccaccatggacactcgagttggcagggagagctgcttagagaagttgtaggggcagcaagcaagctgatatggaacccaaacggtttggtgtgtgaacatctgtagtggtgcatggccagcgatggccctccccctaggcttaacttgctctcttaggagactttagtcctagggaaactgtcagacctgaactctgcagggcattcttgcccataggtgaggtcagttagcctgagtggtccttgatctgcacacctctcctggggctccagccttgccactcctgcatgcagggcagccttgggttccctgggggcctccatcatagattctgaactactagaccattcctgaccagcagagagctccagcagggcagccctcatggccacacaccagctgacctgctctgtcctcacactgcagcttcccaggggcccatggaaaccctccatatcactttgtgtgtgtgtgttgcttttcttgctccaccagtgtgcgtgtgtacatgcacgctgccctgccactgctgcagcaggagtgcagtttactccccgccaaccctcctccccctaccaaccaatggcagttggaaccttggtgggcacagagccggccaaccctgctcctgccagcaccctgcccttgtaccaacactgccatgggagtgaaactaggcacagagaacagcagaccctcccccatcctgagcaaccacccttgcccaacagcaccgtccctgtgccaacaccacctgactccatgcacagttaccagcaggaactcccctccctctgccaatccagccacatttattgtatccaccactgttttgaataactgcatggaggcaggcaccccagcacctgctggccccctgccatagccaacaagtgtacatgctgctgcattgccactgctgctggcacatgcgaatgaggacggatcccactgtcactacagtatgaaatcctttggctgacactacccatcagagcatagtggccagcagtctaggagactctcagtcccaaaccttccaacagtgcagtggattcctaacctcaatgatccagtgaacaaagtcagggcccaatacaagctccctagagttagagcacacagtccaggagttgggagctgagtgttggtcccataaaatcttccagaaataaagccagtcagctgaatccaccttataccacaatcaaatccttaatgttgtcaaatacgattaaaaaagaaaaaaacatgcaaaggtcagcaacttcaaagattgaaagaacataagccctcgaagatgagaaagaaccaatccaagaaccctgacaactcagaaagtcagaatatcttttttcctccaaacaaccacactacctctccagcaagtgttctgaactgggctgagatagcttgtagtagtccatttttacaatgctataaagaatgacctgagactgggtaatttataaaggaaagaggtttaatcaacttccagttccatgtgactggggaggcctcaggaaacttacaatcatggtggaaggcaagggggaagcaaccaccttcttcacaggcagtaggagagagaggatggtgggagggaaactgccaaacacttttaaaccatcagattttgtgagaactcactcagtataatgagaacagcatggaggaaactgcgtccatgattcagttacttctcaccaggtccctcctctgacatgtggagattacaattcaagatgaggtttgrgtgggtccacagagccaaaccatattatagttgaaataacagaaacagaaytcagaatatcaatataatcgaatatcattaagatgtaaaagtatgttgaaacccactccaagtaagttaagaatcataataaaacaatgtagaagctgaaggacaaaataaccattatagaaaacaatgtaactgatctgatagagctgaaaacacactataagagtttcataatgcaatcacaagtattaatagcaaaatagatgaagcaaaggaaagaatctcagagcctgaatactggctttctgaaataagacaggcaaaaaagaataaagaaaaaaataagggaatacacgaaacttctgggaaatgtggaattatataaagataccaaatgtaagactcattggtgtccctgaaaaagaaggggagagtataagcaatttggatagcatacttcaggatatcatccatgagaaatttcccaatgaaactagagagaccaatattcaaattcagaaaatccagagaaccccagtaagatactccatgagaagactaaccctaagacacataatcttcagattctccaaggtcaaaatgaaagaaaaagtgttcaaggcagctagatagaaaggtcaggccacctagaaagggaagctcatcagactaacagtagccagagtagattgggggccaatattcaacatttttagaggaaagcaattccaacccagaatttcatatctggccaaactaagcttcaagagtgaaggaaaaataaggtccttttcagccaagtaaatgctgaggacatttgttagcaccagacctgccttactagagctcctraaggaagcacataaatatgagaaagaaagaacattatcagccactacaaaaacaggctgaagtacatagacgtgtgacacgataaaacaattacataaacaagtcggcagaatcaccagccaacatcatgatgacaggatcaaattcacacatatccataccaacctggaatgtaagtgagctagctatatgacccaattaaaaggcacagaatgggaagctggataaagaaccaagatctctttgtatgctgtcttcaagagactcatctcacatacaataacacacatagtctcaaaataaagggatgaagaaaaatctaccaagcaaatgaaaacagaagaaagcagggattgccaccctagtttcagacaaaagtgactttagagcaacaaatatgaaaaaagacaaaaaggggcattaaataatgataaagggttaaattctacaagaacacctaactatcctaaatatatatgcatccaacacagtagcacctatgttcataaagcaagctcttagagaccttcaaagagacttaaactcctgcacaataatagtgagatgctttacaaccccactgacagaattagatcattgaggcaaaaaattaacaaagatattcagaacctgaactgagcactgcatcttacatggacctgattgaaatatgtggaactctccccactcccaaaacagaatatgcattcttctcattgccacatgtaacataatataaagttcatcacgtggttggaagtaaaaccttcagcaaatgcagaagtactgaaatcagaacagccaatctttcagatcacagcgtgatcaaattataaatcaagactaatgaactcactcaaaaccatatgtttacatggaaattgaataacctgctcctgaatgacttttgggaacataatgaaattaaggcagaaatcaagaagttatttgaaactaatgagaacaaagatacaagacactagaatctctgagaaacagcaaaggcagtattaagagggaaatttatagcaccgaatgccaacatcaaaaagttagaaagatctcaatttagcaacctaacatcacacacaacacaaagcacaacacacaacatcacacacaaaactagaagacaataaataccggaaatcagagctgaactgaaggagattgagacacagaaaaccattcaaaagatcaactaatccaggaattgtttttttaaattaatgaaacagatagaataccagctagactaataaagaagaaaagagagatccagataaacacaattagaaatgaaaaagagaatattaccagtgacctaactgaaatacaaataaccctcaaacaatattatgaatgcctctatgaacataaacttgaaaatctagaataaatgattaaattcctggacacagacatccccagcctcctaagactgagccaggaagaagttgaatcttgaacacaccgataatgagctccaaaattgaatcagtaaaaaatagcataccaaccaacaaaagtccaggaccagatggattcactactgaattttaccagatgtacaaagaggagctggtaccgttcctgctgaaactattccaaaaaattgaggaggagaaatacttccttaacacattccataagaccagcgtcttcctgataccaaaacctggccaagatacaacaaaaaaagaaaacttcagactgacacccttgatgaatattgatgcaaacatcctcagattctggcaaacctaatccagcagcacatcaaaaatcttatctaccatgatcaagtagactttatctctgggatgcaaagttggttcaacatatgcaaatcaataaatgtgattcattacataaacagaactaaagacaaaatcacatgattatctcaatagatgtggagaagaattttaataaatttcaacactctttatgttaaaaactctcaacaaactgggtactgaaggaacataccccaaaataataagagccatatatgataagcccacagccaacatcataatgaatggacaagagctgaaagcattcctcttgaaacctgtcacaggacaaagatatcctctctcaccactcctattcaacatagtattagaagtcctgagcagagtaattaggcaacagaaagagataaagggcatccaaattggaaaagaggaagtgaaactatcccggtttgcagatgacatgatgctttgtctagaaaaccccatagtctcagccccaaatctccttcagctaataaataactttaacaaactctcaggataccaaatcaatgtacaaaatcactagcattcctacactacaacaacaatctagccaatagccaaatcaggaaggcaatcccattcacaatcaccacaaaaagaatgaaatgactgggaatacagctaaccaaggaggtgaaatatctctacatggagaactacaaaacactgcccaaaggaaaaaaaggaatgacaaccaaatgggaaaacattccatgctcatgaataggaagaatcaatgttgttaaaatggccatactgcccaaagcaatttatagattaaatatttatatattaaatattattcttattaaagtaccaatgatgctcttcacagactagaaaaaaaattaaaaattcatatggaaccaaaaagacaaacaaacaaacaaatacgaagcctgaatagccaaggcaatcctaagcaaaaagaacaagtgtggagaaatcacattacccaacttcaaactatactacagggctacagtaaacagagcagcatagtactgctacaaaaacagacatatagaccaatggaacagaatagagaactcagaaatacggccacatacctagcactatctgatccttgacaaggctgacaaaaacaagcaatgggtaaaggacaccctattcaataaatggtgctagaataactggttagcaaaacgaggaagattgaaagtcggcccctttcttacaccatatacaaaactcaactcaggatggattaaagacttaaatgtaaaatctaaaactataaaaacccttgaagacaacctaggcaataccattttgggcacaggaacaagcatgtattttatgacaaagttgccaaaaacaattgcaacaaaagcaaaaattgacaaatgggatctaatttaactaaagagcttctgcacagcaaaagaaactatctacagagtgaacacacaacctacaggatgggagaaaatattgtcaaactatatatctggcaagtgtctaatatccagcatctataaggaacttaaacaaatttcgataaaaaacaatttctttaaaaagtggayagaggacaagaacagacatattttaaaagacatacatgaagcaaacaagcatgtgaaaaaagttcaatgtcagtgattatttgagaaatgcaaacttaaatcacaatgagataccatctcacaccagtcagaatggctattaataaacagtgaaaaaaataacaggtgcttgtgaggttccagagaaaaaggaatgcttatacactgttgatgggaatataaattagttcaaccattgtggaagacagtggttggtaattcctcaaagacctaaaaacagaactaccattccacttagtaatccaattactgagtatatgcccaaagaaatataaattattctgtcataaacatacatgcacacatatgttcattgcagcactattcacaattgcaatgataaggagtcaacctaaatgcccatcaaaggtagactggaaaaagaaaatgtggtagatatacatcatgagttagatactatgcagccataaaaaagaatgagatcgtgtcctttgcaagaacatggatggagctggaggccatcatccttagcaaacagatgcaagaacagaaatctgaacaccacatattctcacttataagtgggagctaaatgatgagaacatatgggcacatagaagagtatgaagcacactgggacctattggagggtggatgacaggaggagggagaggatcaggaaaaaataactaatgattactaaccaggcttaatacatgagtgatgaaataatctgtacaacatacccccatgacacaagtttacccatagaacaaatctgcacatgtactctgcacttaaaataaatgttaaattaaaaagaaatacattaaagacttaaacataagatcaaaaatgataaaactactagaaaaaaacattgggggaaaatcccaggacattgatctgcacaaatattttttgtgtaagacctcaaaaacacaggcaacaaaagcaaaattagacaattgggattacatcaagctaaaaaatcttatgcacaaagaagaaaagaagtaaagtaataacccacagaatgggagaaaatatttacaaactatctgttggatatgggattaataaccagaatatataaagggctcaaatagcaaaagaaaacaatgcagatagtctgatttaaaaataggtaaaatatttgaacatacatttctcaaaagaagatacacaaatggccaataggtaagttaaaaaataatcaacatcactaatcatcaaagaatcacaaatcaaaaccaaaatgagatatcattacaccccagttaaaatggcttgtatttaaaaagacaggcaataacagatgctgggaaggatgtagagaaaagggaaccctcatacacggttggtaggaatgtaaattagtacaaccactgtggagaacagtatggaggtcctcaaaaactaaaggtagaactgccacatgatccagcaatctcactactgggtatatatccaaaataaatgaaatcagtatttcaaagagatatctgcactcccatatttattgcagcactattcacaatagccaaaatatggaatcaaccaaagttctcatcaatgtatacactgaaaaagaaaatgtattatgtatacacaatggaatgttattcaatcattagaaaagaaagaaatcctgtcatttgcagcaacatagaactggaggtaattatgttaagtgaaaataaacacattttcagtaaacattttgataatgtctgatgaattttatgcacttgagcaattaccacaatctagtcataaaaatttcgatctcaccaaaaatttccttgtatttcttttcagacaatctccgccttccattcagacttaggactaggcactactcacctggtgtttttctgaattaaatttgtcttttctagaatggcatataaggtagaataatgcaatctgtattcctttatgtttggtttcttttcagtggcacactattttattgattcatccattttatgtgtgtcaatagattttttttttaatttttactgctgagtaggatttcattgaacagataagctacaatgagttgggaattttcctcctgacagatgtttgacagatgtttgcttccagatgtgactttactgaatatgcctgatagaagtagtagtgtgcaagtctttttgagcaattatactttcttttttcatatggaaaggcctaggaatgggtaggatgagccatactataagcatatgttaaactttctaaaagctcccaaactgtttgccagagtggctgtatcattttgyatttctgtcagcaatatttaagtattctggtttctttctatcctcttcaatatttgctattgaattttatgagtttagctattataatgggtagaggtatctcactgatgtgctaatttgcatttcatgtatgagaaataagtttgaacatattttcatgtgattagtgatgatttatatagcttattttgcaaagagactttaaatattttgcctatttctttactttgtcttattatttactttcaagttatatatgtatattttgtacaaaggtcaaatatacagaatcctaggctgtgacttgatttgtattttcttagtagtttctttcggagaacaaaagtggttaagttttatgaagtcaactctattcatttttttgttgttgttgttcatgcagttggtgatctacctaagaaatcttcaagtattccaaatgtaatgaacagtctgactcattattttaatggtttatttgacagtttttaggattcacttctcatcttgccccatatttctgcaggttgataagaaagcttgcatgttttcttctttaacacggggaaagttcaaagcaggcctgaaagggacccctatcctttaccccactgtctcaccaccataaaaaaacacaaagtcggccgggcacggtggctcacgcctgtaatcccagcactttgggaggtcgaggcaggcagatcacgaggtcaggagatcgagaccatctggctaatacggtgaaaccccgttactactaaaaatacaaaaacaaaattagccgggcgtggtggcgggcgcctgtcgtcccagctactcgggaggctgaggcaggagaatggcgtgaacccgggaggcggaacttgcagtgagccgagatcacgccactgcattccagcctggggacagagcaagactccatctctaaataaataaacaaacaaacaaacaaacaaacaaataaataaataaaaagtcactttgctctgctctcaaaacctattttggaaccatagtgctaagtttgtcctggttttcccaggagcctcattatatgagtaataaacctttcatagtccagggatatgtgtggtattgttagacatttgaaccaaattttaggtgagggtcagttctgattcttgagtggttacagcaccaaagatagtaatatttttttttgtatttttttctgaaagttttaatagttctaactttatgtttgaattgatggtccattttgtgttcagtatatatgtgacatgaactaagtgtatatgttcatttttattgagatataattcacatgtcataaaactcactcttttaaaatgtacaattcaatggtctttagtatattcacaaaactgtgtggccatcaccactatctaattccagaacattttcatcaacatcaaaaacattatatggtaactctacctttaacattttgagaactaccaagttattttccataattgctgtaccattttagactcctgcttgcaatgtatgagggttataatttatccacatccttgctaacacttgtgcatcttttttattatagttatcctcgtaggtgtgaaatggtatctcattgtggtttgatttgtatctctcaaatgactaatgatgctgctcttttgtcttgtgcttattgacatttgtgtataatgtttgtcttttgaatgttaagttgaagtagttgtttatatacgtctttgatttttaagctattataatgggtagacagaggtatctcattgttgtgctaatttgcacttcatatatgagaaataaggttgaacatattttcatgtgatttttgattaaattgcagcagttgtttatataagtcttttaacagatacaggatttgcaaacattttctcctattttgtggcttgttgttttacttttttgatgggatttttcaaggcagaaaattttataatttttataaagtacagtttgtctatttttccttttattgtttgtgcttttggtctcatattagaaaaaaaattgcttaaatcaaggtcaagaaaatggactcatttttctaaaaaagttttagagttttagcacttacattttggaatcttatctattttgagtttttgtttgtttgcttatttgttgttttgtttttggatatgttgtgagttagaggtcaagcttggtattttgccatggataactagttgttccagtactatttgttgaaaagactattctttcctccgctgaattatcttggcatgcttatcaaaaattaattattataagttcaaggatttatacttggaatctcaattatacttcatagttttatgtctatcctaatgcaagcaccatgtcatcttgattactgtagctctcagtttttaaatcatgtagtatgaatttttctatcttttattttcaagattgttttgaatattctgggtcccttgtgtttctatgtgaattttagaatctgcttttcagtttctgggaaaaaaaaatgttggctaggattttgataagaattgctttaaatgggccgggcgcgatggctcacacctgtaatcccagcactttgggaggtcgaggtgggcggatcacgaggtcaggagctcgagaacatcctggctaacatggtgaaaccccgtctctactaaaaatacaaaaaaaattagctgggcgtggtggtgggcatctgtagtcccagctactcgggaggctgaggcaggagaatggtatgaacccgggaggcggagcttgcagtgagctgagatcgcgccactgcactccagcctgggcgacagacagagcgagactccgtctcaaaaaaaaaaaaaaaaaagaattgctttaaatgtttataacaatttaggagtattgccacttttaaatcttctgatccatgaaataaaatgctgttttctttatgtcttccttaactttttcagtgatgttttgtagctttcagtgtacaggttttgcgtagttatttctaagtattttatttttgattctatttacattgattgttttcttgttacttttcaatttttaaaatagaaattttaaaaattccatttttaagttgttctttgctagtgtataaaaatataattaatttctgtaagttgattttgtattgtgcaaccttgctgaatttgtttataagttattatatgctttttaaattctgtagaatttttttgtataccagattgtgtcttctgggaagagaaatagttttgcttctttcttttcgatttttcatttcattttcttgcaagtggctctggctagaatttctagtacaatgttcaataaattgagtgagaaatgaattattttgtcctattgctaatcttaagaggaaagttttcagtcttttatcattaagtatcatgctagctgccagatgtttgtagacagcctttatgagaatgaagataattctgtgggaggctgaataattgtccccaaatatccacatcctgattcccagaactcgtgaatatgcttcatttcatttcatttctgctcaawgaacctcctttgtatgtcttttaacacaaatttgctaataatatattctctctgttctcatttaatgcatgttttaatttctccttcatatttgcaaaataattttgctgaaagtagaatttttggttgataatctttcagcaccaaatgtcatctcactgccttctgactactagagattatgatgaggtattaggttttaattttcttaaatgtgataggcacaataatggatctccaacaatgttcacattctaatctctggaaccaatgattacatgaagtttcatgagaaagaacagttaaagatacagatagaattaagaatgctcatcagctgaccttgaaatggagagattatccagcattatcagagtgtgtccaatgtagtcacagggttcttttatctggaagagaaaggcagaagatagagagtcagagagatttagcagcatgagaaaaactgaaacatattttgctggttttagtaatggaagaatgaggcactgagtgaagtaatgcagggggcctctaaaaactgaaaagggaaaacatgcagattatcccatagagcctcaggaaggaatacaggcctactgacaccttgattttagccaatgagaccaattttagatctctgacctttagacatataataaactcgtgtcattttaagccacgtagttcatggcattttttaaattaaagcagtagaaaaatgatacagatccccctctggcaaggtttgttgttgttgttgattgtttccttagtgactttactgaactaattctgttaactttgtattttttgtcctgtatggctacagaaatttctgctcagttaactaaattgtaagctactaattggacagagatttcttaaaatgcttttatacagtaattctccaaatctctactaagccggggttgtgtgtgtgtgtgtgtgtgtgtgtgtgtgtgtgtgtgtgtgttggtgcatggcttcattcaacacttaggcagctgacaactctgctttcactttctgcttgcacttcctgcttgtcagatgatgacaattctctagggatttggcttttgagggcttcaaatcctttatgccccctttcgtaactgctaggctgctgattttcacagctaccttgtttgtggaactgttgttttctaaatctaatgcacagctgaagagaggggataaaggcaagttaaaatgccatataactcacttttcttacaaagattctgttattgtcttccttaagtaaatattccaagactttggctcatttccagagttctgaaaaagttgattttggccatttttgctagtgttgtcattgctgttatgaaggtacagatacttgaaagtctctaccattcccattgataccaccctaggttcatttttttcccatacagacattcagttgttctggcactatatgttcaaaaaactatcctttcttcatttgctttcctcagttcattgattgaaatgaatggattctatatgtatggctttatgtttggactctgttctgccagcatccataaaactacagcaggctaacttattagcgtgcaagaagagaagctttcagaccagtcaggaaaagtctgaaatggagaccatctggaaccattcagacatgaagaaatcattttaggtacatcatctgcttgtcgtccttcagatgaaccctaccattaaccttatatttaacatgaatttgagtcatgtggtattgaatggatagtaactatttgttgctacttgccatattttcctgtaaatatatttaaaatccaagaacttttaaatgaatatctcatgatttttaagtataatagttgctgttttacttcttggttttgtagttaatcttacttcgtaactattaaaatgcaaagtattataagaattgtggggatacatacatacacattgcaactttaattggctctctcaagttaatattctgctgagagaaataagaataaatataaataactagtgtgtagcattatgtggcaaatgtcacaggtttaccattcccagtcagctaactcaattctgtttttctcattattttttattagagtaggaacatttaatatgagatctaccctttaaaaataattttaaatatacaatacagtattattaactataggcatgaaatacagcaaatctttgaacttattatcttgtataactgaaactttctatccattgaacagaaactccctatattcctctccctcttatcttctggcaaccaccattctaccctctgcttctgtgagtttgactcctttagatacctcatataaatgggatcatgcagtatttatcctgtgactggctaattccacttaacataatgtcttccaggttcatccatgttttggcatattgcagaattttcttgttttattaatagctgaataatactccattgtatgtatatcacatttgctttgtccgtttatacatcaatggacaattaaaaatttccatacttcggccattatgaatgatactccaagtatcattcatagatagaatagaagtgcatggaagtgcaaatatctaatcaagatcctggttttagttattttgaataaatatacagaagtaggatgttggatcatatggcagttatattttaaaatgtttaaggcaccgccatactcttctccatagcagttgcaccaatttactttcccaacgatagtgtacaatgctttcagtgtcttcctattcttacccaaatctgttatttaataatggtagtcctaacaggtgtaaggtgatatatcattgtgagtttgatttggatttccctgagaattaatgatgttaagtatctttttatatacctatttgacatttgtatgtcttctttggataaatgtttatgggagtcttttcctctttctttaatagtgtactttttttgttttgtcctttttttcttgtttgtttctgcgattgcattgtaggttttttaatatattttgaatataaatcctttatcagatatatggattgcaaatattttctccaaattcataaattgccttttcaatctattaattgtttcctttgcggtgcaaaagatttttagtttgatgtagccccactggtttatttttacttttgttgccaatgttgttagtgttatatccaagaaactattgctaagaccaatgtcatgaagctttccacttttgtctctttcaaggattttgttattttaagcctttatttacatctaatccatcttgcattgacttgtgtgtgcggtgcaagaaacaattccaatttttttttccatatggatatccagttttctcagcaccatttgttgaagagactattccttccccattgtatattcttagcccccgatcaaagatcagttgactgtatatttgtggatttatttctgggatctctattctgttccattggtataaatgtctgtctttatattagtacaatgctgtttgaattactgtagatttaaaacatgtcagttacatttttatatacgaacactggacaatctggaagaaaattaagaaaacagttygatttataatagcatcaaaataataaaatacttaggaataaatcaaactaatgagctgagagacttatgcactgaaaacggtgaaacattgatgaaagaaatattaaatgcgtcccagagattctggtatgttgtgtctttgttctcgttggtttcaaagaacatctttatttctgcttcatttcattatgtacccagtagtcattcaggagcaggttgttcagtttccatgtagttgagcggttttgagtgagattcttaatcctgagttctagtttgattgcactgtggtctgagagatagtttgttataatttctgttcttttacatttgctgaggagagctttacttccaactatgtggtcaattgtggaataggtgtggtgtggtgctgaaaaaaatgtatattctgtcgatttgaggtggagagttctgtagatgtctattaggtatgcttggtgcagagctgagttcaattcctgggtatccttgttgactttctgtctcgttgatctgtctaatgttgacagtggggtgttaaagtctcccattattaatgtgtgggagtctaagtctctttgtaggtcacccaggacttgctttatgaatctgggtgctcctgtattgggtgcatatatatttaggctagttagctcttcttgttgaattgatccctttaccattatataatggccttctttgtctcttttgatctttgttgatttaaagtctgttttatcagagactaggattgcaacccctgcctttttttgttttccatttgcttggtagatcttcctccatccctttattttgagcctatgtttgtctctgcatgtgagatgggtttcctgaatacagcacccagatgggtcttgactcttcatccaatttgccagtctgtgtcttttaattggagcatttagcccatttacatttaaggttaatattgttatgtgtgaatttgatcctgtcattatgatgttagctggttagtttgcctgttagttgatgcagtttcttcctagcctcgatggtctttacaatttggcatttttttgcagtggctagtaccggtttttcctttccatgtttagtgcttccttcaggagctcttttagagcaggcctgttggtgacaaaatctctcagcatttgcttgacaacccttcatgctaaaaactctcaataaattaggtattgatgggacggatctcaaaataataagagctatctatgacaaacccacagccagtatcatactgaatgggcaaaaactggaagcattccctttgaaaactggcacaagacagggatgtcctctctcaccactcctattcaacatagtgttggaagttctggccagggcaattaggcaggagaaggaaataaagggtattcaatcaggaaaagaggaagtcaaattgtccctgtttgcagacgacatgactgtatatctagaaaaccccactgtctcagcccaaaatctccttaagctgataagcaacttcagcaaagtctcaggatacaaaatcaatgtacaaaaatcacaagcattcttatacaccaatagcagacaaacagagagctaaatcatgaatgaactcccattcacaattgctacaaagagaataaaatacctaggaatccaacttacaagggatgtgaaggacctcttcaaggagaactacaaaccactgctcaatgaaataaaagaggatacaaacaaatggaagaacatttcatgctcatgggtaggaagaatcaatatcatgaaaatggccatactgcccaaggtaatttacagattcaatgccatccccatcaagctaccaatgactttcttcacagaattggaaaaaactactttaaagttcatatggaaccaaaaaagagcccccatcgccaagtcaatcctaagccaaaagaacaaagctggaggcatcacgctacctgacttcaaactatactacaaggttacagtaagtaaaacagcatggtactggtaccaaaacagagatatagatcaatggaacagaacagagctctcagaaataatgctgcatatctacaactatctgatctttgacaaacctgagaaaaacaagcaatggggaaaggattccctattaaataaatggtgctgggaaaactggctagccatatgtagaaagctgaaactggatgccttcctcacaccttatacaaaaatcaattcaagatggattaaagacttaaacgttagacctcaaaccataaaaaccctagaagaaaaccgaggcattactattcaggacataggcatggtcaaggacttcatgtctaaaacaccaaaagcaatggcaacaaaagacaaaattgacaaatgggatctaattaaactaaagagcttctgcacagcaaaagaaactaccatcagagtgaacagacaacctacaaaatgggagaaaattttcgcaacctaactcatctgacaaagggctaatatccagaacctacaatgaactcaaacaaatttacaagaaaaaaacaaacaaccccatcaaaaagtgggcgaaggacatgaacagacacttctcaaaagaagacatttatgcagccaaaaaacacatgaaaaaatgctcaccatcactggccatcagagaaatgcaaatcaaaaccacaatgagataccatctcacaccagttagaatggcgatcattaaaaagtcaggaaacaacaggtgctggagaggatgtggagaaataggaacacttttacactgttggtgggactttaaactagttcaaccattgtgaaggtcggtgtggcgattcctcagggatctagaactagaaataccatttgacccagccatcccattactgggtatatacccaaaggagtataaatcatgctgctataaagacacatgcacacgtatgtttattgcggcattattcacaatagcaaagacttggaaccaacccaaatgtccaacaatgatagactggattaagaaaatgtggcacatatacaccgtggaatactatgcaaccataaaaaatgttgagttcatgtcctttgtagggacatggatgaaattggaaatcatcattctcagtaaactatcacaagaacaaaaaaccaaacaccgcatgttctcactcataggtgggaattgaacaatgagaacacttggacacaggaaggggaacgtcacgctctggggactgtcgtatggtgggggaaggggggagggatagcattaggagatatacctaatgctagatgacgagttagtgggtgcagcgcaccagcatggcacatgtatacatatgtaactaacctgcacattgtgcacatgtaccctaaaacttaaagtataataataataaataaaaaaatattaaagacacacataaatggaaagacattttaatatttttaaaatgtccatactaacaaaaacagtctacaaatccattgtaatctctatcacaatgtcaatgacattttctacagaaatagaaaaatcaatcctaaaatttgtatggaaccacaaagaaccctaaatagccaaaacaatcttaaaaaagaaaaataaggctgagtcatcacacttcctgatttccaaatatattttaaaactagaataattaaaactcaattttaaagaagtactgatttagctgttttgctcaaagattcagtaaactattgccacaataatattgcataagagggaaaccccaaaatttatatgactttcaaaaacatttatatcttgcttactcatttgaaagtgagctgatttcttgctcaccaatgctttcttcagctgggcttggctccacatgaggggttaaatgcattttacttcctgtgtctctaatctgctttggacaagtggcaaggaaagcatattcttcacagggttaatgacaaaaaactagagaacaaacccaaacactcatcttatttaaagtcttaggtcacctcttattcataaatatcccactgggcaaagcaagtcagatattcaaacctcaagtcaaagcacatgcccattttccttacatgaagccaaataaaggttacataacaaagctcaatattagtggaatggaaaacatactcttcccatgcaggtgcacgtatctgtgtattatgaggctaagaagtggatattagatgaataatagtagactatatccactctcggaagtaaaatcttttctgtattttctagatgaggttcactgggtcagatagttttcttacaaaaactcagagagacatttttatctcagtattttctaaaagttgtgttaaaaattagtgcaaatatgttgtttgccataataactttaaaaatagtacttctaacagacattgtatgtcgaccacctgacgtcaagatagcctcatttttctttgtcttctaattctcagtctcccaagcattcttttaagatggccacatttcacaatcctggtcaataacattttggctaaaatctctaagtaaagcttccagcttgaaacaacttttaaaggaaacttacgaagaagattttaacctttttccttagccttaccccttctttctgccttcatctaacttaaatgtcatacagccatctttgaacgctaaagttgaaagctgcctaccaaagatgcttgaagctaaaataaaaggactctggattttgatgatatcatggaactactagactaattctgcatttcttgatccacaaaaatcagatatatctatgtggttaagctattggaagttgggctttttattattgtggcctaatgtatttatatgtaataaaccacaaattaaaaacaggtttttcatcattaatgtctaattatcttcaatgaataacagtgtaagggattttgtagaaatatctactttctctttcctaaataaattttgtgaaatgctgtaaattttaaatcattcaatgtctactgcttttggtctgtgggtcccaggacattctttacttcagtcagattctctttcagaaattcccaatctctgccaataatttctggttttctttgatttccaagtctttaaaaaatatatttgtttatttatttacagacaaggcaaaacaaaactttcatttacctattattttgaatggttatctttctatttgtatcagctggggatagcacttgacagtagactcctatagacaggaagagtggttctatttggagtaggacttgaacatgaattttcgtttaatcacatcgtagcaactgtgacagaggctgtgagatttcccacagaaacagttttctcatctctttctgacaaaactcctaacctttcactggatacatgatccactggcttaaagattgcatctaccagatatccttaaagtttgatgtggcagtttgaccaattactggcttgtatctaggagtaaatgatttgtcaaacatcttggatgtgtcattattaggacatggtatgacctgttgcctttccttttcctgccttcttctgtttaaaatctagatttatttaaagggccctattttgggccatttgtttctccctaagaatgatgaaagagaaagttgtaaagagtctgtaaaggtgttggagatatctgaccaggactaaattacatgtatgtaaattttagtatgctagagaaatacatttctatcttgcataatccaaggttatctccagtacatacaaatgaacctaagtcatagtaaagacaaagacctttactcattttctttaaaattattaaatgtgttaaataacttccttagctacaaaacttacaaggtatgcttaaccatttcacatcttccattatactctgctgttatagatattccacatggaaaaataaacagatgagaaagaatttatttaggaagagggaagtgctgaactttgaaagatgacatttgtgctgactctggtttatgtatgtatagaattttaggtgggcctgacttctggcctcacctaaactggcatatcctaattacatttggaaattggatgttaaattaaacctgatctacggaattttcttgatcatgtgctggagccttattcatcatctcctgcattgagaaaggaaatggatatggaagactagtatctgaattctatcttacatagtttattatggcttgtatctgcttgcattaggccagaaagcaaatatctagccaggattttttttttcaaacaattgagagtagtcatgaagccattaatgtcctctgagaaaggttcagaattagattctctaggaattatactttaaatcccatttttaaccaggcgttatcactggcagatacttgacccatagtgaggaaccacagtgatgctaaggaaaccacacattgaaatgagtgtgtgacacttgctaggtcttctgtgcaattatgtatgtatgactaagatattgtatcctttaactaattaataaaaaatagattggctgggcgccggtgtctcatgcctgtaatcccagcactttgtgaagccgaggcgggcagatcactaggttaagagatcgagaccatcgtggccaacattgagcaccaacatgagcacctgtagtctcagctactcaggaggctgaggcaggagaattgcttgaacccgggaggcggaggttgcagtgaactgagatcatgccactgcactctagcctaggcgacagtgtgagatgctgtctcaaaaataaaaaaaaagattgttttcctatgtatatgttgtcctcctattaactaacataccttgctggaaagaagggcaatgtatcccagtgattaagagattggattctgaatttagattgactggacttttatattggcttggagtttcatttaaaggttttgagcagaggaacaatctaatctgaattagttttgtttttaagtaaacattttatgaagtgtatgtatacatgcagtagcttgtttatttttactctatattctatcacttgttaatactcaaatgtatacattctactgtagatggacatttgggatgattctagtttttcattactatggataattgcttctatgaatattctagcacatgtctttacacacacatatgtaccaaattttttggttatatgcccaggtgtggaatttctgagtcataggatagtgcattttcagctccagcagataatgacagggttcaaatataccaataatatatgaaactgaaaattgttctacatcctcactaggtattgccaagtttttaatttttgccattctgaagatttacagtggcatctcttcatgaaggtagtgtccattaatttgatgactatygaatttgagcattttttcttaggtttgttggccatttggtagcctacattttaaatgccttttcacattttaagtgccttttcacacttcttttatatcatcaattgtctttatttttcttattttgtaggaaggttttaaacgtaagttgtttgttgaatatataaatttcaaaagtcttttccaactgtggatttttataatgaaatttatttttttagggaagctttaagtttgtagcaaaatttagcagaaaattgagcagaactcatatatatatatatatatatatatatgagcagaactctatatatatatatatgagcagaactcatatatatatatatgagcagaactcatatatatatatatgagcagaactcatatatatatatatgagcagaactcatatatatatatatgagcagaactcatatatatatatatgagcagaactcatatatatatatatatgagcagaactcatatatatatatatatgagcagaactcatatatatatatatatatgagcagaactcatatatatatatatatgagcagaactcatatatatatatatatgagcagaactcatatatatatatatatgagcagaactcatatatatatatatgagcagaactcatatatatatatatgagcagaactcatatatatatatatgagcagaactcatatgtatatatatatgagcagaactcatatatatatatatgagcagaactcatatatatatatgagcagaactcatatatatatatgagcagaactcatatatatatatatgagcagaactcatatatatatatgagcagaactcatatatatatatatatgagcagaactcatatatatatatatatgagcagaactcatatatatatatatatgagcagaactcatatatatatatatgagcagaactcatatatatatatatatgagcagaactcatatatatatatatatgagcagaactcatatatatatatatatgagcagaactcatatatatatatatatgagcagaactcatatatatatatatgagcagaactcatatatatatatatatgagcagaactcatatatatatatatgagcagaactcatatatatatatatatgagcagaactcatatatatatatatgagcagaactcatatatatatatatgagcagaactcatatatatatatatgagcagaactcatatatatatatatgagcagaactcatatatatatatatatatgagcagaactcatatatatatatatatgagcagaactcatatatatatatgagcagaactcgtgtatacatatatatgagcagaactcgtgtatacatatatatgagcagaactcgtgtatttatatatgagcagaactcgtgtatatatatatgagcagatctcgtgtatatatatgagcagaactcgtgtatatatatgagcagaaatcatgtatatatatgagcagaaatcatatatatatatacatatatatataacttcaccctccaaacactgctttccccgtgccaacaactagtaatatgtcatatgcttgttacaatggatgaatcaatactaatatgctattattgaccaaagtccacagttaactttgcagtttgctctgtgtattgtgcagctctatggattttgacaactgtataatgttatgtatctgccattatagcaacatacagaatagtttcagtgccctaaagatcccctgggttctacctaatgatattttcttccttcaccccaaccccctggcaaccattgatcccttttccgtctccatagttttgccctttccaaaatgtcacagagttgggatcatataatatgtatcattttaggatttgcttctctcacttatgaataggtatttaaggttttcccaagtctttttgtgacttgacttatagggtttaatttttcaataataattccttcccaataacattccatatccatcaaatgatacacagactgttcattcatttaccttttgaaggacatcttgttgaattatgtttcattattttaatggtgtctatcatgagtcctaattttaaaggtttccaatttgtcaatcttttctgatgtaattrtgtgttttttcctaattatgacacttttacactgttggtgggaatgtaaattagttcagccattatggtagacagtgtggcaattcctcgaagatttagaaatagaaatatcatttgacccagcaattactgggtgtatacccatggaatataaatcattctgttataacgatacatgcacatgtatgttcattgcagcactattcacaatagcaaagacatggaatcaacccaaacccccatcaatgatacactggaaaaagaaaatttggcatatatacaccatggaatactatgcagccataaaaaggaacaagatcatgtcctttgcagggacatggatgaacctgagagccattatgctcagcaaactaatgcaggaacagaaaaccaagcactgcatgttctcacttataagtgggatatgaacagtgagaacacatggacatgacatagggaggggaagaacacacactggggcctgttgagggagggtgggcgggggaagagcattaggaaaaagaggtaatgcatgctgagcttaatacctaggtgataggttgataggtacagcaaccaccatggtacgcgtttaactgtgtaacaaacctgcacttcttgcacatgcactttagaacttaaaataaaataaaataaataacaatacatgtgctaagggggaaaaacaaataaaaataatttttaaaattccaatgtaatgaagataatttcctttgttatcttctagaaacatttctcttcttctctttttaatatattttttcccatactatcaactcagaatgtatttttgtgtatagggtaatgtagagttcagaatttattctttttccaatgtggctatacaattaaacaagttttattattaaggagaccatcttctttctgtgtggaagcttgctcataaatctggagaatgtatatgcctgttccagaactcccatcaaggcagtatgcaaggagttaaattttatcaaaagacttcttatgtatagcaattatactattatctatttcatttttcaatttgataaattacttaagctgcttttcacatgataaactaagattacattcaagcaataaatcaaattcgattgtgatatttttatattttcctgaattcaacttgcaaatatttatttcagatttttgtgtttatattaatgcaaaattctgacctgtaattttgatttcctgtaatgtctgtatccagttatgaaacaaagttatataaacatcattggataaagtaaacagtacatcctattttcttttgtcacaaagagtttgcataaattggtggattgtttcttccttacatgtttgagaaggttctctgtaaagcaacctaaacttgaagtttactttgcagaatgatttgcatttatatattaatgtatttaataaataaaggattatttctatcttctctattttactatgtcacttatattttgcctttcaaaagaaatttttcatttaatataaaatttaaattattggcataatttttaataacgtttaatctattcagccataggatatttacttatatactgtctttattctgaattttgatagtgtatgctctcatgtttgctctctcctctctctctttctctttgggaacaccttgttggattttatcatttacataaataaatctgatcttagtattatttactttattctacttttttggatctaatttgctgtgtgtgttctaagtttttaatatatgatatgtgtgtgtgtataaatacacatatatgtatacatatatatgaatatagatattcaccatacatacacacatacatgtatatatacacatacatacatagatatatgtgtaatgaattcagcaatttttttttcatttccgatgcattgaaggctgtaacattgcctctaagctttggctgctctctgcatgttttgatatgttgaaagaatgcatatgctgctgctttctactttgtctctagacccacctttcatagaaattggtaactcttgatgggcaaaaagaagaaaaagccccacttccttccatatgtttgtcttctctccatgatcctggaaacttcatttttggctgtatatactctctgatacaatcaaacatttttgaagaagtatttttatttctcttctctagttgttcaagagtgtatgatattttaatctaaactactgtgtcacagtcaaattcagaaattctaatttctgactgacagatgacaatgaattgtgataactagaatggaaaaatgagaattattagaaagtgattgtaccagtccaggcaaaaatattgaggtaccattaactagcaatttaagcagaaaggtgacaaatagttggtttggggatatcttttcatataggtctggcagaattttttaggtgttaaaaaaaaagagacgattgagagtgattccaattgtttttgccttaagccaaagagaggttttttgttttgttttgttttctcacttagacccagtttgaaacaggttctcccatcatagagacaatatggctatagcagttttaccttcagtaacctctgtgttgaaatatatatataggtgtatatgtgtgtgcaagcatgtgtgtattatagagtatgtatatatattgtatatataatcagatataaataaccaaatatatatatacatacacacacacacataaatatagttgagcctttaacatccccaactkctgtacagtccaaaatccacctgtaacttttaaccccaccgtaacacaactactaattgcccactgtcaatgaaggcttattaataacataaacagttgattaaagcatttttatatgttacatactgtattcttaacacaaagtaaaataaaaaagacaacatttctaataaaattataaggaagaaaaaatacatttacagtacttccactgtttatttacaaaatggattctcttttggaaatggtgagcagctgcaactgcagtcttcaatctatagtgcatatcaagcaattcaccttttttttgtaatgtcttgacttctctcttcttggcagtacttccagtatcactagtgatttcttatacgtcccatgatgttattcgatgtttacagttttgcgctaagcacaataaaaaatacacaagaatcatgagagatcactttttcctgtaatagtgcaacttactgaagaggtaaagtggtcatgtggagataattagcatcaccaggcattttaagtggatacctgctacacttgagctcaccacaatagcaataggagctggctataagtacagtatgctacaattaattttatgcagttattatttattactgcatctgtacacttgattacattgctcttgattgcaaatggcagccaggtatggtctgtaaatgtttgtgtaagttttgataaattttacttttgtaatagatattgtgtatatttgatggtactaaatgataaaatagactaatcttacatatattttatgttttcatgcatgccttgctttttctgaatttttctgatatttgtaggctacacagttcacctgtggtttttttaaactgttgcaaatcttcacaaaattttccaatgtgtttattggaaaaaaatatacatataagtgaacctacatagttcaaacctctgttgttcaagggtcaactgtatatatctgattaggttggctgcatatacttgagacaattgccataatcagggactttttaaaataagtctcaaatagaatatacaaatgagaaaagtagggaaaaacaaatgccccaaagaaagtattggtgatattgcactcagaaagaggaatatgtgcttacgaccaaaatacaaacaaaaatctactacagtaatggcacataaaatgttcataagcacaggttagaataaagattattcaaaaaccaaaaaagattatataatataatatataaagattatatatataatatatatttataatatatattttatatattatatataatattatatgtgtgtgtgtrtatatatatatatatatatatatatatttaggaatttcatgagaaaattagcaatctggtaaaggtgaaaaggccagttttttgagaaaaagcatttgcatagagctatagcaattgaaggtgaaaaataagcaaaataagcatcaccatgctaattggaaataatggggcacaatacagtcaaacttcatgaaaaggtaatttgttaaaggaacatgtactttcatgttggaaatgtaacctgagtcctatgcatcctggaaacgccataaagttatctggtattatgagaatgggtccagcatactctgagagtgccctgacactgtcatatattttatagcttctagctttactgtctagaaatgaaggcattcaatatggttgggaaaagggggtcaaaatccatttctggtaaagaggaatttgattaggtctgaacacattagcactaaatcaatttatcaatgagcacaataaaagtaacaatttccttgtttttaacattattattcaagtactatgctgtaaaatattgataaaggcaatttctatattcaatttcttctccttgtcaaagcatcaaaaacgctgctttaactttgaaatgacatggctcacaggtatatactccaaagagcctaatttatcactggttaattctttggattattttcttagtggcaacttggttttgttaatgacataaatcatgcagaaaggaattaagtaatttaaaatcaattacaaggaagtacacattttgaattaaaaataattttaattaactaagttcttagcaattgtagccatctggattttattgaaaatatttgcatttttgtaatatctaaagttgaaaaagctatgtattatgtgtttaaatttttaatgtctttttacctttaatttgaaactgtaaatagaggtgataaagtttaattatattttccttcttagaataaatctactgatatctgctttcaaattcatatctattagggttcaatatggttttatgggagacccatataggtagtaggtacattttctagtatgaactacagtcattataaaaatactcagagcaattacatgactcatacattatttaaaagcatttagtgatgaacgttttataaaaggctgaatggtgagctcaattacactgagccaattatagaagtgtttttcatagtcagtgtttaccttttaatagaacattatgtatatataaatatttattgtatgatcttccatgcaatcagatttgttaacaatttttcaaatatatagcttctctttcttgaaaacaacacattttgaaagaacaatcaaacacatttatctcatttttacagatattttaagcatttctgaaacattattaaatttattaccacataattttaggtattgacattcatgactctgtataatgtaccttctctaaaaagattgagaaagtgaatctcagtattttcctgtgagagcttatttttttctttgagctaacatgtctgaaatcattctaataattattacgctcattcacattggaaatggcttctgcaagataaktactagggtacaactattagttagagtaaatagcataacaaataggcttaaatatctgaggaggaaaccaatcaaaattcttttattgctcatgtggttgtccgcaagagagccactcaaaacccaggctctgtcctgggtttttgtctttatcactctataggtcccatcatcaaatgcatccactagaggagggaacaattatctaggtcctgctgctgacagcatagaaagacaatcaccgagacagtaagtattgctagggcagaagtcactgtttgggtgctgtagtgaaggaggtaggagttaagtctcaaatccatctccctatccccaaccaactacactcagaggtttatatagcggggcaggaatgtagctacatgtaggaaaacaggaattagggaagggttaggaagaggaattggtaaaaagtaattagggaggggttagaaaatcatgatgggtgaggggtctggcgtcttattgtctggatgtagtcatctggtgagttttagtttcttgtttgaggaagaaactattatgagttactgaggaaggaactcataatacaaaagtaagtttcaagttttaagacatggagggtcaatttctctttattcaaacaactgtaagcatcagttctatgggawaattaggccggtttcaccatccccacaagaacttcctgtaggtatctgctactctttccatctgggatccagattaaaaacacttacagtacaattgaatcaagcagatctgcagcttgaagtggtggtgcctagctgagcccagcctggacacacagaacaccagccagtcttcaaatacaggcataatgcagatgtgaatggcagggccatcctatgcactatagatgtggaaaataaattattattttcatttgccactgagctgttgtggttgtttattacatacaatttctgataggtataattcctatatttatataaaagcaaatattacagacaatgtcaaactctctttgttcttcctttaggtcctatttctttcctccttttcctcgaataagcattcgtatgcagatgacgggggccttcaaaagtaatttccataattttactatatactgtttaaatgttgtgtgtggtctgctgcctatttatcctctcaagagaatatttctgcgttctatacctattgatatgcaaatamatagtttataaagatatttgggtatttctaatgtttagagtgagcagtggttaagagtaactttagtgtatattcttagaagtggaattgctagatcataagatgtgcatattctgcatattcttagaagtagaatcactagatttttagatgtgtttattttcggttttattagaaatacattatattcccaacttcattctttctcattgtcgattatcatctgatggttattcaaacatatcttattactatttctgtttaaatttccctagttatcagaaagctaagaacactttatgttttacttataattcaatccctttttctttgatgaactagttgcctatttttattatttcctctatttctctatttgagttgtctttttgtaagtcaaatgtcagaatgctttgtattttctgaaactaaaattttatgttaaaatatttttccctatctctacatttgtttttaatttcttcctgtagaagattttaaagcacgttttttttttaaatgattgctatggtttgtggggtttcttgcatcatttatacaatgctttctatcatgaaatcacataactaaataaaatatatttctttaatagtctaagttttaaaattatcactattttattattttgatttattgtttgtataatatgtttagtttgataaaaataggagttgtctatatgtcagagagagaaagacatggggctaaaaaataaaattgaaacaaaatctaaaagtttattttttctatactaagtatttgaattttatcaaatacttttatcaaataaaatttgaacaattttagagggctaggcaaggttttttttaataatgtgatataaacagtaacaataaataaaaagttggataaacttcacttcatcaaaattacaacttttgatctttcaaagacatattcaagaatggaaaattgcaagctttctgaaagaatatattgtaaaactatactcagaaaaggggatgtgaatgaccataaaggggcacaaatgaactttttaaggtgaatgaaaggttttacatcttgattgttatggtgattacatggctatacaaaattaccaaaatgtttcaattgtatagttataataggatattttattgtatgtcccatgtaactcaataaagtagtacttaaaaaaagagagagaaaaaaatcgcaacattttcagagatgttgcaagaatacacattctcagcatatgcacaaacatctgtaccctaaacatacggttttctataagcacaggtgctgccattgatgcaggataatttattttattttattttattttattattattatacttcaagttttagggtacatgtgcacaatgtgcaaattagttacatatgtatacatgtgccatgctggtgtgctgcatccattaactcgtcatatagcattaggtatatctcctaatgctatccctcccccgtccccccaccccacgacagtccccagagtgtgatgttccccttcctgtgtccaggtgttctcattgttcaattcccacctatgagtgagaaaatgcagtgtttggttttttgtccttgcgatagtttactgagaatgatgatttccagtttcatccatgtgccaacaaagggcatgaactcatcattttttatggctgcatggtattccatggtgtatatgtgccacattttcttaatccagtctatcattgttggacatttgggttggttccaagtctttgctattgtgaatagtgccgcaataaacatacgtgttcatgtgtctttatagcagcatgatttatagtcctttgggtatatacccagtaatgggatagctgggtcaaatggtatttctagttctagatccctgaggaatcgccacactgacttccacaatggttaaactagtttacagtcccaccaacagtgtaaaagtgttcctatttctccacatcctctacagcacctgttgtttcctgactttttaatgatcgccattctaacttgtgtgagatggtatctcattgtggttttgatttgcatttctctgatggccagtgatggtgagcattttttcatgtgttttttggctgcataaatgtcttcttttgagaagtgtctgttcatgaccttcacccactttttgatggggttgtttgtttttttcttgtaaatttgtttgagttcattgtaggttctggatattagccctttgtcagatgagtaggttgcaaaattttctcccattctgtaggttgcctgttcactctgatggtagtttcttttgctgtgcagaagctccttaatttaattagatcccatttatcaattttcggttttgttgccattgcttttggtgttttaaacatgaagtccttgcccatgcctatgtcctgaatggtaatgcctaggttttcttctagggtttttatggttttaggtctaacgtttaagtctttaatccatcttgaattaatttttgtataagatgtaaggaagagatccagtttcagctttctacatatggctagccagttttcccagcaccattttattaaatagggaatcctttccccattgcttgtttttctcaggtttgtcaaagatcagatagctgtagatacgcggtgttatttctgagggctctgttctgttccattgatctgtatctctgttttggtaccagtaccatgctgttttggttactgtacattgtagtatagtttgaagtcaggtagtgtgatgcctccagctttgttcttttggcttaggattgacttggcaatgcgggctcgtttttggttccatatgaacttaaaagtagttttttccaattctgtgaagaaagtcattggtagcttgatggggatgacattgaatctataacttaccttgggcaatatggccattttcacaatattgattcttcctacccaggagcatggaatgttcttccatttgtttgtatagtcttttatttcattgagcagtggtttgtagttctccttgaagaggtccttcacatcccttgcaagttggattcctaggtattttattctctttgaagcaattgtgaatgggagttcactcgtgatttggctctctgtttgtctgttattggtgtataagaatgcttgtgatttttgtacattgattttgtatcctgagactttgctgaagttgcttatcagcttaaggagattttgggctgagacagtggggttttctagatatacagtcatgtcgtctgcaaacagggacaatttgacttcctcttttcctgattgaataccctttatttccttctcctgcctaattgccctggccagaacttccaacactatgttkaataggagtggtgagagagggcatccctktcttgtgccagttttcaaagggaatgcttccagtttttgcccattcagtatgatattggctgtgggtttgtcatagatagctcttattattttgagatacatcccatcaatacctaatttattgagagtttttagcatgaagcgttgttgaattttgtcaaaggcctgttctgcatctattgagataatcatgtggtttttgtctttggttctgtttatatgctggattacgtttattgatttgcgtatattgaaccagccttgcatcccagggatgaagcccacttgatcttggtggataagctttttgatgtgctgctggattcagtttgccagtattttattaaggatttttgcatcaatgttcatcaaggatattggtctaaaattcttttttttggttgtgtctctgcccagctttagtatcaagatgatgctggcctcataaaatgagttagggatgattccctctttttctattgattggaatagtttcagaaggaatggtaccatttcctccttttacctctggtagcattcggctgtgaatccatctggtcctggactctttttggttggtaagctattgattattgccacaatttcagagcctgttattggtctattcagagattcaacttcttcctggtttagagagttctgtagatgcctatgaggtccgcttggtgcagagctgagttcaattcctgggtatccttgttaactttctgtctcgttgatctgtctaatgttgacagtggggtgttaaggtctcccattattattgtgtgggagtctaagtctctttgtaggtcactcaggacttgctttatgaatctgggtgctcctgtattgagtgcatatatatttaggatagttagctcttcttgttgaattgattcctttaccattatgtaatggccttctttgtctcttttgatctttgttggtttaaagtctgttttatcagagactaggattgcaaaccctgccttttttttgttttccattttcttggtagatcttcctccatccttttattttgagcctatgtgtgtctctgctttcctgaatacagcacactgatgggttttgactctttatccaatttgccagtctgtgtcttttaattggagcatttagtccatttacatttaaagttaatattgttatgtgtgaatttgatcctgtcattatgatgttagctggttattttgctcattaattgatgcagtttcttcctagtctcgatggtctttacaatttggcatgattttgcagtggctggtaccggttgttcctttccacatttagtgcttccttcaggagctcttttagggcagtcctggtggtggcaaaatctctcagcatttgcttgtctataaagtattttatttctccttcacttatgaagcttagtttgcctggatatgaaattctgggttgaaaattcttttctttaagaatgttgaatattggcccccactctcttctggcttgtagggtttctgccgagagatccgctgttagtctgacgggcttccctttgtgggtaacccgacctttctctctggctgcccttaacattttttccttcatttcaactttggtgaatctgacaattatgtgttttggagttgctcttctcgaggagtatctttgtggcgttctctatatttcctgaatctgagtgttggcctgccttgctagattggggaagttctcctggatgatatcctgcagagtgttttccaacttggttccattctccccgtcactttcaggtacaccaattagacgtagatttggtcttttcacatagtcccatatttcttggatgctttgttcatttctttttattcttttttctctaaacttcccttctcgcttcatttcattcatttcatcttccatcactgataccctttcttccagttgatcgcatcggctcctgaggctttgatgcaggataatttcttaactcctttgcaggactcctgacaagggtgcctcatttactcagcccacatggttcaacccctcggaggagggagtgtatgagcaaacaagtgtggcaactggccagcagcttcagtgccagcaggagttaaacttcatgcatgtcccacagtagcatccaggtcagggtgcctgtgatcccaatgccccagagggcatgttacaatgctcttttaggtctgctgtccacagatagcagtgtgttatcagctcaataggccctttgccttgtagtttggggcagctgccctctggcagcaagaggaaagggctagtgtgacagccttttagggtacccacacttggtgtgtcccaaattcttgtgcagtgcccagaggtctctcagaggtcgcatgtccagaggtcacacagatgaactgaaaggtgatgaatgtagagaattttactgggtgatgaaagcagctctcagtggggaggggagctggaaaggggacacgaagtgtaagttgctcttgcctgaagtcaagccacctctctacctctctcttctgaagttaagttgcctcaaccagccactgtctctgaagttaagtcgcttctccctgatatccagctgcttctgtcctctgctggctgagtctggggtctttataggcacaagataggcacagggcaggctgtaggtagttttggaaaaggcaacattcgactggcaaaaagatgttattcagagagcaccagctgggttagagtgggcacacagggatagaagctcccactttgggccacagatttcaagttttttggcttgaaggtggggttttgccagggacccacctctgtctgcccagaatttctctgtctcctattgttaccactctttttaaaataaccacattttttttgctgwtgaaatagaaatttattttaaagtattattaattttattctaccatttatagcagctaatagaacttcaatcatatgatataatgtgctctgatatatcttaatgttaagaaggactgttatgcttgaaagttcttgggtgcaatgttgtgaagaataatctccaactgagaaataatacggttcctcatagattttagaattgaggttcttattgggagaaaaatcagagaactgaagaccactgaaactcttcaagccatttattggaagtgaaatatataaaggacagaataaatctaatttgcttactcactggatagttcaagagagaaaacaaaatctaggacattgtaggtatctgccttagataaattagtgaatgatgttttgtttcattttgggttttttgttttttttttttgagacagggtctcaccctgtcacccaggctggagtacgatgccatggtcaccactcactgcagcctcaatctccctggctgaagckatactcttgcctcagcctcctggagtagctggaactataggcatgtgccmccatgcccagctaatttttctattttttttttttttttgtagaaaacaaggttccactgtgttgcccaggctgatctcaaactcctgggcaacatactgagaattcactatgttgtaggtccacactatcctctcacttcagcctcccaaaggtgttgagataacaagcatgagccactatgcccagccaatattttgcatactgtgtttttattactcttatgttaccactgatttcaggcagctaatgctacctttcttaatctatatcttgtgagttatgaattaaaacgctcttatagtttcaatcctggttttattcctaaatgatttcattagcttacaaataacattccacattcaaaatttatttgtttttattttgatataaacttatgatgttaagaaagtaaggtttattttagacgcaatgtttatttatgtaaaaacaaacttttaacatttatgtcaagctagtaaaattacagaaatttaacaactaaagtaagtctcctgggaaactttcaggaaagaatagtatttagaataaaattggaagcttaattttcttcattgctttatttgtgattgtatttgaaatttcaaatggcataaaagtcaaattaccttaaaatgacatattatgtaaatatatttaaacttaaccattggtagttagaaatakaaaatcttcagacatttgtcaaacacatactaacttcttcagctctaagaaaatcaagaacccctaaaagagcacaattataaacatcaaaattcggaaatacttgttttctaaattggtaagtttatgacaactaaagtcaatagccactccaaaacttacgaataagaaataaagaccaccttccaggagttcaagcaatgcagataattaagtctgatctgcaaagtcaccttttggagcaaaacaatttccagggcttagtcctaactggatacattcaaggaaagaatacatgtatcaaagtggaaagttggaaaactagctctaaggcattatatatcagtatctaaatgtacactagttaggagtaggaatgttctggctcttgtattaatagatctctttcacagagaatgatccctttaaacactggtaccaaatgactccattgctattcaagaaatcatcatttgcttgttttacagagagagaaagacgtgaccatgatagcataattattctgattcttctgtcacagttattgttataaattaaaacgattggaacttcagtttatacaccagtctcttgcaagcattcaattgatatcagtctttcccctgattggtatatccattttaagcactcagataaaactgctttgctgagcctgaaaatttgacgattgattaatttgcagaatccagatctctaggcaaagactcccaatgtttactcactgggtttaactatcaacagactgacgttaaaacactctgtcttttaaacttaaaaaataagaatgttttgtgggcacatgagaagaatatataaactgtgattgttgtgtggagtattctctagatgtctgttaggtccacttttgtgagtgttcagcttaagtccagaatttttttgttagttgtttgcctcaatartctttctaatgccatcagtgaattattaaagtgtcccackattattgtgtgggtgtctaaaacttttcataggtcaagaagaactgattttatgaatctgggtacaccaatgctgggtgcatatatatttaggatagttaagtcttcttattaaattgaacctttatcccttttttttccttcttgattgttggtggtctcaagtctgttttctctcttgtaagaatagtaactcatgctcttttgtgtgtgtgtgtgtgtgtgtgtgtgtgtgtgtgtgtgtgtgtkcatgatagatctttctctgttcttttatgttgaacctgtacatgtcattagatgtgacatggtgctcttgaaaagagcagacagtcgggtcttgtcttttcatagacctttctactctatcctctttaagtggggcaattagaccatttacgttccagggtagtattgatatgtgagatttcaatcctgtcatcatgttgtttggcagttgttttgtagacttgattacataattacttaatagaagagctatgtgcttatttgtgtttttgtggtactgggtattgttcttttgcttccatgtttaaggaccttttataaggcttgtctagcgataatggattcccttaatgtttgcttgtctgagaaggatgttatttctctttcctttatgaggcttagtttggtgggatataaaatttatggttggaatttcttctctttagagatgctaaaaataggccccgatgtcttctggcttgtaaagtttctgctgagattttcactgctatcctgatgtgattctctttgtaagtaacccaacccttctctctagctgctgttaagatttattttccttcactgatcttggtgaatatgatgattatgtgtcttggaggttgttgtcttatatagtacctcacaggggttctctgtatttctcaaatttgcgcgtcaacttctctagaaagattgggggcattttcatggattgtatcctccaatatattttccaagttgcttaccctctcctttctcaagaatgccagggagtaaaatgttgtatttctttacatagtcccatatttcttgaagattttgttcattaaatttcttttctttattattaatttctgagtgagttgacttgaaactaatgttcaatttctgacattcctaatttttggtctattctgctatttatgctacaggctatattatgaaattcttgtagtgattttttcaattccagaagtctggtttgcttctttcttagaatggctcttttttcctcagctcttagatcattttatgggattccttggatttcttggattgggtttcaacttgttcctgaaccttgataagcttatttgtcatccagattctgaattatctgtctgtcatttcagtctggttaagaaacattgctggagaactagcatactcatttggaagtaagaggacactctgactttttgaattgggatcattcttatgccgattctttctcatcagaagctattgttctttgagtttagtatagtctgtaagctttgtttctgagtcctttagaaggaaaagcctttatacaggatttttatttgtggctggattcttgccctgggtgtcacaggtagtacatactggcagaatatttttgatgttgtaatttgaactgtaatctagtagatggtgcttaagagtaatggccagaagatagcctctaaatcagctgtgtggctatattgtatttcattgaattcacagtggtgctttttggtgggctggggaaagacctgaccccactcaccaagcctgctcttgggccttgggggagcctcctctgatcactggtgccatgtccacatttcctttggcaggtgttctgggcatttgggctctctcaggaaaggctgtcgggctgactgacaggtctcactcttcctggaccagccctgtgattggagccacagcccactcccacgccggtccacaaacccacatttctcacccctctcagtgttctgagtgtgggggatcctcccatgctgcatgctgcagccctgagggattgggatcaacactcagctacatccttttgcccctcgagatcagacactggctgtgttgggggatcctaactactctyagcctactgggaaagtactcaggtgggactgcaggcaaagcaccaggttgggcagcagaggctgtactgtgcacatacgtctgtgagagtagccagggaggggccttaagccaggctagcaggcaggggaacatgcagaacagatgtacccagtcctgcaggaaagttggttctgctctctcttggcctggtggccagctggggttagttaaagcttttcagagaaagacagaaagcctctagagaagggtgcctatggtggtgttccactgcagctacctcagaacacagaagctcctcggctctgcagcatgggtctctgtctctgtctactctctgggctgattctcctgtcagttcaaatgtctttggtgtcatggcatctcttgtagctgggatcccagagatctgctgtgagagtggtccacctcaccatccctttactcacaccttctctagaagctgatctggactggaaattagccctggcattcagcaaccctgcacaagatttcatgcttttttgctctttagccacagtgtttaccttgcgtctttaataactcttgttgttttctctctaaatatttgtttaaaatatgttggtgtacttgatattttggtctctctctgtgcaagtggcacttcctggctgcatctagtaggccatcttgtcttaacatcaagatcactctaatgacaccagggagaatggctggaaaggcatggatgagtgaggcagaaatgaagccaagtaggagacttacaggctctactgaagtctaaagttctgcaaataaataagtgccatatgaatatgttggagtgaactgattcagaaaataatagaatcactctccataatgcaaatgagccccttttgtctaaaatataaatatattgtcactgcctttacactcaaaactttcattttatgcacctaacatacttttctaagtaaactgtacttccaataatttgcactccacaaaaccttttgattttccttcaagaaatgtggacttttctatttagaatagaaacaatacacactcatctaattatatgtttataaaatacttcaaactaagaattttggggggtaaaatgttatttattaaataatagcctctataaggaggaattatatctcttgtttttgttcctgctcactcatagaaaacagtgctgtagactgaatgtttatgtctccctaaaattcatttgttgtcacctaatgtacaatgtgatgatatctggaactgggactttttgggtggtagctagtttatgagggtactaccctcatgaacaggactggtgttttcataaaagaaacccagatagctccttcaccccttctgccatgtgaggacacaacaagaagaaggatctaaccatcctcgatattgaacttctcagacgtcaaaactgtgagaaataaatttctgtagtttacaatcacccagtctatgatattttgttatagcagccagaagtaactaagacaaactaatgccttgaacttttatgtaagaatcacgatacatttgtaaataaatacaagaaagaaatattagcattaaacccagttattctcctttgaaatttataaacaagtagaactggtcaaataaaacaaattacaaaatttacatttgctctgctaaataaatatgaaattgtaaattctgtgacctaaagaaaattatgcgttgtatcatatatgactataatttcattggacatcttaattaatctctgacaatctttgcaacttcacccaggaaaatagactttatacgttagagaaaatttgttctaacaagctgaaaacttttaaatacgaaaacacttctaaaaattctaaaagatatttgaaaacagtatatttgtaatactttctcgagaataaataaggttggaattctgttcaacaacatatacatttagaaggtagaaaatgtaaattactaagatcatactcatgtaaacttcaatcctttgaatttttcattttttaaagagattatccttatcccgagtatatatataattaaaaataaaaatgtgtcaactttttcaagttgataattatagaaaacattataactatgtcaatctgctgagaattgaagacagaattgatagcagtatttggattctcaagagtaactttactaaaatgtgatatctataaattttgttgctcaagcatatttacacagttttttaatttagctgattaaaaattgtgtaaaaatagtgtagtgttgttctaatgtttgtttgtagaagtggaaatacccttatcaaatttgaaaatggtctaagaatactttggtatgaaaatacaacttatatcaatttattctgttctttgaaaaagaagacttgcttgtgtgtgtgtgtgtgtgtgtgtgtgtgtgtgtgtagtgacatgtttagaaaatacaaataagaaaaaagaggactgttttacaacctagaaattgtcactatcagggatattttaatatatgctgccctaataaataatatatatgtttttaaaaatacattattgtatttagaacatattgttaaatacaggtggtggctcatgcctataattccagcagtttggaattgctgagatgggagaattgcttgaggccagaaattcaagaccagcctgtgaaacatagcaagaccccatctctttaaaaaaagtgaaaaataaataaaaatatattatttatacgtaccatgttgttaccattttagttraaaagaaactttaaatatttttcaatatgatttattttctttcaaatcattttggatagttaactagaattctattatgtgtgtgtgcgtgtctgcatgtgtgtgtataatgataatcatatccatattgctggacatgtagatgcttctaattctttatgtatatgtatgtgtatgcaaataatactgctatgaagattcttgcctctaaatattgtgtatctctttgacattttaaaaaatataaattctggaaatggaaatgctacatcagagggtaatacacacatttatgtctcttaatctgtgttgttagactaaactccagaaggttgtgtcaatgcacactgctaacaaaagcatatgagagcaatcatttccctcacactaagttttgtaactttaaaaaaatctttgccaattccatttgtccttggtgttaagtctagaagacaattatttcaggcttctttataaccctctagactgagctataaaagaaagctgtacattttttaccaagaaaattttaaaaagaaaatgaaatatacatgtttcctatacaaaacattagaatttatagcattataaaccaatagatgcttattaggtttaacttttattaagacatttagatatccctcattgtctctttgatgtttgttatgatcactgctgggattataggcatgttttattttggaatgttttgttttacgttgaaagattgtatttctcacattctaacattttcacaataatatatgggtagttttacttcaaagtgactgggtatttcagagtgtggaaaatgtcctgatgtgattaaggaagaagagaacctatattcaaattcagcaagaagaaaaaaaaagaaacaaaaacaatacaaaaggttgttttattgtagagaagggaagagagcatcaacaggaataaaaatcatttagcacctattttgtgttaattgcagcaaagttggagaaataaagagttacagcaatatgtgtttttataaaaactataagtagcatgtaactatcaaatttgtatatacatatatacacacatacgtacatatgtttatacatcattaactacttatacatacatatgtatatgtgtacatatctatatatgtatacatacatatgtatatgtgtacatatctatatatgtatacatacatatgtatatgtgtacatatctatatatgtatacatacatatgtatatgtgtacatatctatatatgtatacatacatatgtatttgtgtacatatctatatatgtatacatacgtatatgtgtacatatctatatatgtatacatacatatgtatatgtgtacatatctatatatgtatacatacatacatgtttatatgttggatatatatacttatatgtacacatgtatgcatatgtatacatttacataaacattaaaaaataccctttgagttgtcaggctgtgtttctcaaatattaccaaattgccctaaaagctagacatatttcctctcttgtttcattttgtttccaaaagcagcaaatgttgattctttattacttatacatgaaagaacacttacatgttctctaatggcaagagtggtttttacaatgcagtatttctttagtgtatttttttccaaaacttttatagaaaataaaaataatatgactgtgtcttccaaataaatttgtgtaaatttgaatcataatagaagcatagattttaaattttatcataaaactatatgcttacctaatgaacaagatatttatttagggtattatgtattcatgtaaaattgactaacggttaaattaacttaggatcctttctctttccaaagttaatgataataataagtattaaaaaggcattttgtttttcagtgtttagtcagagtaacttccaaagtgtgatcagttttctattctagtcttttttgcaactttgatttctaggatttttccttactcccaattttatttttgatgaggcttaatcctaccaacaattgcagctagatgtaggtaactttgaaagtgaaaaggctccactcttgctctataataaagtcatttcgcttacaaagagtaccataaattgctggagattgctgacagttgttatagacattttttataactatagtcattcactgatctttctttttatcatttaaatcaaatttgggaagagttgttactgcccaaggtatttcaagtataaaaaaaatagctaaggtaacatatcatgtgaccttttagaagatgmctatttcaatgtgaatctttttagagtttgaccaccctaactcttctaaatagcaatacacagttattcacacacacacatgcatacatgcaggcacctaccagccctactcactttacccaagagagtatcatgactatactttaaaccataagaagatttgaaaattctagatagtattaaaaatgctttccttgctctactatttctttatagtattgattaatttcttgcatacttcaaaatttatatattcatttttatattggcaggctctcctctttgtaaacttttaagaacagaaatctttgtctgttttcatacactgttgcatctaaatggatgaaacaggtactgacacagaataagtttgttgaatgacaaatgtaaatttttcatagtttagaaagtctataraatttgattttttaagatatgaggaagtgttcactattatgctgttggtttgcttgcaatacctttgctaattaattcagacaatgtggtgtaaaaaagtcacgtgtccttcaaatatgtgagatttcaaaacaaaaattttaatcttaggactaggttaaataatttattctggaataactcaggactttattttaaaaatagatattaaataatttagacattctgggttttattctttttcacattacttaatattaatagttggatagatctgagaagctatttcaatatcccttcctcagtttctttaaaatggttattaataatagcataatatggttgtgaggtttgaattacttgaaaaattcaaaacaaaggttgaataaactatgatcttgagaaagattttcaaatcttgcaaaaagctccagtgttaatcagggaatttgaattgccatgggcagtaagtggggaactgacttagatatttaaagaaaacaacagaaaaacctgaattttaaaatttagatgaactaccaatatttttgttgatattattgatacttaagtcaatcacaatatcagcaaatttgccaatttgagatgacatagatctaaggatttacttagttcactgctcttttccacttcttggttctcctcgctctggcagttcactatgttacctgttccacagatcctgaatacattactgttcatgcctaagggctttaaaacagactgaaaaagactacatactattgtgtctaactcaaaaaggaaaatacttttcagtcttcacatgacatcttttacatctttctttcaccctattgtcatgaacatcacaactacttttctaattcttactgacaaatccacaaaattcagttgctagactggcctctgacctctctcctgtatatgagtatgccatttaggcatccacctcagtgcctgtgataaattatgaacaacttgaagttagggactgtttactatttaatttttaatctacagtgatcttgtagtgccttataaaatccacagaaaataaaattataaacaaaatttctcagcttgaaaattcggaagtaaagtagaaaatatgaaatgctcttaaaagaaaatgtgcaaatttgtaagtccaagttagttcgaagactgttttatacattaatctgctttaagggacatggatgaagctggaaaccatcatcctcagcaaactattgcaaggacaaaaaaccaaacaccgcatgttctgactcataggtgggaattgaacaatgataacacttggacgcaggaaggggaacatcacacaccggggcctgttgtggggtgtggggagaggggaaggatagcattaggagatatacctaatgtaaatgacgagttaatgggtgcagcacaccgacatggcacatgtatacatatgtaacaaacctgcacgttgtgcacatgtaccctagaactcaaagtataataaaaatatatatatataaagagaaaaaggacatttttttatctgcgtttttctttcaacttttatttcagcttcagcgggtacatgtgcacgtttgttacctgggtgtattgcatgatgctgaggcttgggtaccaatgatcttatcacccagtaggtagcttttcaacacttgttccccctttctctcttcctcctctagtagtccccagtttctactatggtcctctttatgcccatgagaactcaatatttagctcccacttataagtgagaatatgtggtatttggttttctatttgtgctttaattatcttatgataatggcctctaatttcattcatgtcactgcaaataacaaggtttttttaatggctgcatagtataccatgttgtatatagaccacattttcttttttttcaatgtacaaaagtcaattttacttataaatacaaccaataaatgatctgaaaatattaagtatattttcacttataataagtacaaatatatatatatttatttttcattttggattcaggggttaaattttcagggttgctgcatgagtatattgcatgatgctgaggtttgtgatatggatggttccatcacccagatggtcagcatagtacccaataggtagtttttcagtccatgccccgcttcatcatttccctgtgtagtatcccccagtctatactgctaacatctttatattcatcagtccccaaggcttaactcccacttacatgtgagaacatgctatatttctttcttgttcctgcattaatttgcttaggacagtgtcctccagttccatccatgttgctgcaaatgacataatttttttcctttttatggctgtgtattattccatggtatatatgtaccatattttctttatccaatccaccattgatgggcaccttggttgattccatgtctttattattgtgaatagctctgcaattaacatacaaatacatgtgtctttttgataaattttttttttcctttgggtatataaacccaggagtgggatggctgggtgaaatggtagttctgttttaagttctttgagaaatctccaaactgccttccacagggactgaactaatttatattcccaacaacagtatataagctttcccttttatccaaagcctcaccagcatctgttattttttattttctaatagtaacagaaaatgggatggtatttcattgtggttttgatttgcatttctctgatgattagtgatgtggagcattgtttcatatgtttcttggccacttgtatgtcttcttttcagaagtgtcttttgagaagtgcccatttttaatggggttatttgtattttgcttgttcaattgtttaagctccttatagattctagatattaaacctttgtcagatgcataatttgtgaatctacccttggtctacatttttacgtaatgtataaagaatattgcatcatattgtattttatactgaaaatttgataaaatgtagattttaggtactgttaacacacagacacacgtgcacacatgtacaatgagacattactatggaaggtgatggatgtgtgaatgtgtttacctatagtaatcatttcattatctacttgcatatcaaaacatcatgttgtacaccttaaatatacacaataaaaaacacacaaagtaaaaaataacacagaaattctcggtaaatggtgagtgtacaataattcatggcaattataatgatgataattaaatagtttaaaattcatgacagtttatcatgcttactttgtatcaatttgtatttatagcagatatattcaaaagaaatgattgtcatgaaagttgctgtacccaaaatattggctatcacatttttaatttctgcttttctattaacataaattatttatagtgacattgaacaatatacccttgaaaacatattttaaatgttaattatatcaagaaaagagagaccataactaaaatgaaatataattcatgctttctatacaacatatagattctgtgtcataaaatcatggcttttttcataaaatcttttcaaattgatgactaacaatttattatatttgaaattatgcagttattccaacttgtgtagtaaaaatcacattaacacctcaattttataatgactttatgcatttttctgcatgcattgtaaacttcaatcttttaaataatatataaatttttgtcaattatttttccagtattctctgcaattatctttgtgaccatttcgcaaccaaattctatttggtaattatttatagaattttatatcctgagtattctactaaaaactttttactatattttatttaatcactaaaacaaatgtttgagttagtgattagtttccttccattttgcagttgaggaacctaagttttaaagagtttgagaagtttatcaaaagttacattgcaaataaataggagtattggggagctgaaaaagagcattctgactttagtccttaattttcaagctatactatctctgttatatgagtttactatttttataatgcatattaacatatattcagttaagtgctaaacttctaactttgtatttttattttaaatgtgtttttaggacacttgatcagtttacatgtgtttttatacatatactttttgtgcatatatttcaattattgactggttggaatttaaagaaccthtttatttgctttgtacaatgcaggaagaaactaatgcatttaaaaggtgtccacatcttgcaaaaataaaaagagatagggtaaaaacatgcatagcattgaattcgccattaatctgaccatatccccatttgacacactagaaaacctctatttactgttaaatgatgggctttcttataaaaaaaaaagaaaacctgaaaagccagagtatgaatccttgtcatytatacaattcataaaatcagtttaacctccccagatgtaagtgtgtgtatttgtaatttagttacttaattacttctagtcaagggggaggtttaaacatttctgttcctttcttttattattattattatactctaagttttaggatacatgtgcacaatgtgcaggtttgttacatatgtatacatgtgccatgctggtgtgctgcacccattaactcatcatttagcattagttatatctcctaatgctatccctcccccctccccccaccccacagcaggcccggtgtgtgatgttccccttcctgtgtccatgtgttctcattgttcaattctcacctatgagtgagaaaatgcggtgtttggttttttgtccttgcgataatttgctgagaatgatagtttccagcttcatccatgtccctacaaaggacatgaactcatcattttttatggctgcatagtattccatggtgtatatgtgccacattttcttaatccagtctatcatttttggacatttgtgttggttccaagtctttgctattgtgaatagtgcctgactttcttttgctgaaaaaggatctcgttagtatagtctaccctggggatactttggaagagggtcagaggggagtatggcattatatagcagcaaagaaacaaaaaatctgtgacacaatcttgcttttcattttatccattgatagaaacttctgctttctgttgcacagtgaaccctatcatgcaaattctccatagtcagattttgtgaaccctcatgtctcaagtatatttgacctaaaaaggcccgattctctcccacttgcaattacttattaaagatggactttattcattaaagcaaaaatgattgaatatcactctatcttagggaagcaaatttagaaagtcttaatatacagtttaataataaatgatgcagtaggcagaatttcttttaatcttttaaaaataacattattatgcaatattgccattatttgaattcatcctcctaagactgctttatgcagtttctcaaggctcttgaaggcagtaaatggcatattcttggtcttcttattccaaatggtgtctcttttcttatgacaggtccaagatcttttcttaattgtaacattgttttctccatcaatctctggtaatgagtaaacttttagctattaggaaatatgtatcagtgataaatgttctaatgggaatatgcatgaagaaagaatcaacatctgaaatcttaaagaggtgcaaactctgatcacagcagtggtttgtcagagttggcattacttgctgtctggatgtcatttcggatttcttggtgattgctctccattcctactttcacacacacaaaaaagaaatcaggcccggtgcagtggctcatgcctgtaagcccagcactttgggaggctgaggcaggcagatcacttgaggtcaggagttcgtgactagcctggccaacatgatgaaaccctgcctcttctaaaaacacaaaaaattagccggacgtggaggcgtatgcttgtaatcccaggtatttgggaagctgaggcaggagaattgcttcaacctgggaggcggaggatgcagtgagctgagattgcaccattgcactccatcctgggtaacagagcgagactccatctctaaataaataaatacgtaaataaataaatatctagcttcttcctcccttcctctctttctcattttatttctcttccgtactaacaataagacattcttcctgtgaaagatctttttccaattatttcattttctttcttcttttaactcgactgtaattaaatatctgtgactcaaaatttatacttgttggtcacttaatcataattttataagactactaagactcaaaactgcttctaatacaaaacttgaaaatgcaaatatcttagtttgtactggaaagtatttgttacaacatccctctcctccagaataaatcatattactaagatagaacacttggaacttttaagctagaagaaaaaaaatctataatagtaagattttagttatataacacaacaataatatatatagatggatgaaaataaattagaacttcattcttcttaatgtaagccttctttaatgaatatagacttttaattgaattaaatatcatacttagctaaaaatcagactaccaaaacctcagatgttagagaaataactgtgaaggtaaggcaaaaaaggatctggtcaccaataaatatatttgctaaagacaggaaacctccttaggcacttccctttagcaaatttaatgaaaattctacataaacaaagttaagtcttttcataggccttataatctgtctcattttctaggtaaccagaatagcagcaatagtaatcttcaaatggcctacagtcgctggaggcagacacataggaaggagacaaagtatagaggcaaaagtttctgagattatcattttattccactccatcctacaattggtgccctaatgggaacatttttaaaaattagagcattaacttaactttacgaagaggtaaagtatgcaccattgataaatgttctaatattttaggaaaatactttgccatatgcagttaaaatacaaaaactattggcacttaaaagaaataacatgtaccaaaatgtttatatgataaaaactgtattaaaaatgtttactaatattatcaatagtatttataaatgccataattgttagattagtgaattctatgatttggaaaaatccacttccatggttcatagcattttcaagtaatactatgtaacatataatactttgaatgatagtaaacaaaggcagtattctatttgttcattgtaatttactgtctacccaattcagcttctctcttctacatcattttaagggttcactcatctgcactgaatcttctactctgtggcttactccattttctcttaagccaaaattttctcacatcacggacttaattttatgggctagaacttatgggctagtacttcaaatagtatattctatatagtgcatattcttactttgtgcctctacttctcattttctcctttttttgtaagtatttagtatactgtttaatttgtgggcttcctatctgtaacctttttatatttttgtattttttcctagggattgcaatatatgtgcctaaattatcacactttcttgagttaataacttaatatttcaagtaagatgtaaaatacttatagtcccatacatcattttactatcccctagtggcttctatgttatagttgtcatatatattacattcatgtacattgaaaactccaccagataagaatgttttctttcaagagttatacatattttttaaaaactaaaagtagaaaaattatcttttatgtttatctagatatttaccatttatgttgttctttctttattcctgaaggttcatatttccccctggtgttagttatttccctctagcctaaaaaacttcttttaacatttcttttagatatgtcaacagtaaatatttctggtttaccttcacctgataattttcttattttgtcttcatttctgaaatatatttttgctagatatagaattctggttttgtggctctcctttagtacttttgagatgctgttccatggtcttctggctgtcataaatgtctgataagaagtccatggtcatttaaagcattgttcctcacctaagaagttaagaataatataaaggaagtaaatacatagatacggagaggagcagagaaagagaaaataacatatttatgttatttcgctattagtatatggttgaaaatgatgtaaagtttcagtgcattatgattacaataataactatgacaatacatgctgtaaaactaaaagatacacagttgcagatatccataatatgatttaaaatatgccctttgcctattgcaataagtctaaatagtatttatagtttctacttaggacaccaaagcaaagtaaatagagacactgtatcagtttagaataagattcaattcctaaaataaaaaagcaaataagctgcaagaacacattagagattcatttctctctcatttataaaaagtcttctgtgggttgaatgataggctcacatttggtgttgggggaagggagtggagtgtgggctgtcttatttctctctcatccttagcataggattccttcctacttcagttcttcttgtcacccaagatagagtcgaagttcagtcctcatattttcatttcagataagtaaaaaaagggaagagagagaaccaaagggtactatttccatatgacttagctgtacataagtatctttcctggaagacttcttttcttcacctctagaagtaagcaagactgtaaattagagttctttaagtagcaacattactttttggagaaaataaaattagagttctgcttgtaagcaagcagtatctaaaccttaacttagataatttagatattttgcaatagccaaaatattaaaaaactcaaattccaacaacagataaataaataaataaaatgtggtgtatacatacagcggaatactatttaggcttttaaaaggaaatcctaccttttgcaacaacatggatgaccataaaggatattatgctaagtgaaataaaaatactgagaaaaaactaaactaaactaaacaaaaacactcttagttcccacagtttctataggaggatttggtcttcatgcaaatatgtggtttcatattgatcatcattttggtcatctgctggtgcatagcaaagaatccaaaagattcatggctgaaaaccataacagttatctcacagtttctatgggttaagaatctaagtactaattccctgggtacctgggctcttacaaggccacagtcatctcaagtctcaattggaaaaaattaggttggtgcaaaagttaattgccatttttgccattactttcaggggaaaaaaaaaccgcaattactttggtaccaatctaacagtctcttacctgattcacatgactgttaacaagattcacttccttgctggctgtactgaggcctcagttgctgatgacctgtgggccagaagacttcttcagttccttgctgtgtgtgcctatccagagagtacaacatgacagcttgatttatgagagaaaggaatcagacaagagagagtgctggcaaaagacatgagactagcaagacagaagtcgcagtctttcataactcaatcatagaagtgataacctatcacttttgccatattctgttcattaaaagcaattctctaggtacagctcacactcaacaagaagcmttacacaacagggtaaatatcagaaagcagggatcattgaaaccatctagaagttgcctaacacaggattaactgatataatatatttaaaaatatacagtagtatgactaaatacagcaggtgtgtatatttcaacaaatactttttggtaagtatcgtgtgttttaggccataggatacatcaaagaacaagccccattaatcctctggttatgtgaggggaaaggtaagagacaatgaatgacaaacaaaataattaaattggataatatgtgaagaggtgatttatgttatgaaaacaaagataagcaaaaaagactagagggaattgamagaatccaaagagcagatggtaagctggggataagttgtggtgttaaaaatgtaatttacaacagtgttcattgggaatataagattcaagcaaagacttaagggacctgaagcagttagtgaaataggaatctagaagaaaagcacactaggcagagaaaaagatggggtaaaggtaataaaatgggaatatgcttgctatgtctgaaacagccagaatctcagtgtggttagaaccgaggaaggggaaatgttgtagaagagaaagttggagaaataacaagggttatgttcatgtaaggctttataggctatttaaaagctttagacttttattttaggtaaagggataggcaatamcagcattttgaataggggatttatataatccaacttatatttaagaaaaaaaacaactcagacttctgcatttagatatattatgtgtggatatggggtggagagaaagatcagttgaaaagctatggaaaaatctctgggaagataaaatgacatagggggcactgtgctggcaatgaagatatgaagaacaggctgtgttctggaaaacctttaaactaggatcaaaaagattttatggtagcctggatgtgtagtaaggtgaaaagaaaaggaaaaaaaaatgatttgaaaaggtttggcctgcaaggttattggacagaaaaactagaaggatggagttattgtcaatgaacatggggatggttgtgtttgtagtagcctttatttttaggtggaaagaatgaggagttttattttagatatatttagtggaaaagccaagaagacagtagggcatatgaattttgagttaaagaaataatttttggctgtggatattcatttgagacatgctactgtatagctagaaaatagaagtaagtgtaagtagagaatagaagaggtagaggatagaagcattgattattccaacattattaatgatgtggaaaaagatagcagctaattcaaattaaataacccttaattttttcatttaattcaaattaatttgatatttgtcaatctaccatgtaactggttttggcttgagaggcatggtagatttagatttcttggaatcaacagaaaccattaccctttatctcaagaatcctggaaacattatctaaagagagtaaaaaagataaacatttcttaattgaagagaaagctgttttcagagaaagctcatttaaacagagtaaaaaggataaacatttctcaatcaaagctgttatcaattcattaaattgtccatctgaaaatctgcatttatttttgcaataaatatatatctaaattatatctgtatttacaataatgtttataacacataaaaaaagcaactcctgaattagtttaaccctttgttattctgtgtatgtgtgtgtatataattagaatatagtctctggatgctattacaaaggcccaattataacattggttataaatgatagaattttctctttcatattacagtgcaaaggtattctcaaatgctaacgtggacctactccatggtgtcttggtctgtgcctctttaactttggctttttattttttgtttaatttgttgtcgttttgccatcctctaagaaatatttctttctctgggtccagaatgcttttctgactctcacaaacatgtacatactaataatttgcagaggagagagaaagaataaggttcttttcttttaagaacatggccaggaagtagaacatgttgcttctattcatgtttccctggccttaagctagtctttggtcatatggagcttcaaggactataagtaatatagtctatagctgcatcaattattttagagaaaactactagtcttctatattatatgccatcttgagatgcattaactatagcaaaacctcattttctttatatgagaataaaacaaaataatcaatgtcatattttatgtagcagattcacataaataccagcagattagtaaaaattatacaacttagaaatttatagaaattatgtgattttccaaatattaagcatcatgtagaaataaaagtaatttttaagaaaatgttttagattaacagcaaaattaaagggaaagtatggaaatttcccatatattccctgccccaatcatgcatagactcctcaattatctgcatccccagtgtttcatttgttaaaactgacaagcctacgttaatgcatcatagtaactcaaactccatagtttacattagagttctgactttgtgttgcatattctgggtttagacaaatatttgatgacatctgtcaaccattatagtattctactgaacaatttcactaccttaaaactcctctgtgttctgcctattcatccctctcccacacaacactctggcaatcacctgactttttactgtcaccatagattttcctttatcagaatgtcaaatggtaggactcatacagtaactatgtagccttttcagattcactctcacttaataatatgcatttaagtttcctccaaatcttttcataacttgatagctcatttatttttagtgctgaacaatattccattgactggatgtaccacagtatagctatccataaacctactgaaggtcatcttagttgttttcaaattttggcaattaccaataaaactgctataaaaatccacatttgggtttttgtttttgttttttttttgacggagtcttgatctcttgcccccaggctggagtgcaatggcgctatctctgctcactgcaacctccacctcctgggttcaagcgattctcctgcctcagcttcccgagtagctggggttacagacgcctgccaccacgcctggctgatttttatatttttagtagagacgggatttcatcatgctggacaggctggtctcgaacttctgaccttaggcaatctgcccaccttggcctcccaaagagctgggattacaagcatgagccaccactcccggcctacatttaggtttttgatgggacgtattttcaactccttaggtatatatcaaggagcatgattattggattatatggtaagagaatgtttagttttaccaaaaattgccaaactctcttccaaaatgctgtacaattttgcattcccaccaccaatgaaagagagctcccattgctccacatccttgccagcatttagtgttgtcagtgttgtgaatttttgaccatctaataggcttgcagggtatctgattgttgttttaattttgcagtttccaaaagacatatattgtggagcatcttttcatatgctctttgtcatctgtgtatcctttttgatgaggtgtgtgttcaggccaaatactattttttttttaactcaggttttttgctttttattgttgaggtttaagacttcattgaacattttggataatggccttttattatatatggcttttgcaaatattttctgtcagtctgtggttcgtcatttcattttcttggcagaattatttgcagagcaggagttttaattttagtgaagtccaacatctctattctttctttcatagattattccctttggtattgtatctaaaaagtcatcaccatacccaaggtcatttaagtttttacctatgttatattctaggagttttatagttttgcactttatatttaggtctgttatccattttttattaattttgtgaagggtatatggcttatgtctcaagtcatttttttgaatgtaatgtccatttgttttagcatcatttattgaataaaaatatttttcagtggagagagagtacaggccactaaaacagaaagcccagagttaatctatgacctaattgtttactagctacttgacttctgataaattatctaactgatctgagcctcggattccttacttgccatatagggctagtagcacttctactaatgttcagtatttctagaacaacccaacaaaatagtgtgaatatcaaagaatcttatagtatatcatataaatataatgcattattcatatatgaataatgaactcttacatagaagtcatacgcttgtttgtcaaaaataagtgaaatgatattagtattcaatacataatgtaatttatctttcatagttaatatagaaatattaatatactttttgtgaatattaagtcagtgttaacattttatagactagactccctttgtaaaagatctaattgaataaacaaaataaatgcttatttgtaaagaaatgaatatatttgcctacatacagttattgcactcaagtaaattttaaatgattgtttaggatgttattttcataaatatatgctctaagaacatctgcagaaatttgaatgtacagtcatcaaagcaaaactttagtgcaggtgaattaggtgtatgtggagaatatagatggttatatsaaakactrakgttacaatcaaatataagcaggtgtgcacgttttaatgatcatgacttccatatccagtgattttgatataaaattattttaagaactgcggatacaattttctctattcccactgcttactcctttttacttaaatactgcaaaatgattctttaatgttttaagtaaacagtttgcctctaactttagagagcttgcttagattagcaaaagactcagcagcagcctgtatgacattctgtgtggttaaactgccccatattctccaaattacccagtaaactttatttggaatcatcagtgaggcatcaaggaaaaaaataatgtaaagctactcctcacgaagtactatcttacagtatggcagtacctgtgaagaaactagattggtttatcaaccaaacttaaaaagcactcagaaagaaagctggctaaattaaaaacacattaactctgtggtgctgctttcttaagtaacagcaacacctctgaaatagcaaaaggaagtaaatataactagtgaatcacaagaaagactataatgtattcatttaaataaagaatttttagtatacattttaaatcttaagttttgcgttctttttcacctatcactattttagacaatatccccagtagaaatggatataaggaaaacatagcaaagtaagaaagtgttttattaatataagaggaagattatattagagttatctctactgtattcattatgtactaattattgtgtttgttttcttgctgcacataatgggtgttaagcaaggaattaaaacaaataaaaatgaatgttcttaaaatgaagaattttaaataaagatatttcaggtgaatctaacctaatttgtatgtcagggaagatataccctgaaaaagtgatctttaagtcaagttctgatgcatgaataggagtttacaaagataaaggacacgaaaagatattaggaatgatcctttgcaggtgtccttggccagggcaataacacattagaaaagcctagaggaatgggaaatttgagatgcatataagaactatagaaaatttaatagaatttgggccttgcaagaatttgttcaaagatatgactaaaatagtcttcttggggcatgattacatgcaagataagatcccaagcaaaagactatagctggtagagtagttcattatgtgaaaaggtctttttatattttcaaatgattgctcaatggtgattttttaaagaaattctttaactcttctgttatttgatggaaaggatatagcaaatgtatgagttataaattaatttattctcagctatccatccctacacaaaaggacagggtgtcccggctgggctccagatgtaggctccattgacaatttgtaattgccagaattgaaggctcagattctgggtggtatggaaataccacagacccagtcactacaaatggaggttgtgatggttaatattgagtgtcaacttgattggattgaaggatggaaagtattgttcttggttgtgtccgtgagagtgtcaccaaaaaggagattcacatttgagtcaatggactgggagagacagacccactgtcaacatgggtggacaccgtgtaatcagcttccagcgcagctggaataaagcaggcagaagatggaaagcgcatacatgctgagtcttccggtctcatctttctcctataatggctgcttcttgcactcaaacatcagactctaagttcttcagcttttggattcttggacttacactagtggcttgccagggcctctcgggccttcagctatagactgaaggctgcactgttggcttccctacttttgaggttttgggacccagtctggtttccaagctcctcaacttgcagacatcctattgtgggacttcaccttgtgattgtgtgagtcaatactccttaataaactcccctttatatatacatctatcctattagttctgtccttctagagaaccatgactaatacaaaggtgtttcaaacgttccatgtgttgtcaatgttttgtaatgtctccatctcctccatctgatgatattcttatcttgaaggcaggaactgtgtcttattcatctttttaagcagctcaatattaagcacagtgcctgaaaataataagtgctcagtaaatatttgttaaaggaattactacattctttaactttgaaaaactcttctggatacatcctaacaggaaatttcctaatgtggaaaaaattgttgctaaagaaacattatgtttaatatattctagaaagttacaagcccattttatagtgaactaaacttctgttatatcaaggaatgcatgcaatatcagttattttaatgcccatattagtttaagctgagcttttygccatctgttccaactcttaaccatgaatgcaaaagaacacatttccctattacatttgtaaaatgtaatatataaatgatttaaatacagttatacactcatgaagtaatgctgcatgcagctggtacagggctcccttatgttacaaaaagaaataaaggagaaagcctgctaatctctgacatagagtttcatgctatatgaccttattctagggacagtggaaggtcaaatattcaccacagcacaaaactgactttctcagtataaatttcatttataaactaaaattctgaccacccccattttgttaaactgttaatgattatattttaattttttaagaaatttattacattctgtaaagttctcaaataatgaacatttttgtctctattagaattcttagtgcactttatgagcctttattaatactgctgtggattttctttctattgaaatgtagaagcccaccaaaagaattgttcactgagaccaattatagtatgtatataactattagtaagaagatgtggccgggcgcagtggctcacgcctgtaatcccagcactttgggaggccgaggagggtggatcatgaggtcaggagatcgagaccatcctggctaacaaggtgaaaccccgtctctactaaaaatacaaaaaattaaccgggcgcggtggcgggcgcctgtagtcccagctactcgggaggctgaggcaggagaatggcgtgaacccgggaagcrgagcttgcagtgagccgagattgcgccactgcagtccgcagtccgacctgggcgacagagcgagactccgtctcaaaaaaaaaaaaaaaaaaaagaagatgtgtaaattttgttaaaaatttgctttatttggcttccctacattggaatttattgcaaaaataattaaaaatatataaagtaggtattttatgctgtttgtcaaatctatacctattcccatgataaacacttgaatggctttgagacctataatttttcagagagttataacatgaaaaggccatgaagcataataaatatttatattttaaggagtataggaaacaagaattgacatttaaaaaatgacaagactttaaaactcttgcattgtgttaaggtaacatgtttccctcacctcctgaataaaataagacataattgccataggagtgtaatttaaaaagtgggctatttctgtcataaccttgtttactattgacatttagtattaatttttttaaatggcatggaaaataaatttaaatttaactgtcgtgaattagactagtggctctcaaactctatttatgaccaacatttctcagggaagaaaaaaactaacagtatattcttactcttgagtcagctatatatatatatatcatctttaagatgctattatttattattaaaggtaagggagacacacacaaagacacacacatgcatacagacacacacatgctatcctgcaatttgacacaaatactttaaaacaatatgaagtctttcagaaaaaggccatacaaattcaaccagaagaaataccatttattaataataagttttaatgtgatattcataaagtactatcttttatttatgttttacttacaacaatttgcctaactactacatgtgggtctagcttcattttcctaggtttcataatcataaccacaaaatgttgagatattgaattaggcagtatactcttaacataggaaggagtttacctaatcctaacatagcacagagtttgcctaatcatctgctgtgacttctccccaggaggatgaagtatttggagcccaggtgtatttcacacaaactcagctgttttaccactcacaactttttttgtactttttgaggttttcattagagatggggtctcagtatgttgctcaggctgtattcaaactcatgggctcaagcaatcctcccacctcagccttttaagtgtctgggtgggtgggcaccatcacaccaacgcctcaaaatgttcttaggtttgaagaacttgcgttacaaatctacaaagttagtacagcatcaatactttactaaagatgtctgaatactataaaatataagaaataaaaatgttaacattggaagtcattgaataataggttgttattcaaattaagagttagtgtcaatttagttcatattcagatgaaattattaatccctttaggcatcaacttccttgctgtcctagggtgagagtagagcaaagaggacaagaagaaaggggtttgtttctgtaggtaagattgtggatacttccccttaactcaagttgctcagatccaggaaccctgtagctttcatgtatgcgcatgtgggtgggtggggggcggggcgggtaaagctgtgggtgagtgggggcggggaaggttgggggggcttcttttctcagcgtattaccaggatcataaataatttataattctcatctgaaacttagggttctcttctaagataactggttgttggaagatttcatttccttatgaccgcatgagtgaggttctcattttcttgctagctattggtgagtaacgattctcagctactagtggccacctgcagacccttcctatgtggcccataggcagtttacaacatggttgtaaactgcaaatgcctgctttagaccagagggagtctccctgacacccacccaatataggctccctcttggttaagtccaagtcaactgatttgaaccttatcatgggagtgatattgccattctattcacagattctgcccacactcaagataagagagttatacagtgtgtcacaccaggagcaggaattttggagcccattttagaaacatgttatgctaataaagatagcataaagctatgtttattaatgttttttacattaaactttatctcgtcttttgaaaacttatattttgtatatgtattataatatacatgttctattactacagttatacctacatgattcataagcatatacacataagagaattggcataaattctcaaaatgccttctcattagacttcttctctaggaagcgagtgtagtgatgagcctatggaaatgatgaaaaattacttttacaaaagtaaaaaaaaataaagtcactggaaatggcatccaaaaacttacctcaccctttcttgcattactatctctaaaactggagtcaaatgtgattaacctggcattggtgttcataatcctaaaagtatagtatacattataataaatgttcatataaatatcttttgcaaaaacagaaaaaaatgccttgctgaaattagtaattttgtgagataattatcatttactcgtttaaaaataatttactcaatttaaaagcaaactgtgatattcattccatgtgcataggttataactgcttatgtttcttcttcattctcttaatacggtctttcagaattgtgaggagtaaactgagttcatgtgaaaacatgtaatatagtggctagcacacatagtgcacccagcatataattgttttctacattcttgttccattcttccaaatggagaattatgactgtccctgtgaataaatattaaatgcaaatacagcccaaaggaacatagctgaggtagattcaggataataccatactgagaactgagaaaccaggtaggaatctgacattaccaaagaaaaggctgattgcacttttgagaactttagagaaggtgtggaaatccttatacagacaacttaggcatstgagccagtgaaggctagacaacttgatggagatgtagaacaacataaaaatttttaaaaatcaggcatggcttagttttattgtctgtaatgattttaagtatttttttattttcttctaaaataaatttaaggtagctgctaaaatactttaggtgctaatgacatattgtcacctttaaaggtaatagttgattcagagatttatgagttattttgtattatttgctgttggtagtgatttgtcttttagttttactttttgttttgtattgacaaaaaagttttaatttatgattctctgacttttaatcttgagttcttaaaaattatcaaattaaaaaattgtctttaaaagtattttataaaaataaaaattcccatttatttacatggattattccatactgaagcacatgaagttagagagaggtgaaagaaaaaaaacttgtgattttatttattattattttgtttttcttaacaaggttctactaaagcaatatgttttgattttcctagaaatgccatcatttctttagtgggtaggcatagtagcaactgctgacagcttcattacaagccacagcctctagagtctaaagtctgtgactagaagtctctcttgctcaataaattaacatgctattttctttccctttaaaactaagatgacatttcagctaaactatattgaaaataacttcccacatgaaaaagtctccagcatatatattctttttatcatgacctgaaagcaaagagacaacagtaaaccagaaataacattgtctttccacctagattatggtatggctaagctgaataaatctattcataaataaaatcaagcatttacactgagacaattaaaaagtctattatttttaaaatattgttttaatcctcatttatatgtattttttactaggtaaataggattgggtattaatttgcattctgcctcccactaattctgtatgttatgtgctttggaaaagcaagtaatgaaagttaaataatgaaaaataatatgcctgaatggagtaagaaagcactatagcaggttaagtagttgactagttattaaattaattctattataataaaaaggatgatatattaaattcaatgacacaaaggaaaaaataaaataaatcttgtctgaatgtacaatatactagaaaaagtatttatgtattcaagaacagtggattctcaactggataactgtcataatcacttaagctgcttgaaatagggacgtcctggaccatctgagatttcagctcaattattcaggaagaagatccaggagtccggcttttgaaaatgctccctgggggtgtctttcaaagctagttgagtgcatatcattagattcattttggaaaacattattctaccaggtagtggtgaagtttctgatagcccttcctgacaggatgtaagatagagagctcataatgcaagatttctataagttttatgtcatgcatcttttaaaatgtacatttttagctgggacaacctaattttctcaagtttcctaccagtatctcctgattatatagataaatttgcccccttttcaggctttctttgctaaaagggttaaagagaagtagctaaagtcgacatatcctgagccaaaatttaaaaaatagattaaaatctgcctctagtttatgatctcttactttatcagattatattctataatgaaaaaactcttaaaatatcagaactcaatgccaaagggagatctctccaactctagatgctagattttggtaagtcctcctttagataaactgaatcatttagctccaggcagtaatatgatcatgtttacaaggatggtttttgaaacacatagatctgaatgccaggctgccatttactatccacatgactgtagtttatttaagttctctgttactcattttaataaagattatgcgataactaacgttgattatgtggctcttccgctgcccaaattttttttatcagattttatccttatttctctgtaacatcatgatgatgatgatgatgacgacgatgttaaaaacaatagatattgccttgctaacattctggcagcttggttaatttggcttcagcatttgtcttccagcctagtgaaatatatcctcaataaattaaataaaacaaacgtttatttgtaattaccttaatgagaagaatgaggaataggaaggatatattaaaacactttctcatgctaatcgtaatttttaagcatatttttcttacattaaattctcctagtgcttaatagtagatgtatcatattctttaatatttaagaagatttatcagttcaagtaatactctatttttttctgaacattagaagcgtttgttataaatcttgtcttgaaaattgtcttttttgacagggtactgaatgaaagaaccacaccagaccttgcgaataatggtaggaacacacctggctgtttagaaactagatattaataatctaaacattgaaaaataccacttataaaataatttgcaaagttatcccacatttttgcctacaaaattaatatttgactttacttgcatattgtctaatttaacattattgtttctgtaactttatttgaacacatattaagagagtccattaagatgtaaatgtgggacttctgtgtttttgcttatcaccaagttcttttcttcaagttttagttgcagagaattatgcttagaaaggcttcattggctctgtgaagaaagagtttcctttttaaattatttttaatttctgtattttcagaaatagaagtttaaaaagcaccacttttctataacataaaatgaaagaattaaaacttcctgttttaacaaggacatatatttggcaatagaaactgaactagggtcaacctcatctagaggagcaaaaactttcctcaaatagatgttccccacataaggagtgatttaattaatttattagtatatacacccattgccttttggaaagacagagaattgtgctgaatacttggaacatacctttgaaggaaatcctgcatatattgctgaattatttgatactggaataraacagaaactaatttcttttcattcaaacacatttactaacaccactacccacattttttcctaaactcatagaggttttaaaatgatacaagggcatcctaaattaaataataaataaaaggattcacaatcaatgcaagcaggtaacttgaaaatgttctaaaattaagataataaaatgacttagtgatcaacttaaaagcagcaccagcctctttgcattattaattcatctagtaatatgtaagaaaaaatgtattaggagaaaagagggaatagacaaaataatgttaagagaaagaaacaacataaaatttgttggattaaatatctcaattttggaccttgaatttacayagatttcatatgaatgtcttcaaacttcagaaagtttatatttttctgaatttgtgattttggaaaaccaaactgctatcgctgttattaaatttttccccatatcattgaatttgctctttgcttactactccagtgcccaaaccagtaggtattcaataaatattttattaatttcattgctgatatataaaatctatgtttgaactgatgtgcaaatacaatctttctggcttttgtgtagcaatgtgtctgtctgtctatctacctatcaatcttcatgtttttatatagttacatatatgaggccagccacagtgactcatgcttgtaatctcagcattttgggaggctgaggcaggtggatttcttgatctcaggagttcaagactagcctgggcaacatggcaaaacccatctctacaaaaaatacaaaaattaatcaggtgtagcagtttgcacctgtagttccagctacttgaaaggctgaggtgggagaattgcttgaacccagaaagtcaaggctgcagtgagtggtgatcatgccactgcattccagcctggacaacagggtgagaccctgtcttaaaaaaaaaggatgtaataattgcatataaattatgacatatcaatagttgtctgattttctcctaaagattagtagctctgtgctctaattgtaggcattttaccaaaacttagtttcttttctggaaaaaattgtaggaaaataacaactttttatttttttcctttatagttttctgagccttttattggctctttgaaaacatcatcatataagtcatgtaagtaatgccctaatgtgtttggccatgccagcttctttttgtggctcgtggtaacttgagaaataataaagtagataataagaatctaatcctggtgcatggcaagtgtgagtatatttgtgggacaaatttgatatggagagttgatactcatagcttaaaagctgcatatacccacagtccttacagttatagataaagttcttgcaagaatctagtaagcaaaagtccccataatttctggggaaatgtgttttcccgacataagaataattatcttattattgctgccaaattcccattcttgcctatattgcatacatgatgctggaggagacttgtccctcctgtcaacaagaggcaaacatgaagaccagacaaaagccaaagagtgtaaatagcggagctgcaagattgagagagtcaagttctcaatgtcatctttgagtcaccatgctggtctagcttacttgctactggatatattgaagcatgaaaaaaattacccccttcctacttctaagtttcttttactcatagctgaatgagttctcaccaaattgcttaaactaggtgaagttttcccttattagtccagaatatttacataaatagaatgtttcaggaatagaacaacttaataaacaatatttatagaaatatggttgtgtttctactgaaaactgtaactctcttcttggtattatgatttcatatattttatatttgagtaccgtatactttctgacattgtaatggtagttattatttattaatgaaccaaactaacaatcataacctctatcctttattaatcacaatgtactctgcagtgcactctgtataagaaacctccttaactatgatttaaatatacactttgagtggcatattcattctcatttaaaggaagaaaaaccaggagagtttaaataactttctcagactttcatttctgtctataatatagtaacagatataagacttattccctcatgaagagcaacaataagagttttaaatgcaaaactcatgtgactgaagatttcaatgcaattaaggattggaggaacaagatcagagagagaaaatatgcattgtagcaagcccatcatttacctccattctcttccatccccttctgtatggtttttgctaatccatggcttggacagaaagtctgaatagacaaatacagtctacagttgacaataaatccactggactagggagacaaacactggagtcaaagttactaagcagtacctttacatgtattaatcataattatttaaaagtctgtgtttgatcatttcaatatctactaagcctgagtgactatgctattacttaatttttctcttggttttcaataatttggccctatattcaggaagccaatattctagaagaaaaataaaatgtagaaaattgagcccagtatttcatgtgtaatttactttgaggcattttccaccccctaaaacacaaatgcatagactaaataaatagaaattaagaagaaaatagctgctacaaaccaagcagagaacctggcagtcacacaagacaaggaagtcaagagttgaagttcatgtactaataagcaagaatggccctagttaaaggggaacatcacacacaggggcctgttgtggggtgggggagggtgggatagcattaagagatatgcctaatgtaaatgacgagttaatgggtgcagcacaccaacatgacacatgtatacagatggaacaaacctgcacgttgtgcacatgtaccctagaactcaaagtataataaaaaagtatataaaaaaaaaagaaaaaaaaaagaatggccctagttagtactgcacactttcagtggggatgccagaagagctctaccttgtagaaaaacaaacaagaaacaggtcagcctcaactgaatcaggtgatttgcccacgagtttctactggccagtaattaaataaaaataattgattctactagaaaataggggtcgaatgattgaaaaccaagagaaaaattaagtaatagaatagtcactcaggtttactagatattgaaatgaaattcagacttttaaacaattatgattaatacatgctgaaaaatagaatattgaaagtttcaacagagaactataattaaaattgtgtgtgtttagtgtgaaaaccctagcactgaaatttttgataaccataataaataattcagtaagtgggtgtagaagaagactggctttgaaaaagagagcattaatgtataatcttattttaaaagaatgaattaatcaaagactatccatcttgaagaacagagaccataaaatgggacctgtatatactcagtgttttggaaagagaaaataataggcaaacacaaaatcaaagagccacttgtgaataatttttcaaatctgacaaaagacatagtaccaaaaattgaagaagctacaagaatcccaagtacaaagaaaatctagccattttatagtaaacctgttgaaaatcaaaacaaaggaaaaaaatctacaaaaggagcttaaaggaagggcataatgctttgtgtattagtttgttctcacattgctataaagaaatacctgagactggctactttataagaaaagatgtttagttggcacatgattctgcaggtgtacaggaaacacagtagcctctccttctggggaggcctctgccaggtttcaatcatggaggtagatgaagcaggagcttgtatattacatggcaaaagcaggagtgagacagcaagaggggaggtgctacacacacttttatacaaccagatctcacaagaaccccctcactatcatgatgacagtaccaacaggaatggtgctaaaccatttgtgagaaatccaccccatgatctaatcacctcctactaggccccacctccaacattggcgattacatttctatatgagatttgtgtgagacatacatccaaaccacatcaccttcaaaggaaccaaataagactgatatagctgactcataaattaccagatatatgacaaaaataacaaaataacacttaatgtagaagaaagatgatttatactatatctattgcaatatatctactcatatataaaagtatgaatacataaatgtatacatgtgcacacatatggataaaaacatacatatgtgtatacaaacgtgtatgtaagaaagcatatgtattacgtgtatagtcatatttatatattcatacatacagataaatgtgtgttgtgtgtgtgtaagaaggaaaaaaggaaggaaaaatagaaaaagaaagaagcttgatcaccaggttacataatacaaggtaattaattccaaggatcttaagcccaaatgtaaaaggtaatacaatgaaaactccagaaaataacaagatatagtcgttactttgatatagttaaatatatgttaacaaaactcaagaagcactaagtataaagggaaaaattggaaaattgaactatggtaaaaataagaacttctattcactcttaggagattaaaactgtgaaactcaaaaccacagaatgagagaatattttgacaatttgaataattgtcagggaatgtgttaatctgagaaaaaatgatttagaatacatacatttatacagattagtaagaaaagacaacctaataaaaaactaagcacttcactaacaaatctatctaaatagataatcaaattatgtggaggtgctcaacctcattcatcatcggtgaaatacagattaaaaccaatgagtatgggaaaaaacaaatcctgttgacaatgttgtggaggactagaaatctcatttactctcagtgaatgtggaaactgacactgccgccgagaaaagttggcaatttctactaacgctgaacatatgaatacttcacagtataaatagggcaaaaatgagatacaatgttcaaagcaacacaatactttttcttcaggacaaaatcacatgacatataattgactattttaaagggtgcaattcagtgatatccaacacattcttaatgttgtataatcaccatttccatctagttcaaaagcatttcattaccacaaaagaaaactctgcacccattaaacagtcaaagcaaaataattattaatgaacaaaaatatctcacatttccatcaaatttggaatgggtaaattagatgtggtcataaaaccattagtggtggtcatgcaatgtgagagtgcataaaatgaaaatgctcaaatggctactacatggaacactggtactaaatcttatacatagaatattctccaaatgaaattagacataaaacatagtgtgctattacatctataaaaatttcaaaaacagacttagttattttatggtgacagaagtgagaagagtcgttaccaccgagtcgttgggtacagtgataattggtagggcccataaggcaggcttttgcgatctttgaaatattctataatttgatttgataaatggctgtctcaatgaatgtgttagcttcatgaagatacatcaaactatacaattaagagttgtgcacattaccttatgtgttttacctctctaaaaataaaaacaaaattaggtaaatctgaaatcatagaggagcatacctttagtaaattgcagagttggaatttgaaccaaagcatatctaaataaaacttctttaaacactataatgtcatactattcctttttcacagtaatacctgaaagctcactatgctttcttaaaaaactccagtatataagaaaacaggcattgccataaatattataactgaaaattattgattgtatgttctcaattattattttacttattcagcattgttacataccacctaaacgttttgtagcccccaatgatagaaattaagttacattttgtcttagcccaactaactttttcttgctacatctacaatatacctctgctctcttttcagtgacaagagatcttgtaaaagcttatagctgaacatctgtagatttaataattgcttgaatcatgtactcctcaatgataaagatctgaagcctagctatttgagttgtaaaatagaaggttccaattcttggctttccttgacaatttaaaattatatttaagcaagactcaaagctttaatgaaatgtatgttttaacattcattatattagactcagatttctttgatttgtctggggaagaaacataaagttgagttaaacacacataaagttgagttaaacactatctccttgccaatttcaaagtctactttgtcaatcttagaagaaaatattgatgttagcttagttttttgctgagattcattttaataatttatttcttcaaaaataattcattgagcaccctccattcagcaggtttaattataggtactagagatacagcaaacaaacaaaagttcctgctctcatagctttactttccagtgagggattcaggtagtaagtaaagagtaaatgatataatttttcatttcaaaacaatgcaatgaagcatattaagatagggtaaggagaaggctatgcttggtttaggttggagttgcacttttaatgagggtggtgaaagtaaattttgcatttaagaatgtgactatcttaggtaagatttccaggaaactaactctgaagcaagaaattaggtacaagtaagttgtgtgtggtgattcccaagaaccatggcaggaaacaggcaagtgctgagaaggaaaggattccaataaaaagtgtacaaatgatcaggaagctgccacaggcaacccaggctccatccttctatggaattctgggagactgtgtgaaccatgtctcatattttatcatccaaagattgagggaaatgggaggcacttggctactaattcccttctctaattaactgaaggctgctttggggaacattttttaccttctggcctgacctgtatgcatgtcaatcatgcaccattggccaatgaaagcaacatctcagacgcatgcagcaaaaggtctcaaacatataggcgaatcagaattgctgaaggaaaatgggcagggcatgggaagctcagccatagtgacacttgtaaaagcctggaagtggtaagagggaatgttacacagtatatggaggaggagtatacttggagagatcagcaagtacaaaacacctaagtaggcaaacattgcttgtaaaaaatagtttcattctacctacctcaatatctatatttgcatctatagctatactattgttcaacttgtatttggtctatatattggatggctgacatatcattttggaatactcattcaccaatacaaatgttagaacaaatcttactgtataggagaagctaaataaattcttattatttattttactctctaacttattttactgtctatgtagagagtaaaaaaaagttaaaaaaaaactggtactcatgaagggtaaagattttatttagtggtaaatatctctaaactaagtttattgacacaattgttgttacttggatagccaagttgtttccagtcattcttttttactgaggccaaagtgctcagttacagttacaaaaacagaatgatactttgggaggccaaggcaggtggttcacctgaggtcagtagttcgagaccagcctaaccagcatggagaaaccctgtctctactaaaaatacaaaattagccaggagtggtggcacatgcctgtaatcccagctactcgggaggctgaggcaggagaattgctggaacctgggaggcaaaggttgcggtgagcygagattgcaccattgsactccagcctgggcaacaagagtgaaattccatctcaaaacaaacaaacaaacaaacaaaaagaatgctgctgctcatttagcaaaaaggrcactcatttaggacactgttcctgttgaagggtcactgttctacaatcccttagccttcgtattgttcatcttttaatcaatgtttaaatcaatctattccaaacttatcttttgatgtaaaacactagtaatgcatggcccagtaaaacttcttagtagtgcatgacatagtaatggtaagcatttagaatatcaatttttatatatttacatataatgtttacatttgcatacaggtagggttagtattaccatctccctctcatagatgattacacagagccatggcaatagtatgcagcttgcccaaatttacatatattcaaactgtttcattgcaattgtgaaatccacactctttccaccatggctaatcacatccatatatatatatatatatatatatatatatatatatatatatatatgagttacatgatgtaattttaagtcctgatagcagttttcatcgtatatgaacagtacacaatgtagaaaataatgcatggtattcatattaagaaagtgagtaaaaaagcaataagacaatataaatgataaaatactactttttgccttttttttctttaagacattcattttgcaaatcacaaaaacagctggttgctttctctaagtcagagcctcaagaagtttcataaataatgtgaaatgaatacacataaatatctgtgctataatggtgtattcctttgagaaaaataagtgcattatatactttaccaatgccaattggagcagctttcctgggatgagtaattattcaaatgactttgtttttttactggaactttttaaccttatgcacgtgttttgttttcattatcaggaaaaaatgggtccttgtcttagcaataattgttcacaaaatatttcaagttatattttcataaaaaataatatgttctaaagaacataaatcacaataaattttattctatatttttgtgatatactttatgtgtagctatatgtgtgcatatatatatacagacacacacatacatataaagttttactgaagcataacacatattcagaaattgcaaattcttaagtgaacaacccagtacctttgcacagtgaatgcatgtctataattaatataactctaacaggaaataaaatattaccaatatttgaaagattattttgtacctcttcctagttattaaactcagtctaccccaaagataatcagtagattgactactttttccaaaataaaatgtaaccatttttgcagcctatataaataaaattatacaagacataatatttgtttattacatcttttctcaacattaggtttgagactcactcatgttgtcacgtatagcaaaagtttgctcattctcattgatatattttattctattatgtaaatattttaaaagatattcatcagttttactgcgggaggacatttggataatttccagtttttgtctgttgcagagagctgtcgagcaatcgaatgtgtatcttttgatgctatatgcatatacttcttgaatatgaaactaggagtggaattcttgagtcataagatgagtacattttcagcattagtatgtattgccagtttctcaaactgcttttgctaatttccggttctttcagttgtatatgaatttcacattccctcaaatcttgaaatgattattttaataaattttgctaaatatggtgaatgaatatttttgatgagaaataatatggaatattctcttacatggtattggtcatttggatatcttattttgtgaagattttgaacaaatatttttgcctttacatattggattattttctttctaatttttagaggttttatgtgtgaacttattataaatgtcatatttgcagtataattggcataaattaggctacacatatttaaagtgtgagatttgataagtgtagacacgtgtatatactactgaaaccatcatgacaatcaaaataatgaacacgtctgttacmcacaaaaattttgtgatcctttgcaattcctcacaccaattcttccacccccacctttctggttcccaggcaacagctgatctgctttctgtcactatggataagtttgcatttttagaatcttatataaatgaagtcatatagtatgtacttttttgtttagcttctctcagtataatttagaaattcatctgtattgttacatatgtcaataaatctttcctcttggggagttgtttaagaggtatagagtttcagttctgaaagatgaaaatgttctggagattagttgtgcaacaaagtgaatatacttaatactacagaaccgtacctcagaaatagttactatggtaaactttatgttatgcatttttgttagaataaaacattaagataaaaatttaatactttgattttaactcaaagarttttaactgaaagaattccatgttaagatatggaagactggagtaaggtcagatttgcaacgatatggtagagtcaattgttctattttgccgtgtttgaattttaaaatccttgttagagagccaggaattgagatcagtatgcagatggagaatcatatttaaagcacagtggaaaaaggtcaggttgcagacctaaatttggtagtcaacaggaaagattatatgtaaagccatggaaccggagaagattatctgcagggaaagtatagattgagaagaaaaagagatccatgatcagtcaagaaatactccaaacatattattcagaggaaaagaagccggcaaatgagcctgggattgaaaggctttgcatggtatgaaagaaataagaagaatgtagtaccactaaagacgagaagagaatcattcaagaaggaatcacataattgttagaacatcaggtaaaatgaggactattttagtgcctttggtgatatggatgttctataaaagcgagttgagaagatattgtaaaatgagaaaataaatattttgagatattttccaatgtagaaatatggttactagagagacaaatgaagtagtagaggggtttatttttgaaagcataaaaatattaaaacagtattaaacaccgatgaggatgaattaacgcagagggagtaacttatatgaataagaagaattagcatgagaaagtttggtaaaactttgttaaaagagttttgtagacaggccgggcatggtggcatgtgcctgtaatcccagcactttgggaagccgaggcgggcgcatcacgaggtcaggagattgagaccatcctggctaacaaggcgaaaccctgtctctactaaaaaatacaaaaaattagcctgacatggtggcaggcgcctgtagtcccagctactcgggaggctgaggcgggagaatggtgtgaacccaagaggaagagcttgcagtgagccgagatcgtgccactgcactccagcctgggtgacacagcgagactccgtctcaaacaaacaaacaaaaacaacaacaamaaaaaaacagtttggtagctagttgggatgggttgatatttgggctctcctacacaggggctattgttttctcagtgaagtttaaggctattccatcagttgtaattaagatttttgcagtagtgagtgttcatttgttattcatggtcagtaatttaaagtagtaacaattgtcaggattttgaatttttctccaggtctattcagcatgcttctatgacaaaatgaggggttgaaatttcagtttaatcactttaatagaaaacatccacattaatggataattatgtttgagaaacctgtgtaataacatgaaactataattacggtattgtgtcaacagaaatttacatgtgtatatatgtgtgtgtgtgtgtgtatatatatacacacacacacatatataatgtcagtggaaatataaatatacttcatacatattgcaagtttggttccagacacctgcaaaatgaatattgcagtaatgcaagtcccataaaattgttgtttcccagtgcatattatagttatgtttatgctataccataatatattaaccttggaatagaattatatctaaagaacaatgtacacaacttaatttaaaaataccttatcgctaaaaacttgagtattatctgagcctctaacaagttgtaattctctctgctggaggagggtcttacctcaatgttgatggctgctgactgatcaaggtggtggttgctgaagattggggtgaccatggcaatttgtgaaaataaaacaacaattaagttggttacattgactgattccttttttttttttttttgagacagagttttgctctttgttgaccagtcaacactgaccagttggtactggtaccaaaacagagatatagatcaatggaacagaacagagccctcagaaataacgctgcatacctacaactatctgatctttgacaaacctgagaaaaacaagaaatggggaaaggattccctatttaataaatggtgctgggaaaactggctagccatatgtagaaagctgaaactggatcccttccttacaccttatacaaaaattaattcaagatggattaaacacttaaatgttagacctaaaaccataaaaaccctagaaaaaaacttagtcaataccattcaggacataggcatgagcaaggacttcatgtctaaaacaccaaaagcgatggcaacacaagccaaaattgacaaatgggatctaattcaactaaagagcttctgtacagcaaaagaaactagcatcagagtgaacaggcaacctacagaatgggaggaaaatgttgcaatctacccatctgacaaagggctaatatccagaatctacaaagaactcacagaaatttacaagaaaaaatcaaacaatcccatcaaaaagtgggcaaaggatatgaacagacacttctcaaaagaagacatttatgcagccaacagacacatgaaaaaatgctcatcatcactggccatcagagaaatgcaaatcaaaaccacaatgagataccatcttacaccagttagaatggcaatcattaaaaagtcaggaaacaacaggtgctggagaggatgtggagaaataggaayacttttacactgtcagtgggacgtgaagtagttcaaccattgtggaagacagtgtggcaattcctcaaggatctagaacttgaggatccttgacccagccatcccattcctgggtatatacccaaaggattataaatcatgcttctataaaagcacatgcacatgtatgtttattgcagcactattcacaatagcgaagacttggaaccaacccaaatgtccattaatgattgcctagattaagaaaatgtggcacatatacaccatggaatactatgcagccataaaaaagatgagttcatgtcctttgtagggacatggatgaaactggaaaccatcattctcagcaaactgttgcaagaacaaaaaaccaaacactgcatgttctcactcataggtgtgaattgaacaatgagaacacttggacacaggaaggggaatatcacacaccgaggcctgttgtggggtggggggaggggggagggaaagcattaggaggtgtactcaatgttaatgatgagttaatgggtgcagcacaccaacatggcacatgtatacatatgtaacaaacctgcacgttgtgcacatgtaccctagaacttaaagtataataataataataataataaaaataataataawaaaaatcagttggttgatttggctttatctctgaattctctattttgttgcattggtctatgcatctgcttttatattagtaccatactattttggttactatatccttgtagtataatttgaagtcaggtaatgccatgcctccagatttgttctttttgcttagaattgtttttgctatttaggctctttcttggttccaaagaaattttataattattttttctatttatgtgaaaaatgatgctggtattttggtataaattgtattgaatctgtagattgctttgggcagtatggtcattttcatgatattaattattccagtccatgagcatcggatgtatttccatgtgtttgtgttgcctatgatttattccagcagtgttttgcagttctaggtgtagagttcttttacctccttgtttaagcatattcctagattttttttagttattgtaaaagggattgagttgttgatttgttttcagcttggttgttattggcatatagaagtgcagctgatttgtgtatattgatattgtaacccaagactttactaaatttatttatcaactctaggagtcttctgaaggactctttagggtttcctaggtatatgatcaaatcatctgcaaacagataagttgacttcctattttctgatttggatgtatttatttatttcttttccctgattgctctggctaggactttcagtgctatgttgaatagaagtgatgaaaatgggcatccctgtattcttccagttcttatagggaatgttttcttcttttccccattcagtatgagttggctgtgggtttgtcatacatgttttttattattttgaggtatgttccttctatgcctaggttactgagagtttttatcataaagggatgctgggttttattgaatggcttttctatgtctattgagattatcatatggtttttgtttttaattctgtttttgtggtgaatcacatttgtcagtttgtgtgtgttgaatcatccctgtatccctggaatgaaacccacataatcatagtgaattatcattttgawgtgctgtcgaatttggtttgctaatattttgttgaggatttttgcatctatgttcatcaggaatgttggtctgtagtatttttgttgttgtttttatgttattccctgtctttgttattagaatgatactggcttcatagaatgagttaggaatattccctctttctcaatcatttgaaatcgtttctgtaggataggcatcaattcctctttaaatgtttggtggaaattggctgtgaagccatctgaccctgaacttttgtttgctgacaaattttttgtcactgattcaatcacactgcttgttattggtctgttcaggatttctgtttcttcctgattcaagctaagagggttgtatgttttcaggaatttatccacttcctctggactttctagtttgtatgtatagaggtgtttataatggtcttgaaggatcttttctatttctgtggtgtcagttgtaatgtctctattttaatttctaattgagtttatttgaaccttctctcttcttggctaatctggctagtggtctatcaattttgttcatcttttcaaagaaaaaactttttgcttcatttaccttttgtattgatttttgatttcaaattcacttagttctgctctgatctttgttgttgttgtttatcttctgctagctttggatttgtttttttcttgtttatgtagtttcttgtggtgtgatgttaggttgtctatttgtgatctttcagactttttgatgtaggtatttagtgctatagactttcctcttagcattgcgtttgcagtatcacagaggttttgataacttgtgtcactgttatcattcattttgaatagtttttagattttcatcttgattttattgttaacctaagcatagttcagaagtaggttgtttaatttccatgtatttgtatagttttgaggattcctttgggaattaatttctaatttcattctgctatggtttgagaagatayttgatattgtttcaagtttttaaaatttattgagaattgctttgtggtttgttatgtgttctatcttggagaatgatttgtaggctgatgagaataatgtatattttgcagttattgggtagaatgtgctataaatatctgttaggttcatttrctgtagagtgtagtttaagtccagtgtttctttgttgactttctgcctcaacgatctgtctaatgctgtcagtggagtgttgaaatcgcttctatcattgtgttggtgtttgcctcttttcataggtttagtaggaataattttgtgaatctgggagctacagtgcatatatatatttaagcttataacatctttttgttggattatccttttatcattatataatgaccttctttgtctttttattttttttacttttgttgctttaagttctgtttcatctgatatgagaatagctactcctgcttgccctcagtttccatttgtgtggaatatatttttctatccctttagcttgagtctataggaatccttacatggttaggtgtgtctcttgaagacagcattatttggtttgtgattactgtatcaattctgacagtctgtatcatttaagtggagcatttatataattgacattaaaagttactattgagatgtgacatattgttccagtcatcatattgattgttacatagttactttgttttcttcatgttttattgttttatagggatgccatcttctattagaaggctgtttcattatcgaaaatttgttgtttactctagccactttcatcagttgtcttaggctgatcttctggataacttgcttcagcttctgcatcaacccttgctgtttcaccttgcacttttaagtcatacagagggcatcattccttaaatatcataaacgaacctctgctggcttcaaacttttcttcttcagcttcctcaactctctcagctttcatagaattaaagataattagggccttgctctggattaggctttatcttaagtggatattgtggctggtttgatattttatcctgaccactaaacctgtctccatatctgtaatacagttgttttgatttcttatcattcatgttttcactggactagcacttttaagaacttttcctgtgcattcacaacttgcctaactgtttagcataagaagcctagcttttagcctatcttggcttttgacatgccttcctcactaaagttaatcatttctaccatttgacttcaagtgaaagaccatgactcttcctttcacttgaacacttagaagccattgtagggctatcgatcagctaaatttcaatatttttgtgtctcagggaacarggagtctctagtagaagaagaaagatgagtaacagctggtcagtgcggtagtctgaacatgcacaacatttcactgtcttacatggttgtggtgtgtggtgccccataacaattacaagagtaatatcaatgatcgtagatataatgaaacagataaaatatacaataataatggaaaagcttgatatattgtgtgaatgaccaaagtgtgacaaagagacacaaagtgagcactttgtattagaaaaatggtgctgataatttattcaatgcagggttaccacaaatgttcaatttgtaaaactgcaatatctacaaagtacaataaagcaaattgcaataaaacaatgtgttcttgtatttgtaaagagactgagaataactagaacaaataaatactataagtcatttaactaatatgatatgttatgataattttattttgccttcctcattttctttttaatatattcatttagagagggggacgtcaacaataacttttagtggaaaaattgatttactcctacaaccatattatgtaatacttgaactgttccaaacctcattatctaatcaagaccttaatatgactatttgtatatgtagatatacataggtatatataaatacaaattgtgtacattggaaaataactagtaaaaatgtctacaatcttcttctaaaatataagcattaagaatttcagaatcattctaaaatgattagctcaatattttcagcaatactgtttttaataatgattagaattttttgtaataaagacataaaaattctgatatcttagggatttttttgtctattactgaatttataaattaactcactgccactaaaattttccaaacaaatttatatcttgggctaattattttcatttctacatcgaaaattacataaagtggagatatttagcttattcactcccataacctcagaacttaacaaaaaacctgtcacttagcaaataatcaataggtaattcttaaattttaaacatttttaacataacatcatatataattgtctttttgaactgtatttgcaaataatttccaaaataattaggcataggaaaaggtctcaatgtatcacagctccgaatatgttacaataattcactaaatgcctattctccaattgaaatcaccaagctaaatcacacaaacctcttttaaagaaaaatattcgatacattgttttaaaagaaaacgttgtttggatgtagctgaacatcagaagttcctctagttaagaatttcaagtccttatcctttgagtcttagttatatcatgatataactataatggagaataataatgctgtcttcactgttctaataaaataattaaacatgaaaatgttagtggaaaattttataaagacaattgttacataataataagggataatagttaactgatacaaactattaaaaaaacagtatgtaggtcttctccccccacactctgactccctaagtaacataattagaagattaatgaaatctgttgtcttaaaagactagcatatatcagcctataatcctctgaattatattgtcataagttgtcattttttgagatttctacaatcataaattgttgcacaaaattgttttgttgcacaaaattgttttgttgcacaaaattgttttgttgcacttgcttaatctgtatacagatgaaaaataagataccagatataaaaatgcaaaaagaaaaaatctctccatccagttaattcatatttttcgtagtggtactgctggtaacgcttaaccaggctttaaacccatgggaagcaaggcaaagattatataatcatatagttgtaagatcaatgtattgcttagatcattataaagagtgacacaaattgagactatttttattgagacttaatttttgatctagtgttcatattcatttgataacaagaatatgccacttgtagttataatgagttaatgcttccagaaatattgaatgtttaaaaatttcaaaaaagccaatgctttgtgacctcttcattgctcccataaaatttaaggatgtgattgtgtctgggccactttgaaggtttaggcaaaggaacagtggaatatttaatgaaacttagaaatgcagcagagctggtctcagactctggggtgtgttgtaagcattattgatgtgggttttttgcaaagcagagatatagaatgttcatttgagttttatcaaatagtaaatgaaagagacttaataatactgatatctcattagtacataaatactggcctgactattgttaaatttaaaaataaagacatataggtgctaagtaaatttacgtaccagacagtatcatcttgatttataattgtgtgtattttttttaatcttagaccacactttcagacatggtaatagaactgacactcacaaatgcatgctttctttaaagatattaatctcagtattgaacagagaaaccaaacagcttgtattgaaagtagaaatgtaatgggcttgtttggagaaagtctaccagaataacagtcactagattcaacatgcaagtgccatcatgatgaatgtttacaacacttttttgagagccaattatactgtttttttgtgcaggaactggagatcagccagatcacttgtatgcacaaagctgctgtggatctgtctttcaaacaagagctgcagaaaacgctatagcaaggttgaagctttatccactctggtaagagaagctttctttttctttgctatggtgagagtttgataagaaatccttttaaaccataatgtggtcagggagaggagactctgttatatgtttataagtcagaaaatgttttttctttgaaatatttttttcactatgctttgtgcctttatgttatagcaagataaaactgaaacactgagtcatattgcacatgttaaatttgtattggacatagggaagtcttaaactactcttctgttgagtgaaatgtgaagtcattttatgtttatactgtagatcttctggacaggacaaagggaagaaagattggtattctgataccatggctgagagtgaatctatgtgtttaagttttcccctgaccaatggtgttattaattcccagaagctcaccaccaccaaattcggcctttggattcacttgcagatatttttgaccactctattctctttttatatttaaaattggaaaagctggggattattctggatgagtttatttgaatatggttttctcactttagctctaaagactgtaactgtgcacatatatacaaagtacaaaattctgtttttcatgtaatttcttcagcctgtaatgtgcttcaacatttgtatgagaatctctacctattataaactctatctgaattcatatcagtctaaaatgacaataaatattgagagcatatacatgtgtatacatatacacatgtatataagtacatatgtgtaagtatatataaatatttgacatgagcaaaattaattttagataattacacatttacatrttaaagcaatgtaatccctatggaaatttatagcttttaattttcatttatatggcccttccttttcattttcttggtaaactttagttcagaaaacaataacataaatatcaaaaagactttacaaccaaagagctacatctgaagataaattattttttaaataaacttgtatgattcagattttattctttttaagttgctcagttacatccatgatttaatgtatatatctatgagatttaaatacaatcattttcaggagtttacaccagaatagccttccaggcttcaaagttataagtagcttgccatgtctgtctaataagttgccaataaaaattcatgcttatctgataacttcaataggtatttattgattaggtacattgctaaaagcttccaggagaggaaatatgtagcttaaataaatttaacctaacatctgtatagatttaatgaggatttaacatatatgcttaaaaataatgaattcatagtgaaggtctggctaaggacaaatagcagagtcaggaggagtcagtaatgacaatgaatacaatgagacttaatttttcagatgtaaaaaataattctatgctttaatgcacgagcttaaaaaactttagcaatgccgttttccccttgttctgccctcatttaaattatgcatgcattcaattcaacccatttgaaatatttacctgtgtaccttgcactgaaagaaatacagacagccttgcctctgaaagagattctagtttaaaggggagctgaggggaaaaaaagtcattaactatgttaccatgaatccatgtagtaaaaaaaaatatatttgctttaaatttctgtggtttctgcactcttaaagactgttgcaataggcacatgcagcaagctacaacaacaaaaaagtatcaattccctcagtttatatctttccaacttttaagcgaatctcagacagaaagaaaatccttctgtgtatatatatatatgcacacacacacatacacgtgtgtgtgtgaatgtgtgtatgtatgcacacacatacatatatatgtatatcattttatatatatagttataaatatatgtgtgtgtgtttttttcctttcattgttatcttcacgtttaggagctacaattgttaacatacatacacatgctttagtttagaagataggaaagagaagcaagtatagcatctctgcccccctgatgagtttggcacagcaggatatcctaccattttctactttcatgcctttgcttttgctgttcatcttgagaacactgcttttttctactgtctcttgtccaggttctaactgaactgtgtggctcagactagaggctgctttatatgaagatatcttcctatcaagcctcatacccactccagggaaagtgatttcttccatttgggaattttcttataacttcaattttatgaaaaaaaaagttgaacaggaaatattataaagtttacaaacaggatgcaaattcattgctttctaattataaatacaatgagacagttttgttacactttctttccctttagacatattttgaggaawctgctttttagagagatattttgtagaaaagtttttattacttttcaaattttctttgctttattcattctctttttcttatagctgataaaattgcatcccatttcactgagaagatacagattatttaatgggttcccctgtgttcttttgcctacaaatctacaaagcttacctcccaatctgccctcacactgcacttctttcctttatttacaatgggaagaagtatcccaacttgcatgaccccaccttccatctcttctacttgtgacttctcaggtataygcctctgcctgataaatatttttattcctaatatttagctctattttctccatgaaattgttcccattaaacacctctttatatttactacacatctctaccaatatttggctgggactacacatccctctctaaataccatccatgtatctgctacttcacagaaacatctcaaaggtttttttgtgtttgtttgtttgttttccagataccatttccatatctttgccttcatttttctctaaatttgcacaatccttgtgattcttccaaattttctgaggtagttacattattttcttgttgctaagtccactcagttttcttggtttcccaccagtatttaagaggtaatgattcaattctttttgagatagtattccctttacctccttaacactctcctaactttgttttgtttcttttctcttcctgtttctttggtagctttttcttctagtggagtacacttttaagagttcctcaggacacaatagtggacctaatacttcctctctctctctctctgtctcgctctttcctcttctctccatagtctttatttctataattacttaaaatatcagcaatcttacagcacaaccctatagcgtgtatcaatagttgggtgcattccttgattctatatggatacagatgaaacttttgagtgtacaatggtgcgaaggtgttatgtattcaatagaaagtggcatgataccctcttaaggtgcagggaagcagcagcaagctgcagctccagtcagtcactcaatcatgatgggaaataattgatactctacagtatactgtgttgccagataattttgcccaactgtaagctaacacaagcattctgagaacatttatggtaggtgaggctaagctataatgttcagttggttcagtatgttaagtgcatttttgacataatatttaacttataatgggtttattggaaaataacaccgttgtaaatggaggaccatcagtatactcgtcaagggagatttggggtcaagcaatgaaaacaccctctctcctggaaaatatttgattaggttttaccatgtttttattttgatgtgtccctagcattctaagatgctttccaggaagcccactctggccttacctcacagggaactctaggcaaaatggtatggctaaaccacccaggtccaaatagaaccaaagaaaggaggcagagaccacagtgacaagagtggatcttggtgggaccactgtgttcctgctagctgtggtgcccaattgcagataccagtcaacctcattgccaacctgcagtacagagctaggtgtctttgaaagcatggtgaaaatttcacctagtttgagtccctatatgcttttaactcaccctgcctcagggacccaccccaacaattctgcctaggcaaggagatgccaatctcctccctttttgaagaaatgaaggggctagaccagcttaacttggcaacttaacaagcagcagctttactcagcaaagaaacactcccagtgactttgcccaggcaaggaacttcccacttctgtgaattttaaagaagcaaatgggctaaacctacttaacctagaaaatcaagtagtatcttcactccacacataagccctcccaaagagtcccaaatcctctcaacatagccaaaaaaaccacttcatggctccatattgacagggagaaaatccttaattgtgtatttctaaggaccatagcctctggatccacctgtccagagtaatgactccacctaaccttggagcccagcctccagccctgcccaacttcaggtcaccaataacataattggctgaccagagtacacatcttgtgactgacctcaaaatccatcacagtactcacccagcaactccactttatagccaaacaaagccagtgttcccacaggccatcagagcccaaagagcaacctcacccaaacaaagtcaatagcccactaactagagatctcacagaaagctctgcctccccaaggatgtccccagctggcttttccaaaatcagaggctagattaaataatgcatgtgtatccctgccagagaacaccgtaaaggccaagaggggactattccctcaaatgtgcagacaacataaggacacaggattatgaagaatcaaggaatcatgacacctccaaaagaaactaataaagcttcaataatgaaccctaaagaaatggagatctagaaatctgtagcagataaatcaaaataatactaaaaaagatgttgcatggagtaccagaaaatatgaatataaaatgtagtaaaatttgaaaaacaatatacaaaattgcaagaagttagacaaagatatagaaacaataggaaagaaccagacagaaatcttagagatgaagaatacaatgactgtaatgaaaaattccatagaaaacttcaacagcagaagaaaaaactagctacttgagttgaaagacagaacatttgaaattattgtcagtggagcagaaagataaaggaataaagcttacagtaattatgggacaccatcaagagattaaactttcacataataggacttccagaaagagacaaataataataaaggccagaaaacgtatttaaagaaataatggttaaaaacttttcttgtctgggatagatgccaataaccagatacagaaagcatgaaggtcttcaatcaaattcaacccaaagagaagcacaacaagtcatataataacaaaacaataaaaaatcaaggacaagaaaaaattctgaggacaagtgataagaaacacaccatatatgaaagagggtgaatattactatcagagtatttctcaacagaaagtcttcaagcaagagagagtggaaagatgtagtcaaagttctgaaagaaaaaaacaaaaacaaaaaacgtgacraccataaaaaccttattcacccagatggaaaatcagtaaggaaacattggacttgaacaacactttagatttaatggtcctaacagagataaacaaaatatttcatccaaccgcaacagtgtatacattcttctcaagcacacaaacaaacattattcagaatagatcacatgctaaggtacaaagcaagtctcagcaaattttaaaaaatataaattatatcaagtatattttctaaacacaattgtttgaaacaaaattcataacagtagcaattttagaaaattcacaaatatatggaaattaagcaacatgatcctgaacaaccaaaaggtcattgaagcaatcaaaatgaaaatgttttaaaaatcttgagacaaacacaaatggaaacacaacacatcaaatctaggtgatacagcaaaaagcggttctaatagcaaagttcttgcaataggtacctacaacaaaaaaagaagaaaaagatctcaaataaaccacataatattacaccttaaggaactattaatagaaaaagaacaaactaggcccaaagttagcacatgggaaaaaataataaatatcgaattagaaaagaaaatgaaataaagactagaaaagcaacacaagagataaaaagtaactcttttttgaaaagaaacaaaattgtcaaactttagctagaataactaaaaaagagagaaaactcaaataaaatcagaaatgaaaaagtagacattacaacagataccacagaaataaaaaggatcataagaaaatactattgacaattgtatgtcaaaaaattggatattgtataagaaatggataaattcctaaacacatacaacctaacaggactgaatcattaataaatagaacatctgaacaaactattarcaagggaatataataagtaagaaaaagtctcccagcaagaaaagaccaggaccttatgccctaatagctgaattctatcaaaaatttaaagaaaacagatacaaatcctcaaactctctcaaaaagtcgaagaggagaggccgggagtggtagctcatgtctgtgatcccaccacttttagaggccgaggcaggcaatacaaaaattagcctggcatggtggcacatgcctgtagtgtcagctactgagccctgcttttcagagattcttttctattatgctcctcagtcctgctctctgtagatacatggttaagaatgagtacacgaggatcagagaggcttagttcaaaccctacttatattacctgccagttattaggaacttgagcaattaacctaaactgtacactctgcatttcctcatctttagcatggagataataacacctattttatataattaaatgaaataatctaaataaataattcgatcttgaaatgtatgtaacatctgcattgtttattcctgtaacctgatattttaatttgagacaatgattttatactatattagcgggtttttttgttgttgtggttttgttgttgttgttgttgttgctgttgtttttgaaatggactctcgctctgtctccctggctggagtgcagggacacgatctcagctcacagcaacctctgcctcccgggttcaagcgattctcctgcctcagcctcccgagtagctggaactacaggcacctgccaccaagctgagctaattttgtgtatttttagtagagacggggtttcaccgtgttagccaggatggtcttgatcccctgacctcgtgatccaccctcctcagcctcccagagtgctgggataacaggcatgagccaccgcgtccagcctatattagcttttaaatattccatgtgaatgaaaatgttcaccttttatgacattttagagaacatatggcaattatatacttcatttccacaagtataaatggaatggagtttcttttttgggaaaactaagaatgtgactactaaggatgtgaaagcttatcttcctgaatggataagagggtgtgtgcacatgtgcatgtgtgtgctagagtgtgtctgtgtgtgtgtaaggtggatgggagaatgaaataattctataatttaaacaaaattatgcttcattaagtacagaaccatgatattattaacttttccttttgaaaagataaaaagtaaaagaaaatatatactataattataatatgtataattatcttaattaaaattgttagcacattttaaactctattaatgtggcattataatattatgtataatactctctacctctccagtaattggatggtcaaagtcagagcaacagtaatatgaaatacatgtccatttatgtgtaaatgtagaatggaagcatcaaagctgcctgctaaaggtagaaggcagcccctcttagggaaacacacacttttccctccaagaagcttatagaacaaagctataacaatagtatcccaaatctgtgatggcctttctttccccaatacctccttccccagttagctgacattaataaggcatggacacttgaataggacaatggtgtaagagggtctgagcaggatacttagatgtgatttctctctctctctctcttcttctttttctttttttgagatggattctcgctctgttgcccaggctggagtgcagtggcatgatctcagctcactgcaagctctgcctcccgggttcacgccattctcctgcctcagcctcccgagtggctgggactacaggcgcccgccaccacacctggctaattttttgtatttttagtagagacggggtttcaccgtgttagccaggatggtctcgatctcctgacctcgtgatccgccctcctcggcctcccaaagtgctttgattacaggcatgagccaccacgcccggcccttctctttttatcttgaacttgtagtcatgtctttatatagcactgaatggagtatgcatttggagcagaggctttggatcagtctacctggattccagaaacatttctgccacaggttagctgaattagcctgagcaagttgcctgacatccctaagcctttgtttccttatttgtatatggtgaatgatactttattatacatatgattattatttttcatatgtgaaaataactaagataaatgtgtttattatagtgtcttgtgacttataaatgatcactaatgataattataattttactcttatagttcactttctgctcttctcaatatctagtaataatgcagaaaactcgtgagccaatcggtaaacgaatggcagcgtaaggttttccattttcttgagctaaaaatacacaccagtactctaaggacattgctgaaatagattttacccgaagagtcaatgactgatggaccacacattcagaggagacttgttaaggggcagatgccataatatactgcctatttgaatgactgcaaaataagttgtatacttctaatacagttattaagtgaaatacactcagatatttaaatatgtttattgcattaacatagtttgcttctattataaaaagaggaaaactttttaatttttattttattgagataaaatatatcatgagtataatctggactggagtatatgattattaatattggcayattaattttattaaaacagtttaaatattaaaagaaaataagtcatttgcaaattagaagaaataatcagaatgagtctttagttatacaaatgtaaattaatacccattcattcatcttggaaatacccaagatattgataaagttatatgcatgcaatacttcagtcttctcattgaaaagggatcatcatgtaatttcctttgctggctrgtgcaarattttggctggtgcaagattttggagtcaaaggcattagagaatgtcctcaataccatctgcaacttaacagtgctaggatgcaagtggtcaaatacaggtataatatgtataacagtatagtaatttgttttttcattgctataaagatactactggagactgcgtaatttattaataaaacaagtttaattgactcacagttctgcatggctgcagaggcctcaggaaacttacaattatggcagaaagtgaaggagtagcaaggtgcatcttacatgttggcaggagagacagagcaagagagcaagagcgaggaagtgctacacttttaaaccatcagatctcgtgagaactcactcactatcatgagaacatcatgaggtaaacaccccccatgatccaatcacttcccaccaggtccctccctcaactcgtggagattacctactaaacagttttgaaaatattgtcagtgtatttctcattcttcttaaattatgatgaaagactgcatagtataatgttcagagcaagaaatctggagccaccacattgctgcctaggcttgaactcagattctatcacttaatgagtatgggaatttgaataaggtactttatctcactgtctagacttagctttaaaatgtagggccgggcacagtgactcacggctgttatcacagcagttcgggaggctgaggcaggtggatcatgaggtcagaagatcaagaccatcctggctaacacggtgaaaccccgtctctactaaaaatacaaaaaattagccaggcattggagcacgcacctgtagtcccagctactcgggaggctgaggcagaagaattgcttgaaccctggaggcagaggttgcagtgagccggggtcctaccactgcactccagcctgtgcgtcagagtgagattctgtctaaatatgtatgtatatatatttttagtagtacctcctttattagattgttataagaattaattgatttaatcaatttgttcttagaatagtgcttggcatatgagattaagctctatataagtatttataatgcagatgctattcatgctgcccagccatccccacttgggaatcaatggatttcattgcttcagaagctggggaggtattatttagaacagtcagccgttgctcagatctgactctgaaattagtttggtgagtgaattggtggaatggtacccttgaatcctaacagttaaatataatttttaagaagtatatagccaacattttttcacatcaaaagaaaggtaagaaattttatttcaggctaaaaaaagaacactgaataaaacataagagaggttytcaccaaatggaggatgcatagtgcacttcctgtgatgattggaagagtgggggacaaaaatctaaagagaaaggctaaaccttttaacagctacaatcagcactattaagattcttcttttacaggtgatgaaatggaggtttaaagatgttaataggtggctgcaatgattctggaacctaggttcttctaattttaaacacaatgcttctaatttttatttccttctatcaaagtttttattatatatgttggttaatgaagtttaagctatgaagagagatctctctttaatttgcattctttcatccttacacaaataaccaggcctttcttgtgtgtgatttgctaacctatactaacaacttagttttgcagatatttctaagtggaagattgtatctctcgaaagcatagtcacacttattttccctatgtcctacccctttgaggctcctttttgaaatatttagcttgtatgggtatggctctaaatagatacatttttaaaacaagaacttcatttttactttctcattattaggcaagacagtgccaattctaatgtgaggaatcacgctaatagttcattacaggcaagacattatgaatggataataatgtaatgtaatgttcaatacattatgaatggatattttacacatcaagttttggacttttctggttttcattttcaattctttctaccatgagtcatttccagtatcattaaacttaaaattatattaaaatataattcaattattacactatattccctatacacacacatacatttatacatgtacatgtgctatacatgcatacatttgcacacaaacactcaatagaagaaattatatagtggatagtcaaatttttagttgttctatcatagaaaattccattgctgttggtaaaattgaaaacactatcattaccttatgttttctgagacttgttaattttttttatttaaatggagcacttacatgctaacataatattaaaactccaacttccataattttatgttaaatgacaataataataatattgcttcatagatgtcaaaatatttaatatttaatagtgttttatttaatgcaccctgtctgtatgatgtgaaatatgtgaaatccataaagttttgatacaaatagaaactttttttagtcttaaaacattcattaactaagtaatataataaaattaagaataatttacattcaagcaaacagtacaggcaaagaaagagttgcaaaacaaatctcagaaaacagctgattttctaattctacttgcatctcttttgtgtctgtgctcaaaaagcccatattattctgatgttcgtgcagattactttctgcccattctacatctttcttcctccactatacaacaaaatgaataggtgatggctctcagcacttgacactggtgggaaagattagcaggaatgttgactatgacatatcagatatattaagcccttgctggagggatgcagtgcagaaaaaaacttgtttgtcacagtaacccagatactctatgttttttttccaaaataaaatacaacaatttcagaagagtatattgaaatggaaactaattgccagtacaattgaattttaaattattccacaatatctttattgaattgtgtcacattagccagaatattgacccatgttatgttataaaaaggaaatagaaattttatgattctttttaaattgagagttagcataggcatgaaaattgattttaaaatgtcatttatttgacacagaagttgcatgttggccataagatttagtctacagcacattcttacaaccagagattttggtttgcttgtgtttttataagctgtagcaagctttaagatgtcaagggttgaaaaatgatatttttccaaatgcatgactgtttcagtgatactgatgttcttttaactgatctgtgagtaaattttgaaaataaattggtttctcataagttatatttttaataattaaggcaacaatccaggacttcttatagttccaaggttttgaacagcggctatatatctgctgacagaattttgtacttcagttaatcttgtgtttaagctagggtgagagaaggagtaaagaaggataggaatggttgaagggcagatttgagtaaaaaggttttgggatggttgaatatttcatattaatgctatctccatttttttagagttgtgggtcccccttgattttcatcattctgtcaatctgtatcattctgtcttatctttggataaaactccatttctaagcctcaattcaaggaaaacatattttgtaacaaaccactagtaagtaacctagtttctctgcctaaactggttttgtcatacatttaagtaattgagaataactcttcagaatgacttacaaattaagacttacaatttctgcttatacttcaaatttatgtacttttttatttccttgatcatataccagatataacatacgcatgatatgtgggacttatatttttctctttatattttacatttggtttttaatccaaggttttgtttgtttgagatggagtctctctcttgtcgcccaggctggagtgcagtggcgcaatctcggctcactgcaatttccgcctcctgggtttaagcgattctcctgcctcagcctccctgagtgacttggataataagcgcctgccaccatgcctggcaaacttttgtatttttagtagagacggggtttctctaggctagttggcaaggctagtcttgaactgctgacctcaattgatccccctgcctcggcctcccaaagtgctgggactacaggcgtgagccatggcgccaggccaatccaaggtcttttaacaagcataggctgcttggcaaatcattaaatagggttatttgggaaaaaatatatttctggaaaaagagatttttgacaaccaaaggtatgagcttcagttcaatcaatcaatatgtaaagaataatgaatttgatgaatgtaccatgggcctaacttctggaaatctaaatgtcactttaccagcaaggggtagaacaattatccgaaccataggtatagcctaaacactttttttgtgtaattgattatctgatcattaatgctgttacatagaaatgctcaattttacttctgccatgtagagacattcaaaagtcagcaaaagtcaggacaaagaagacccaagtttaaaggtgtatattctactttccagagaagatactcaaattcctactgacattaaattttgtttggttcacaatgtctcactatattttattactataaaaggagttttgaaatgtgaaccaatttgaaaggatgtgcagcataacttctatgattcagattttaccagaaaaagtatatatatacacatgtatatgtatgtatatatacacatatacacgtatgtatatatacacatatacatgtatgtatatatatacacatatatatgtatatacatatgtgtgtatgtatacatacacacacacacatatatatgtgtgtgtrtatatatatatatatatatgtcaggtaaatatttattcttgattttttatggccaaactgttcaagtagcaggctatatggaactggatatatttctaaattaaaattgtttcaaactataatattaggaatcttggaatgcaagttgttatacatctcaaagcaaaatgtggttcttaaagtattatgaatttttctacggtttatttcttatggagatgaactggtagtatttgcaattcatctcagcaatgacttcatattatgagctgctaagaggtggcccagcctattttatggtactgtaaatattgcgaatttagagaaccaatgaatagtcttgctacctatgcattagcttaaacagtaaacacttgtaaaatgcagttttaatttttttttaattttctttttgagacaggatcttgctttgtagtccagactgcagtgtagtggcacaatcatagttcactgcaggttttaacctctgggctcaagtgatcctcccactcccgcctcgagagtaactgggactgcgggcacatgccaccatgctccgctaatttttaaaaatcgttcttagagacaaaagttttcaccatgttgccaagggtggtctcaaactcctggggtcaagcaattcccccaccccaccctcccaaagtgctgggattatgagtataagccaccacaccaggcctgtaaaatgcatttttttccaagtctacatgaataactcagagtttcagaatcctacttaaaatggttaacttttaaaaaaaaattatggtctttattgcaattcctaaactatgggaaagacagtcatatttaagctaagtttaagtagtgttttttcctatctctgttttcctcacctttgctgctgcacttaacacataacatacaaagtaatttctacccatgcttttttctatgccctgatacaactctcttaatacatagggtcaatattagccttccttctccagtaccatgaaacacacccttcacattatcacaaacacattgagtccttgagtgtttargtctcatttttctttcattaccatccactacaagaaaacttcatgaagtgaaatggccttgtccattcatctccacttgagtaccaaaatattactatccattgctctatttttacttcttttttactcccttcagaagatttgtgtaagactaaartgtcatgcttttattcttctggtcccctttcagaattcagaataggcctcttaatttattccttgatctaggaagctggaaaactcactgagttgcaaaactggtaatgttaatttgtataattttcaaatttaaattatctatgtgatatatatttatatataatttaaaatttatgtatgtatggatatatgtacatatatatgtatgtatatctcaaagaggctgaaataaaactcagtttctttgttcatttttaatatgactggttcaagtccttggaattagggttttggataaaggactttgagcagaaatttttaacagatctgtaagattgaagaaattatcttaatttaggtataagaaatcctaaaaytttattaaattctacattaataacctcatatttcagtaataattttataacagatcatgaaattttaaaagttggagggagaaataatgttatattttttccctcatgaatgcatttgattgaaacacactatatagatgaaattttggaaaaggttttgttttgctgttctgtaacgtcttttgcaataaccataataactctttaacctagagaaaggtctgaaagttgtgagtgaaacaaaaatatgagcattttttctaggaaataatttcagcagaatatttgacctcaactttctactgttatttttacagtgacctaagtgatttcttggcagagtccaatcaacttttttcaattttctttccttccctagctagttatatttgcaatttctttaatactctttcttccttctacacacatgatgctttactctttttaaactttgtttctccttattggtactccttgtaatcagttgctgatgagctcagttctttgcaatattctctaaatatgcatttatactttcacttattcactttttcaacaaaaatgaatacttattcattacatttatttatttatttatttatttatttatttatttattgagatggagtcttgctctgttgcccaggctagagtgcagtggcacgatcttggctcactgcaaactccgcctcccggttgaagagattctcctgckccagcctcctgagtagctgagattacaggcatgctccaccatgcctgtatttttggtagagatggagtttcaccatgttagccaggctggtctcaaactcctgacctcaagggatttgcacatctcggcctcccaaagtgttgggattataggcatgagccactgtgcccagcccctattacctcttatgtgttaaaaactcaggccatccatcaaccactctagcataacccagacttatgtttatatgaatgattcacaaatcatatgctctgatcattcaatctacctacagttagtcatgagcagcatttgaaatgagaaaattaagattgtagaatattttatcaatagcccttctaaatggcttttatttttcaatagctaaaaaaagtttgtgcaaagaatgtacattctttgaatacgtatttacaaaatttattcaaataatatacttattaaccataaaggttttggaatgtgataggactctagtcttgtctccaccatttcttagttgtataatgttgggcaagaaactcagtttataagcaacagttttttcatttgcaaatgagcataataattacagctactttgtagttttgcttgttttttggcttttgataattaaattagatagtctatgtaaagtatgtgataaaataagcactaattaaatcctaggtcttattattatcatcattatcaccattaatattcttattaaaagaaagtatctctccttcatccatgaaatatacataatgcatggtggaaataaaatttcatattgcaaatactgcctataaatatatctcattcaaagaatgtaaacatgcaaaaatttaaatattaagccaaccatttatgtcaagcatttataagtcaaaaatatatacaggtacccacattcacagtcagggtgaatgtttaattctaatatattttgttcaatttacataaattctaatttaattaaattactaatactaaagcagataaataggattattagttgtatatgctttgtttggggtagaaaatgcaaataaacttccatcaatagatttttcaacatttaagcagataacatgattacttacgtttttactttattttaacaaggtatactttagccttaaagattattgaaaatttaagctctttcaacactgaagaacactgtgktcattctattggtcattgtggtcatgttatttaatataaaacattaaaatattttaagataggaatgtgcaaacaattgttcaatccacttatctatattcttatcatatatctcataaaccaaccaattttgaaaaaaaaatattcaactatttagttgtctctgcattctaacaaccagttgaccgatgcagactgttggtgataatttttattggatgtattagtttcctagtgctgttgtaacaacataccataaattagatggcttaaaaaaatagaaatgtattgtctcatggttctggaggcaaaaaaagtctgaaatcaaagtggtggcgggccatgtttcttttgaaacctgtaggaaataatctttccttgctttttctgacttctggattcatattaatttaaggcccagtccaatgatatcatcttaacttgattatatctgcaatgaagaccctaatgccaaatgaagttacagctgtagataccaaaggttaagatgtcaacatatcttctgagtgacatgattcaactcataatattgagcatgttgtatcttgtttagtccttttcctaatttttcacaacttcttcctggctacacttccttatgtgctcatccaaaacccatgagatctatatcaagtgccatttacatgatactcctacttctttgttcctgttattctgcagggtctaatctagttactctcttgcaccttaacctggccaaatgtgagcatttagtctagaaacatttttgaaactaataagattgctgccaatatccaggtgtagtgtcaatcctcaactgggtaaccagtgcctctggtcaatatttcttaatgtcacagctattcagtcttctgttttgtatgacagtcatttaaaaatctccagcattctctctaaaagtcctttaccaatttaatataagcctgattcataattaaatcaaatactgatttataaagaaaaatttttatctcagaatgtaaatttttccatcccacagttaatttatcctgaaaagcttatcacattttttccatctcagccagaagacatgatccttcacttgaataaaaaatacttccaacaggtttggcatattgtctactctttcttagctatcttgacttagttaactaatatttcttcttttgatccattttcaatctctgtctctattagatttttggtctattatatacaaatgtgtacatatatccctctatacacaaatgttcgaaatgtattttatataagcctattttcccctctaaatagcatttcatgacattctctttctaggctaaccattctttttagagtcatcctcacctggttatatttcctgaaatcttttttgtgtaattagagtttttcctccagtaatccattgaaattgccatgtcaaagattgctaatgatcaacatttgctacagttgaacacaaattaaaakaggttttgtatttgttgtatggacatacccattattctgacatattgttagttttcttttaacctttccaaatgttctttcttagagtcctatgaagtcctctctgaattctccttgatagattccctatttcaaggttttgtatcttcattgatcctctccacaatcatgccaggatgatctttctaaaattcaaatactgggatatcattctctggctttaaaaatatttaattatttatgatgaatccattgtgcataggaaaaaataaatcctcaaacttagattgacttcaaagtcctaacaatacagactgcatctactacactaaactcttgttccatcactttttcatatatccatgatactcctgtgtattcatatgcccactgactatctcttctctcaattattatcccctcctcttacaggtaccatgttgtaattatctttgtatgttagttattaacatagggtctagcataccattattattaataaatgtagaatgcatgagagttgaggaaataaagtcttatatccatgtcattccaggccttattgcaattttgctacaattagaacacctgtaattgacttaactcttctctgtaattcaggtttrctgatgtacagaggtaattctcttttgatagacaatcagaataaacaagtccaggagagacttgaggtcccggtgtcaccttgcctctcattcattcctttctacccctataattttcccatagattatctgctgctgctagaataggggtggaaagtttaaaaaggagaggtttgtctagtatcaccagttgaaactcaagatgcatctttccatagatcattgttatagatgcttattgctgtagtacaaatagtgctcagtcacacattgagttaaacttgttttgcagggagaaaggacattggtctataaaatgaactatcattaataacatggaatgcagcagcataaaatagctgctacttctactgatgaaattagggaaatgtcagttcaaaaaaagtggcttgaattaataagcagttcttcccattcggttcaaaatgaaacagccctgtaacaagtacacttgtagcaaaatatctaatctccttttgagcagtcagccattaaggtacactagttagaaaaacaagaaaagacacaatgattaagattatagatcttcaacatgaagtgaatttattttggctcaaaaaagtaactaacgattgttttaaaacacctacagttaggaaatcatgttgtagattttaaaaatgggatttttctgacaactcatatattgtctaaatcaataaaaagtaaccaatatgtgccctgcattttataaaggaggctcttggacttgaaattgttcttatgagaataggattaacttgctacattttgctgatcacacataatattgtaaacactatttccgtgaggagaataattaaaaaacaaaaatgtatttttctttacactgtattgactaatgccgatgactttctggtttgagaacttgtttaacattaattaaaatccattcttagaatctttatgtttctgtatttttttcttcaggtttaatttcccacaatagtcaatttagttcaagatttttatccttaatatgaatttagatgaataaaaactatcaaatgaattttaattttacctttttatatctttcttctcaactctttattcaagttgcttttcatgtacttgcagaaaaaaaaaacttgctgtaagcatttttctggagcaatttcttccttgaaatgcttcttgttctaggcagtcaaaacttggttttaactatatgttatgtgctgacaattctggttacttaaaaaatagttactgaacaaaacaattctctcttctcttcctgcttctctttccctatccctacttctgctctccctccaaccccttatcattacactaacatgtccaaactcccacggttaaatccagccctggttttaagtatgccaatacttgggaagctaaagatggcaaaataaaaccgcacacacttgctgaccagttttaagttcagctcataagcaataatttaggcagaccccctagtgtaacactaccattctactttattccccccgaaaaattactctaacaaatctttgactttgtaacatctctgctctgcgcaaatttccaacacttcccatgtcttcagattctcagctgcctcttccttttctatttcagcaacaaaatctctcagaagaaaacttccacacaggtccaatctaccattcatatatcttgagcaacagatcttgtcccttctcacctaatttagtaacatgagtatcaatttgtcattggcaaacttatgattctagctctgtatactctcctgagtttcaaagtcccatattcagtttattaggcatcttaccttaaggctcaacatcttgtttcattcattttcctctgaacaagcttctttgcctcctattagctattcacttagatttttagctgaaacccagaagagcgaagtcatctatccctcttctctttctcgatagtacttcccacattaatttttcttctatctgtgaaatgtctacagctggtccattttccctccattcttattctaagtactgtttttcagtatacaaaagtcaattttatttttatttatcagacacacaatttaacataaaattttgtttaattggaaaaaagaggttaaaaatcacggtttacttgcaatcacaaaacccaaataccttggaatatatattaaaaaatacagccttacatggccagagcaggaggaagagagtgaagggggaggtactacaaacttttaatcaaccagataactcactcttataacttgtgataactcactcactatcgtgagaacctcaaggaggaagtccaccctgatgatccaatcaccttccaccaggccccttctctaacactgaggattaaaattcatacatgagatttgggtagggacacaaatacaaactgtataatttggtccatggtccctctcaaatctcatgttcttctcaaattgcaaaatacaattgtcccttctaaacagtcccctaaagtcttaatttctttcagcattaactcagaagtctgcaatccaaagttgtacctgagacaaggcaagtcccttccacctatgatcttgtaaaatcaaaataatttagttacttccaagatacaatgtgggtacaggcattggttaaatactcccattccaaaaaagaaaaatcagccaaaacaaaggggctacaggccctgtgcaaatccaaaactcaatagggcaattattaaatctcaaagctccaaaataatctcctttgactccatgtctaacatccaggccacactgaaccaagagttgggctcccaaaactttgggcatctctgtctctttggttctacatggctcagcccctatggctgctctcaagggctaacattgagtgcctgcagcttttccaggtgcatggtgcaagctgctggtggaaataccattctggtgtctgaaggattgtggccctcttctcacagctcccctaggaagtgccccagtggggaatctgtggggggcctccaaccccacgttttccctctgcactgccctggtagaggttctccatgagggctacaaccctgctacaagcttctgactagacatccaggtgtttccatacatagatacatcttctgacatctaggtggaggctcctaagccttaactctcgtcctctgtgcacctgcaggcttaacaccatgtggaagccaccaggccttaggactggcactctttggagcagtggcctgagaaattttggggmccctgttagccatggctagagttggagcagctgagatgcagggagcggtgtcccaaggttgtacagagtagtgaggccctgagtctggcctgaaaaaccattcttcaatcctagtcctccgggcctatgatgggagggtctggtgtgaagacctctgaggccctttacccattgccttggctactaacatttagctcctctttacttatatagatttctgcagccaattttaattcctctccagaaaatggggttttcttttctactacatggccaggctgcaatttttccacacttttatagtctgcttcccttttaaatataatttctaggtccaattcatttctttgctaaaaaatataagcataggctactacaagtagccaggatatatcttgaatgttttgttgcttagaaatttcttacaccagataacctaaatcatctctctaaatttcaaagttccacaaacccctagttcagaggcacaatgctgccaagctctttgcaaaatcgtagtaagagttgtctttactccagttttcaataagtttctcattttcaactgagaccacctcagaatgcttcactatccatatcactatcagcattttggtcacgattatttaataagtatctaggaatttccaaactttccctcattttcttgtcttcttcttagtcctccaaactgttccaacctctgtccattacccagtaccaaagttgcttacacgttttaaggtatctttataacaaaacttcactcccactacctttttttgtattagtccattctcacattgctatttttacaccaacataatataaggaactacttgatactaggtaatttataaataaaagaagtttaattagctaacagttccacaggctacacagaagcatggctggggaagcctcaggaaacttacaattatggcagaaggtaaagtggatgctgacacatcttacatggccagagcagaggaggagagcaaagtgggaggtgctacacacttttaaacaaccaggtgttgtgggaagtcagggaccccgaatggagggaccaactggagccacagcagaggaacataaattgtgaatatttcatggacatttatcagtttccaaaattaatacttttataatttcttacgcctgtctttactgcaatgtctgaacataaattgtgaagatttcctggacatttatcagttcccaaaattaatactctcataatttcttatgcctgtctttactttaatctcttagtcctgttatcttcgtaagctgagaatgtacgtcacctcaggaccactattttacaaattgattgtaaaacatgtgtgtttgaacaatatgaaatcagtgcaccttgaaaacgaacagaataacagcgattttagggaacaagggaagacaaccaaaggtctgaccgcctgtgtggtcgggcagaatagagccatattttttcttattgcagagaggctataaatggatgtgcaattaggagagatatcgcttaattcttttcccagcaaggaatattaataattaataccctgcggaaggaatgcattcctagggggtggtctataaatggccgctctgggagtgtctgtcttatgcggttgagataagaactgaattatgccctggtctcctgcagtaccctcaggcttattagggtagggaaaagatcctgccctggtaaatgtgaattcagaccagttctctgctctcaaaccctgttttcagttgtttaagatgtttatcaagacaatacgtgcacagccgaacatagtccctcatcagtaattctaattttgccctttgccttgtgatctttgctttgccctttgccttgtgatctttattgccctttaaagcatgtgatctttgtgacctactccctgttcgtacaccccctccgcctttaaagtccttaataaaaacctgctggttttgcggctcaggcagacatcacagacctactgatatgagatgtcacccctggaggcccagctgtaaaattcctctctttgtattctttctctttatttctcagatcggccaacacttagggaaaatcgaaatacctacattgaaaaattgggggctggttctcctgataaccaggctgtgtgataactcaatatcatgagaatagcaaaggagaagtccacctccatgatccaatcacctgtcaccaggcccctcctccaacactggggattacaattcagacatgagatttgggtgggggcacaattctaaaccataccagaaataattatccttggctacaaagatcaataatcagggtaattccattttgacattgaacaggtagttgctgggctgaagtccttgtagaagtaatttttctgtaaggttgtgatgtcttttgtgcaaactttttttttgcagtcctttgtaatagtttttgttaacaagcatacaaagatgaaaatgcacacttcatggccttctgtgtctccaattgccacaggtttttgattgtttgtttttaatattagtgactacattttgaatctgaaaactttcacagcttctataaatgccaatgcattatcattacgctcttggcattgaattctttcagtgctttaattgtggaatactattattcttmttattattactattttcagcacctattaccattcctaaaacatatcatttatttgataaaatttggttggcccaatgaataaacctgtagttactttgtattagtattttcattaactaatttctagatataaagtagctaaatagaatgagtactgttgaatttagagttcttcacagagaagtgtaataaagtagattaattttctttctcgaaatttcttgctgccttagatatttagtttccttactacgctaccccagcccaaccaacacacactctgggggcatcataagaaaataaatcagaaagaaaatgtctagaaaatttttctgatcttcacaaaaagtcattgagtgactgaacgtagacagacttgaaccatttctaaaacttaaataataggttatatactatttagaagacattaaaaatgaacaagggaatagctggacatactattctggaaaaatggagacagaagttctatctctcctttttgataacaattaaataatgagatcaatctattcaaagagaaaaataaataggttagcaagcttgtttttctgagtcacaaatgttacataatttttaaatatgtcccttcctaccaaaaattattataaatctttcaatagtatttgtgtatgtgaatttcagagacagagwctctaggtatgggaaaccagttggggaagcaaaaaataaaatttaaaaaatataaaataaaattagaaaagttaaaaagtacccaatatgcaagaatatatatatatatatatatatatakakagagagagagagagagagagagagagagagagagagartttactatgtaataacaatttattccagttatataaatgataagaaatttattttacgtcattctaattaatttttgcttcacaaaatctcctcaaacacatatataaatctcttaagaacactcaattcatctcagaaaatagctgatttcaatccttaaatgtactgtgagtgattgaaaatctatgatgggtcatatttttattaaagacttacaaaatgaagcatactacaaaatagaattttatttcgatgtcacccatgtgtgcattcaaacacattttatgaagacactattttttaaaacacaagagatttggtcatttctgcagttgtgtgtgtgtgcgtgtatgtgtgtgtgtgtgtcttgataccatcaattacaggaagaatgtttaatctatccaaggaagttgcctggcaacaacattagagtcaattgcattgcagggtgcaatatatacccatgtttagattgctatttatcttcattataactaagtaatttaagttgtcaactttcttgtgactattggatatctgttaactatacatttaatgcttgactagactgtgcttctaaaaagaaaaagcagctataaattcctgtgttgagtttaaaccttatggctgacataaggctacaatatgtcttcatcttcttgaaaaaacgttgtctttctaccgagtatgtactaaatgaaccttacagagtagcgaggagtatgatttattcacaaattcatacagaataaacagttttatgaaactgaatcaaattgcacctgaggggattgttgaatcacacagcaaactgattaaacttaaaaaaaagtaatattctactccagtaacctccacttcaaaatgacattaatcccactgaaccacaatagagtatgcatttctaagcaaataagaacttcacccaaactttctttttttccccataaatagtgaggtctgcatacctaatattctcataacattgtttttagaataagaatgattaaatataatataatcattttctcactacacccttcagttacaggttaacaacgtgtataatcttctattgcattctccattataatttaatatataatgtcagaaattataatactgagcaaagatgcttgattatatattctgtgaaaacagtgttgataaggatactcaattctactacatattttaaagcacaatgttgaaaaatgataaatattaaccatgggtacaaaaacttctgcattttggacccttgcagatctcaccctatgtactttttcacctggctgttcatctgtattctttataaaatcttttatatcatgccaataaatgtgtccctgagttctgcgagacttcatggcaaattaattcaatccataggggaaatcatgggaagcccagtttgtaatcactcagtcagaagtataggtgacaacctactacttgcaactggcatctaaaatgaggacaatcgtatgggactgagcccacaacctatggatctgacatatctccaggtagatagcattagaattgaattgaactggaagatacccagttggggtctgctggagaattacttgacgtgtaaaatatcctcacacatttggtcacagaagtatgcgtgttgagtgtgtgaagagataaaaaagtttatctcatcctttacagagtatagttgctgagttatatagcatttgcacatttagtttttttttttaaagaaactgccaaactgatttccagagtggttgtaccattttacattaccagcaacaatgtacgaatggacaagtttttctgaattctcaccaacttttgctattgtcactgtttttttgtttgtttcttttagccattccactaaatggctaaaaaacaaaatacatatagatatgtagtgatttaatttgcattttccaaattgctaatgatgttgaacaacttttcatgtgcttacttgcgatttgcatataatctttggtgaaatgtctcttcctatctttagctgtgttttatcagattgtcttcctttgttgagttttgagaattcttcatatattttagatattagctttttattacatatacagtttacaagtatttttctccactttgaaagttgtcttttcaccctcttaataaggaaattcacargacaaaaggttttaatttggcagaagtccattttatcaattttttatttgtatcatacttttgttgtcatctaagcactttttgactagctctagatgctaaatatttttacttatgctttatattttacatttaattctatgatccatttagggttaatttttgtttactaggtgaaacttaagtcaaagttttatatatatataaaaattactgtatatatataataattatatataattgtatataatatgtatttgtatatatttatatataatatatattttttgtgtatatatatatatakatatatatmtaakatatakaaatacatacatattacctatgtatgtccagttgtttcagcaccatttgttgaagggcagtctttccctcactgaattgctttgcaactctattaaaaatcaactggatatatctgtgtaaattaatttctggggtctctattctggtccatcaaactattttctatccctacagcaataacacacactttgattactgcagctatatattatatctgtaaatcagttagactgattctacctatttgtttattctttttcaagattgttttagctcatttggttatttgtctcactgtatgaattttatataaaaaacaattcagaaattgtgataagaattgctttacaactgtatttcaagttgagagagttgaaatctttactacgtttagtcaattgatccataaacccaatgtgctccttcattttttagatcttcagttatttcttttatcagtattgtgtagttttcagcatacaagtctggtgcaagccttcttatacgtactcctaagtattttttatgactgtttctaagtggtattttatttttagttttggtgtccactagttcattgctggcatataaaaatataattgacttctgctgtttattgactgttctgtactcacttattagttctaggaacattttttagattccttgggattattttacgtagataaacatgccatcttcaagtaggaacagttttatttctcccttaatttcttgccttattgtactggcaagaacgtccatcaccatttggaataggagtccaaatgttactattaacatttaaaatacttcaattttattgataaaaagcattctggggaatctttcatagtttctgaaaactttttttcttgtttcttttatgtaatttcacccctttaaagattgagagatggaatatctagttttaaaggaaaattaaacctactgtctttctactaggaagatccaaggaagtcaaatcacataaaataaattattactttcctatctcatttagttacacattatatttgtaactgaattaaatttgatgttcccatatgatactaagagaaagtatctatttttactttcaaaggcagtccataagtctttcatagatgatcaatcatcttttatattcattaggtaatcttcctaacaataattgttttttacatcagacttttcttttctttttattaaaatgtgggtgtattcgttttctgtgtctgctgttataaattaccaccaattcagtgtgtgaaacaatataaattccttctatcacagtactggaggtcagaagtttaaaattagtaccactaggttataaagagctcttatgcctttgaaattctaatttctgcctccatggtcacattgcttactctttttctgtgtgtgaagtctccctctccctccctcttataagaatatacttagggctcttaaaataatcatctttagaattttcttgtataatccaggataatctccccatctcaagatccttagtcacatatgcaaagaccctttttccttataagacatatacaagtaacatgtaccaggtctacgactaggatatgatatacttggaagtcactgttcagcctgatactgcaaacttgcctttattaatttagtgtcttgtaatttttattgtcattttgacataatattaaatgctcttgcaccaagtccgttaaatatgattatgaattttttttgagacaggatctcactctgttgcccaggctggagtgcagtggtgcaatcaaagctcaccgcaatctcaaacttctgggctcaagcaatcctcctgtgtcagcctctcgagtagctatgactactggtgaacaccaccatgaccagtgaaaggttttaatgtacagtcttcattattatttccggtaatatttgattatctcaatatcacatatacacaatccaagttcttccagtatatacaattttacagaatttcattgcttcagtattttattatcaaaaactatcctgcctaacttaatgtttttaatacattttatttaagattctgtccttgccatatgcatgctttcagatcaaccaatcataaaagtgtccccattgggagtcaaactatcttcattcttccaggacaataaaaagtatttcaggaaaacagtggcaaaatatggcttgagagattttagtcttcctctgcttccttccaaaatctatacctaaaaaatgcatacatattacatgtgttgctattacttctcttcttaaaagagcgaaaatttcaaaaacttaaaatgatcctaatttctaatagaggcatataatttaaatgtaaaaattcagaaaaaaaacatcagatgggacccttactttctaaaatgaatgagatgttctgtcatatggaattatgtcttctttgtggttgacatttctgtaatcctagtgagtacaccacttctgccctagcaaaaattctattagattatttgctttctataaggaaacagaagctgctaacagggtatttgcatatatttttccttagtacaatgtgttacaggaatggttccagagacttccatcagcgttacatggttacagaccattgtctaaatatattaaagcatcattccctgtaagaaaactttccctagggcaggttatgggaaataataataatcaatgtcaatggtggaaggtaagctttaccatttatgtaagaaagtgctactgataactcagtaaaacatattgctgttttaaataaagatgccataacagtagtgatatagcagaaataaaatgggcattgaatcaagaaatgttgaattcaaatttgatagtcatggccaatataaagtaagacaagttatttaacatgtcagagcttcagctttgtcataaaacatgttagttaatattacctaaacccagaagtttagtgtgagactataaaataagattatatgtgtagttcctagttcagagtcagctgggagaaaatgctcaataaataataattccactttttcttacttcagtaaagtttgcaatttaaaatcacattaaaagaaagaaattccatcagtaatgctgcaatttctcaaaatacttgaggaaatagtcttttagatttgtctttataaccagataaaattaatttttaaagtcagtatataaatccagtgcctactatatgttagagtctaggataagttgaaaagtattggaaatatagaaaaaatcatggtaaataacagatattgtttattgtcaagaagaacaaagaaaaagaatatctctgtctactgatatctatttatctattatctacctatctatcttccaagaataccaaattgtatacaatgaaaccccataatttttctactacaaatataaatagtgtgtttgagaatatggaggaggaacaatttgtccccaacctcttatttttattattattattttttttgaaatggagtctcgctcttttgcccaggctggatggagtgcagtggcaccatcttggctcactgcaacctccacctcctgggttcaagtaattatcctgcctcaacctcccgagtagctgggattacaggcacatgccaccacgccttgctagtttttgtatttttagtagagacggagtggtcttgaactcctgacctcaagggatccgcctgcctcggcctcccaaagtgctggaattacaagcgtgagccactgtgcccggcctattttttcaactgaaaagagtattattctgcttgcattgtgttttaaatagacgacaccaaattaaagtatacccttaaagggcaaagatttttccacaataataatataataatatgttaataataatatagaatatggcattaactatcaatacaggacatgcagttttacaaaaatgatattttcaagaagtcagcaatcataaacatgtttgtaagcgcttgtacaagtcttaaattatcaaattgtttcttagaactcttccatgtcacttttccaagtgtaggttcatttttagccttatttttgactgttaactatttttcatgtttcatgtacttaaataacaaaatggtttttttagttgcaaatatttgaaactagtaaaactaagtgcaataatattttatcttccaaaaactttatttctctgggagatgttgctaatgttataatgtgctggaagctagaaatatgtcacaagacgtgaagtgaagacttctttctacttttgtctcatcaatcagaaccaaaaactgaaaacttctcttagaacttataggaaaaaaagtgaataaacataagctggttttaggaatagattatcttttttgtctaatttgacaaaattttgaagagataagtaaaatttaaaatgaattattgccatttgccttacctgactttctttcaagctatgtgacatggtaacattgaaaaatccagtgatttttgttgttgttattgttaaaattatatgtactgttgttattctatggctttttactctgccattaacttaataggggctttataaatatttgtgagcagccataatagaaatatatatatatatacacacacacacacacacccacatacacacacacacacacacatatatatatgttatctacaactttagtatggaataaatctcataaatatgggacctttgaaagtttatatgaactgaattttacacccaaaaataaaaaaaaatccatgagttcaaaaatatttaagttacctatgtaaacactattattaaccaaattaatttaaaatactgagataaattcaaaattattttttaaaaacagccatttctttataaataggggtattcaatttttctttagtaaagtctctccttctaatttattcaagaaggaaaagggaaacactaaaattttctgtragatcattctacataggctccaagacacatatgctagatactcacttaaccactctttagatgtagataaatacctgaatcctagaaaagctaaattactcacaagtcatgcagcagtatgcagtttaagaaaaatcctactttgactgtttttgtcattatgactacctctatattagcctgctgaccataaaaggctccatcactaactttacaaaattccctgtgacatctgaaaacatcttcatattaattgaaatattcattaatgagaatatacagaaaacacaaaaaagtgtaatttaaacatgatgttactttctcatgtttacattcaagtttatatgaaagctcagttcaaagatggcaccaggaacaaatgcttctctgtttttccttttctattcctggaggcttgtgtgatttgcttggtctaaaatggcttaccatctaatctgcattccaaccaataagcaggaagaataggagaagaaaatcgtctacctctttctttaaagagaatggtccaaaagttacctacatcaaaattagtcaaagctttgttatgtttttacctgtgaataagggaagttgggtaatacagtctttatttagtaaaaatcctaatactaagaaataaaaagaaaagtaattattggggacaactggaaggctattcatgccacattgtaatagtgtgaataatacccacagaggaaaaaagacaaattgtttcccctctgttctcacaccacaaccacaaatatagaagacttctgtgaccaaaagggttggggagtttcgccctcacctactaagcatgcagtcaattctgcagcagataccagctgggtgtcctccagttcattctgacactatctacctggagttagcctcagttcccacagattgaggactcagtcacacaacactgtctcccctgaacttccaatgccaatcacaaaccccattgctttacctgtgcttttgacctaccagctataaatcagggatcccacaaccctattcttgggtttgattaatctgctagtatgggacacagaacacaaagaaacacttacgtttacctgttaattataaagcatattttaaaggacacaaataatcagccaggtgaagttatatatagggcaaggtctggaagagttctgagtgtgtagaaacttttgttgctgtggagttggggtgcaacactctccctgcatgtggatgagttcctgttcaccttcctgtaagctcccagtagttcagctgtccagaagctcaccttactttctcctcttgagcctttcatggagacttcattggatagacatgattgaagcaaggacaaccgtgtagaaatgtaactggacaggcccgggcacggtggctcacacctgtaatcccagcactttgggaggtcgaggcaggcagatcacgaggtcaggagatggagaccatcctggctaacacggtgaaaccccgtttctactaaaaatacaaaaaattagccgggtgtggtggcgggcgcctgtagtcccagctactcgggaggctgaggcaggagaatggcatgaacccaggaggcggaggttgctgtgagccgagattgcgccactcactccagcctgggtgatagagcaagactgtctcaaaaaaaagaaaaaaaatatgtaattggacaaaggatgggctcagtggctcgcgcctgtaatcccggcactttgggaggccaaggcaggcagaccacgaggtcaagagatcgagactatcctggccaacatggtgaaaccctgtctctactaaaaatacaaaaaattagccgggcacggtggtgggtgcctgtagtcccagctactcgggaggctgaggcaggagaatcgcttgaatccgggaagtggaggttgcagtgagtcaggatggcgccactgcacttcagcctggcaacagagtgagactccgtctcaaaaaataaataaataaataaaamcaaatgtaattggacaaaaagcctgtcatctaatacctggcctggacagcggaaatcccagacctgcctgttcagattcttcttgacctccctgtgagacattccttccctctggtatggggcaggactcctaaaatggaagtctctgacctacaatcaaacaaagtaggtgagataatttttttatgtccaactccaggacagaaaggtggtggaagattagaatatatttttagtttctaaggcctgcctcgggaagaaaaaggagcaagtaaaagacgggcaggagaagatcagagagagagattctgtttcctgaggcctgcttatgagacctaaagcacccaaacatcatcataacaaaagactattaaaagggctatgggacttatgagtcaggaaccatggacaagaatatatataccatatttatatatatggtatacatgtataccatatatgtatacatgtatgttaatatactatgatagtatatgatcaagttcttatctctgtaatttgtaaatgttaccttagatgaaggaacagtctttgcagattaaattgcaacagacttttgtgattaaattaagcatgttgagatggacagattatcttggattatccaggtcggttctatatgcagtgtgaccatggaggcagagattgaagtgatgtggctacatatcaaggaatagcaacagccagaggaagctggaagaagcatggaattgattcttccctacagcctctgctaaaacattcattctggcttggtgatactgactttaaagttctggcttccagcactgtcagaaaataaatttatacggttttaaacaccaagttcacagtcatttgttatagtggcatcaggaaactaatacacaccgaatactgtttgttgttgttcccaactaaataatgctaattgtttctcggaatacaaacttccaaatattctgatgctaaaaacttacaaattattacacaattaaaaaaattaagaaatggcatctctgtcactcaggctgcagtgcagtggtgtgatcatagctcactgcagcttcaaactcctgggctcatgccatcctctcacttcagcctcccagatagctgggactacgggcacgctccaccatacccagctaatttttaaatttttcttgtggagatggctttctcttattttgcccaggctagtctcaaatacctggcctcaagcacttctcccaccttgccctcccaaagtgctgggattacaggtgtgagccaaaatgcctggcctgattattatataattctaataaaaaccaaattatattattttaaaaatatttaatgaggagctaatatacacaaagcagggataaacagctaataaagtagaagtagggtgaataaacataagatatctacactagatrtagggatctgcttgacttgattcataggctgctttttaaggttttagtcaataatccaacacccaaaggaaaaaagaaaaatctaagaaaggtgtggatatgargcaaaagcctacctagagaaaccagtaaagatcaagttggtttaaaacggggttttggaggcaaaaaaatcaagttgattcaaaagagggtttgggaggttttgaaggcattgagttatctgtctaaatgagcatgatgatgtttgcttggctgagccattcttttacttcatacatatatattaatatgtacaaagtactaaatactatgagggttgcttggaatataaggaaaaaaactcattttctgctctccataaaattcttttgctgaaatgtgaatattttcaatagaatatggcaagtgctataaaggcaaatgttccaaatactaatgggcataataatcaatataataataaaatgcaggcctccatctttgagaattcatatttactgtgtctgaatgaggtcatgaaatgtgtaggttttggtagtttgggtacaagtgatcttcaaatcgtagattgaaaaaagcttctgtagaaaagcttttctgtagaaaagctgaggaacatttgtattaagaaaaaagaagaaggaagactagcagaaatgatacaaaataggtaggcaaagatattgttggaaaatcccctggatacagtgtctgaaagtatttttattataacagttatggctaccataatagctacagatgtgcttttttcatgaatgagtcaatagtcaattacttctaattttatttactctaaagtgataattatataaaagtaaaatacataatggcattgtatctttgtcactccctgccccatatcttacctgccacttcctgcttttctgcatcctatctcactccttctcccccacctttgtgtttttgtttcattttgtttgtttagaaaatatacttgaaacatgaataaaattttccattataattataagtagccaaatgatggatgggcatccagataattgccaagagcattaatttcctgctgcgggtcaaatgcagcagtgtctttttgcctagagatgtgtgagcatagtaatcttttaagatgtgtagagctcgataatctccacgcctttgtgcaaaaaaattccttgattctaagcatgtatttattataaacaaatatatattttttaaggttctcacattgggcaatgagaatcacctggaatgcttttaaaaagtattaagagacatgcttcactccagaataaataaactcacaataacttagaatttttgaactggagcctgggtatcaatattttaaaatatgctccaaatgaggctaatgcatctaggtttgaggtccgtcagttgaacataaaagtttaaacttcttaattttacttttagattttttacagaatccaaagtattgttgttgaatgatagttattacctggagaaaaaattctatagtaaaagagaaaaaaacacaactcattgatatttactgcacatttaaatcgtggacataagatcaggataaaggaaattatactaaataaaaatatccagcttagaaaatgtaaaattatggttatatttccacatattattattctgcagcatgtattgttaactcctggtactaattgaattatttttgtgaaactctgaggcatatgttagcccatcctacatccatacaatgtatcactgccaacaagcacacacaaaaaaatagatgaagttgtattgagaagacactcactttaaagctgtgttatagatttcaagggaaagaaaatcaaggacttattacagtattatagctactgtgcactgaattgtaaattcaaaaggccactgcacttttaaaatacaaaagctcagtaccacacatcaaaaacttacattggttgaatgtgcataacaaagaacagatttttactggaggagttttccttgaatacaactttgaaatgtgtaatccaagctttaataactcacctcatttttctcttacttgttggatgatacacagttctgaggcgcttagtgtattttccattttctgtgcttttttaaaagcataatttaaaaatgtcctgaatgtatattggtttagctattacagtcttttttccctgtgaatgctctaatatggtaagataagtaaaccatgaataatattatagtaataaaaatattctttcaaaataagccagaacctctgtataatgcaaaggatgatctcttccagctctaaaattcagtaacattgtctaatatatgcaaaagaaactgattagatctgagatctcaaatttttgttacctgaattagctagatcgcctgcttccttaaagtcatttattatgttccatctttttaaccttacattactttactaaattatgtaatgtccctacttatcattcaagaccattttttttatgctttttttcctaaagctcttagacatatagtttcttaacaagaagatatgaacaaaagtgagaaaggggactcataaatgtacttctgaaatattatttaaatagtgatacaagttacatgtaatattcctcaaaaaaacataattaagccgggtgtggtgtctcacacctgtattcccagcactttgggaggctgaggtgggtggatcacctgaggtcaggagttcaggactagcctggccaacatggtgagagtccatctctactaaaactattagctgggcatggtggtgtgtgatcctgtaatcccagttactcaggaggctgaggcaggagaattgctttaacccgagaggcggaggttgcagtgagctgagatcttaccactgcaacagacagagactctgtctcaaaaaaaaaaaagtacatatatatatatatatawaaagtatatatatataaaatatataaatattttatacacatatataaatatatataaatatataaatatatataaatatatgtataaaatatataaatatataaatatttaaaawatatatatataaagtatatatataaaaaagtatatatatataattaaaccaaatttctaataatatttcagagcaatgataatattcagtggactaatatcaatggagcatacagcctctttagaacaagcattaactttagaatgacttaataatagcctgaaaatattcacataacttattttcaacaaccaattttacccaaggtatctatttcatccattagtatgtcttgaaaagcaaataacggatagtctgatggacagcgtttagcccatatggctatatgttgtttattaattgagaattaagaaggcatacattccccaagttgattcagtaatccttccctcttctctgccatccttttggttaccttattatgctagtggcctcattgtctcatggtggctgctcagcatctgctattattattctgggagaagagggaacaaaccatatgaagtgtttaggagcaaaagtgattgttctttatactaggaagaaaaaatcattggagtctatcacagacttcattttatgtgtcattggcctgaactggttaacattcccatccctccactaaatcctgacaaggtgagggacacgattggcatgatgagtgaagccagtgtttccaactagcagcattgacattttggatgatgccgatttctatagtgcaggactgtctcataattcctaggcattaaatatgcctatggctaatcaccatgaaagacatcattctccatacatcatggaggggagcagcactgccacccattgagaatcagtgattactataccctccaaggctggatattttgccaagagaataaattcaatttttacttatcagggaacagatgggatttgccttgggtaggtgaatagcagagtctgccacatctctaaaaacaattgagttatcaatttttgktatgtttcttatatattcactctttaaaagataatatagaagaaagtgctttaatctcaatcagttttctaaatgtgttttattggaaaaaaaattttgtctctccaaacttcagttttcttatatctaaaataatgatattggattgtatgatcccttgtattccttccaagctagaaataaaaaagcttcaggtgtataaatcattttttacatcttttttttacatcatgtggattagacatgctgtaattaagaaagtgatacaaatcaaatgctgtaggaaaagtttttctgtgtgtatttctgtactttttcaccaaagcatattgggcaaagagatctctgaagagtaaataatagcattcatttattcatgtatatcaaatacatttagaaaactctacataattgtaattataagaaatccaaagttaaataagtatttttagagtaatttttcaaaaacctggaaagataatattattttccctggaaaaataattgaccttctaagctttgttttaatttacatgtttgtatgtatgtacactttaacatcttttaaagatgcaaattgttttcttagtttattataggttaaaatacttcacaataacagtggaactgtaaacatttcaataatttatgtatcatattctgttaatatttggatcaataatcatatgattgtttatagtgtacaaattgatgatgaatttcttccaaccattatcataggcaaaagaaattttatcaacaggtaactaattcattcaaacatatatttacacatctatgcaattatgtatttatcagtcaaatatttattgaatatgcaatgcatacgtcagattgtgaagaatttgatttcccaacaccgttttgcagatttaattcctgtacacccttaaaaactcaggtaaaatatcacttactctaaaagccatccctcaccactttgtcttgattaaatatccttctttttggttttattgcaccccgtgctgcttaggcttttggagcacttattactcattgacagtacctaattcttctggtttgttgttgttgttgttgttgttatttttgacagagtctcattcctgtagcccaggctggagtgcagtggtgcaatatcagctcactgcaacctccacctcctgggttccagtgattcttttgcctcagcctcccaagtagctaggattacaggtgcatgccaccacacccagctatcttttgtatttttagtagagatggagtttaaccatgttggccaggctggtcttgaactcctgacctcaggtgatctgcctgccttgatctcccaaagtgctgggattacaggactgagccactgcatctggccgacattacctaattcttgctcttcttctagaagaccataacttttatcttggtatctctagtaccaaacactgcaactgttacattgtaaagtttacccagtaatcataacaattaaattaccatttagatacataaaatcatcaccacaatcctataaggcagggtattattatcctcatctcatcagtaagaaaactagaattttaaaaagataaataaatgactcattattattctgctaaaatgtaacagaacttagagtggaactcaaattaactttgcttcccagccagccgacttataaatgccaactttttttttctttttttgagacggattctcactctgtccccaggctggagtgcagtgtcgcgatctcagctcactgcaagctccgcctcccgggttcacaccattctcctgcctcagcctcctgagtagctgggactacaggcacccgccaccatgcccagctaattttttttgtatttttagtagagacggggtttcaccatgttagtcaggatggtctcgatctcctgacctggttatccgcccgcctcagcctcccaaagtagtgggattacaggcgtgagccaccgcacctggcctaaatgccaactttttgattgaataaagttaccaagttgctcagtaaatattacaactggaccttatccgcaaagttcaagcacacacacctccattttatctagaaatcaatggcatttcttcttctctaattaggctggtatatttaaatgtatatttgtttattattacatgtgaattcactgccctttcacattctgattaaccccatactgttaaaacagcaacaaacctttggcacaactgtcctgtgttttgagctcagtaccaatcaggtaagtagaaaatcctttactctaaaaatcaaagtgcttacatgtactctctcatacactgaaatttctgtgaattcatgtatgtttttagactgtagttatttcacactctttaactgcctttcctatcatccaaaagcttcttaaataaaaatttgaaaactcaagactacctttgctgacagttgcaaaattgcaagagattttacggagaaaacagattttgaatgcctcctcccacaaaatgagaaagaaaaaaaaattaagtgactcagtagccccatattctgtaaccctttaagtcctttctggaaatcagatatgtttattcataggaaatatttccatgagattaatgcatgagtaggatacgggttgtagaattagaagaattgaggtcaactcttggtccaccttgtaaatttctctattttgtggcctaatattaatcttgagcctcagtttcttatatgaagttctagttctttgttctattactaattattgttcctggtaactaaaatttgaaaggtgtagaatggggttcatttttttaaatcaaattataaatatgataaagaaaaggttgcgactactggtcaccagatttttttcaaaagtctttatttgtttgtgattcaaattttgggatgaaactggcattctgaatgtttgctctttctccagcaatgtgattcatatgtctgaatagtatgattttaagtttcttctcaaatgtattgtcttttgcaaagtgaattgataagtacacaggattatattattttcttttaaatgttgaatgaattttaaatatcatataaagtatttctgctatgacttatttattttccataaatattttcccagactagatttcagttactaagtctctatccaacagtgatatacaaaatattagactggaaacatatgaatttaatatgataataaataaaatttgtttcttaactatggtacgtaacaaaataagagagtttcttaacaatagtactccagaaactcatatgtgtatttatgatttatacaacaatagtgttgtattacaaaccacctcaaagtctgtggcttacaacaaaactcacagggctgtgagtcaacagtgtctcttctgagctcttttggaatcagcttagtgtttcccctataagctgtgggtcaaccgggcttgtttctggaatcctcagttgaatcaaggtcagctgaatcatgagtttcactctggaaactggctgaatgtaatgttgttaaaaagtgcatgctctctaagaaaggatcccaggagcacataaccaaaatcaaattatacaaatacatttaagacttctatacttttctgttctatcatatagacaaaacaaatatcataaccacatgcaaaggcattgttacggtgaaatatgctgtatccccgagagagaaaagaaatccttaacattcatgaaacaataattcagtttatcacatagaataattttgaaataatgtaaaattttgacatccacatttggaaaagaaccttcagcattagatataacatactgtaaaacataataatttgatacttacacccagtagtttcagtgagattcaccttataatttacaagttctggttatacactgttagggtaaattagttcagttattgtggaagacagtttggcaattcctcaaagacctaaagacagaaataccatttgacccaacaatcccattatgggtacatacccaaaggaatataaatcattttatcataaagactcatgcacacatatgttcactgagcacaattcacaatagcaaaaacatggaatcaacctaaataccccatcaatgttagaatgaataaagaaaatgtggtacatatagaccatggaatactatgcagccataaaaaagaatgacatcatgtcctttccagggacatgaatggagctagaggccattttcctttgcaaacagcacaggaacagaaaaccaaatactgcatgttctcacttataagtgtgagctaaatgatgacaacacatggacacgtagaggaaaacaacacacaatggggccttccagagggtgcagaatgggaggacggagaagatatggaaaaataactagtgggtactaggcttaatacctgggtgatgaaataatctgtacaacaaacccctgtgacaagtttacctatctaacaaatctgcacttgcaccagtgaacttaaaagttaaaaaataaaataaaatttacaagttctttacatatactagaagaaaaaaactatgctcaagaatgaaactggccaggagtggtggttcaggcctgtaatctcagcactttgggaggccgaggcaagcggatcacctgaggtcaggacttcaagaccagcctggccaacatggtgaaaccatgtctttactaaaaatacaaaaaaattagccaggcatggtggctggtgcctgtaatcccagctactcaggaagctgaggcagaagaatagcttgaacccaggagtcagaggttgcagtgagccaagatcataccactgcactccagcctgggcaacaagagcaagactctgtctaaaaaaaaaaaaaaaaaaaaaaaacaaaaaacgctgaagtgtttattgatcaagtgtcattgataggcagtttgcttcagtgggaatatctcttagtttacttagtttagaggcagttcttatttagttttatttatctccttctgtgataaatttaattggcctatgtgtaaattaagttgcatgattcaatatccaagaaatgctttacaagttatattattggttcaaaatatttcttcattgttatcaatgcttctttacatatgaaaagaagttctaatgagctaacttctcattccaaccttaaaaaaattgtacaaaataaaatattgttctcatcttggaaattataatgcatttcctttcctagaagactgataaagttaaaaattatgcagttggtacttgtttatcacttttatattttctctccaaaatatgtatatttgaaatccaactaaatacaaactcctaaataacactgcgaaaagcttctaattttcttcacatcttcctgatagaatgagaactctattctattaataatatattatcattatagtcttcttactgcatttataaaatggctttgcaggaatcagttaagatagatggcttgaatatttatattattaaaagagaaagacatttcagcagccatgtctgaattacaagcatctattctgtcttgtgcataagtgtctgagcattaatatcttgaaactacacacttactgaatttcataatactagctcatgttcctgcttcataaaacaatagagtattttgtcatagtgcctttcagatatacacattcatcaaattatgattagctaaggtcaagcttgcagctacaaataacatccacagtatttgataaataatgcaataaaatatcattaactgctcaatgtaatggatgatctacttttttccccttctgctgctcagctataatctttagggctacagaagtcatactacagcttcagtaataatgggcttgttattgactccattaacttaatattttcccattttattgcacattctagataaaataaccgattgacaacatttataaataatgccattgaacattgtttaaatacacttttactatgcttcctccctcagcagttcttcatgtttagcttatgaatttattataagtaaatattgcaaacatataaataatccaagcatatatatttccataatattttgtacagaaaaatgaatgctttgtaaaaattctgttttcaattctagattgataataataacactgatattacacatctgtgaaatacacacatataaacatatatgtatatatttatatagcaataatagaaaacagaggatgaatattgatgttatttacaatatcaaatattatacatgaatctagaagttagaagtggcataatcattgtctctgagagattaggactagtaagtaagtatgcagtaaaattttcattgctgtgggctcaggatcactgggaaattcatgaagacataaaggaattaattcagacaactatgtacactttgtatttggaggagtctgttagaagaaagacttattacagtgtctgaaatgttgacattagatatgtaatattcataaaattatgacaatatttaagccaatttatagaaaataaggaatacatatggcaaattccaactatgcaacttgcttcaaattttattcaattggtagcttagacttctgagagaaaatttatttaaagtgatatgtgttattagtcagctatgcaaacacaatagctaaattgaactttgcatgaatatatttgtgccatgtagttaacaagtcaaatagaagaagagacaatttctatcaagatattgtatatataaaaatgaaattcaactttcagtaatattccactaaagtccactgagatcctttaattattatcaaccttattccataatatttttttctattgaaagtagtagtccaaaatattaacttgtttgaatgtaaacaatttcttatcattttactttcgatcacaatgtgaaacaagcattgaaataggcagaaataatgtaattgaaatgaaggcaaataagctatgtatacaattctgttttccaacgtgccactggggtaatctttcaaaataagatatgtttcaactgtgattgtgaagtcctgaatattaacggtccaagacttctccatataagacaagggaagcttattcatcagtgagcacttcctgtctatgaggtaccagtgattgggaacatagaaatcagaggcaggccccatttttttaggtattcattgtctagtgggaggaggtaagcaaacacactactcttctctgtaaagactggtgatgtaggcatctgttttgtttggcactgtatcatctgcattccctggaactatcacagtgccttgaacatagttgaatctcaaaaataattacctggctcacacctgtaatcccagcactttgggaggccgaggcgggtggatcacgaagtcaggagatcaagaccatcctggctaacacagtgaaaccccgtctctactaaaaatacaaaaaattagccagacgtggtggtgggcacctgtagtcccagctactcaggaggatgaggcaggagaatggcgtgaatccgggaggcggaggttgcagtgagccgagatcttgccactgcactccagcctgggtgacagagcgagactccgtctcaaaaaaaataaataaataaaaaawaaaaaataattactgatgaataagaataatggtaacatttgtataagattgagagggagcacagaagacacacatcttagtcacagctggaagacagaaagggtaccgtgaggaggtattatctgaatttaatttgagcagtgtggaggaaactgaaatgaatgaaaagaaccagtgagacaggtgttggtagacaacacagcatactggcaggaagagcaacagttgaacaggctcaacttcatcaatcccatggtgcattttaagtaattttctgtggctgaagtgtagtgcactttgtggtaagtagcaagagatgaggctgacaagacaggcttggaccacaaaaggtcatacatgctatgcataggccattcgattttatcttacagacagctgaggaggcattgaaagacattaagcaacaaaatttcaggctaatattttcttttctttctctgacatctagttggaggggaggagttgcactccttatggcatgacatgaacagagcctgatataaatgacatttaataataaaagagtatatacgtagatttgaaagctacaatttaagagctaagaggaataggatttatcctcatggaaaatattctagtatgaaaaaggcccagatgaaatgatatgcatatattattcttattattataaattattttatcttattcttgttttaatttgtttgtgagagcatgtcagttgccaattaaaaaattatgtaactcagtcagatttattgtttcagcaagtgtttattgagcacctactgtgtgaggaatactgtcatgctggggaatactgtaggaaactacactgagttcaatcatttttttagttgaattttaaatggtaacattaactttcaaaatattctttttagtaggggaaaaactgctatttgaatgaatctaggcaaagatgggggttaggagaaattaagtaggtcagaaattagtagaaattaaccatctgaaagagaacagctacctaagtaaaatggttaacagcttaagtatccatagtggcaaaggagcagaggagtagctggtgatgaacggcaagaaagaggccatctgaagagggagtagaagatacgaacttacacagagtgtgagactctgtcctgcccagattactggacgttaaacagaaagctagttctatatcattcagttaatgtggctcacaccttgatgtttctgatacaaaaaggaaatgagaatacataaatattttgttattttttaacaaacattgaataaaggaaaacaaataaaggttattctcccaacggaagaatgaatattttcacaatttagatgtttttcttgctgtatcaaatactaatgcgtttgggcaagatattttatcttctttaagtctcacattacgttaataatgataagccctgccttactggggctgggatcataatcccaaagtcacaatcctgaacaccattatcccaaatattgaaatcctgaacaatcagtgtccctaaagatgaaaatctctaaagtctatatttccactgtcaaaaatccctaatgtctaaaatcctgcaaattacaatcacaggatagttgtctcatcttaggtagaaatattaccttgttatcatcttcatatggaaattaagtatggttttaggagatgcatgtgagtactgtattagtcagttttcacactgctgataaaaacatacctgagactgggcaatttacaaaagaaatagattaaatggacttacagttccacgtggctgggaagacctcacaataatggcagaaggtaaaagacacgtctcacatggcagcagataagagaagagagcttgtgagggagacttctgtttttaaaaccatcagatctcatgagacttattcactatcattagaacagcatgggaaagacctgccccatgatttaattacctcccaccagatccctcccacaacacatgggaattcaagataagatctgagtggggcacagccaaacaatatcattctgcccctggcccctctcaaatctcatgtcctcacatttcaaaaccagtcgtgccttcccaacaatcccccaaaagtcttaactcatttcagcattaacttaaaagtctacattccaaagtttcatctgagacaaggcaagtcaattctgcctatcagcctgtaaaatcaaaaccaagttagttactttctggatacaatgaggatacaggcattgggtaaatacagttgttccagatgggagaaattggccaaaataaaggggctacaggcctcatgcaaaccaaaattcaagggcagtcaaatatttctttctgtttttttttttttttttttttttttttgagacgaagtgtcgctctgtcaccagtctggagtgcagcggcgtgatcttggctcactgcaacctccatccccaggttcaagcgattctcctgcctcagcctcccaagtagctaggactacaggtgcatgccaccacgcccagataatttttgtatttttagtagagatggggtttcaccatgttggccaggatggtctcgatctcttgacctcaggtgatctgcccaccttggcctcccaaagtgctgggattacaggcgtgagccactgtgcctggccaagggcagtcaaatcttcaagctccaaaatgatctcctttgacttcatgcctcatgtccaggtcacgctgwtgcaggggatgggctcccactgccttgggcagctctacctctatggctttgcagagtataacccctctcctggctgcttcatgagctggcattgaatgtctgtagcttttcaagaaacccaatgcaggctgtcagtggatctaccattctgaggtctaaaggatggtggtcctcttctcacagctccaggaggtggtgccccagtaggcactctgtgtgggggttctgaccccacatttctcttttgcactgccctrgcagagattctccatgagggctttgcccctgcagcaaacttctgcctggccattcaggcatttccataaatctgaaatcaagccaaaggctcccaaaccccaattcatgacttctgtacactcacagctcaaaatcccatggaaacttctaaggcttggggcttataccttctgaagccatggcccaagctctatgtctgcccctttcagccctggctggagcagctaggatgcagggcaccaagtccctagactgcacacagcacggggaccctgggcccggcccatgaaaccatatttttcctcctaaacccctgggcctgtgaagggaggggctgccattgaagtctctgacatgccctggagacattttcccattgtctttatgattaacatcctcgttacttatgcaaatttctgcagtcagcttgaatttttcctcaaaaaatctgattttcttttctattgcattgtcaggctgcaaattttttgaacttttatgctctgcttcccttttaaaactgaatgcatttaacagcacccaagtcacctcttgaatgcttttctgcttagaaatttcttctgccagataccctaaatcatctttctctagttcaacattccacaaatctctagtgcaggggcacaatgccaccagtctctttgctaaaatataacaggaatcacctttgctctagttcccaacaagttcctcatctccatctgagaccacttcagcctggatttcattgtctgtatctttatcagcattttggtcaatgccattcaacaagtctctcaggagttccaaatgttcccacattttcttgtattcttctgagccctccaaactgttccaacctctgcctattacccagttccaaagtcgcttccacattttcgggataaagacatacccaagattgggcaatttacaaaagaaggagatttaatggagttacagttccacatggctggggaggcctcacaaccatggcagaaggtgaaaggcatgtctcacatggtggtagacaagagaaaatggcttgtgcagggagactcccatttttaaacctatcagatctcatgagacttattcactattacgagaacagcacaggaaagacctgcccccgtgactcaattacctcccaccaggtccctcccacaacacatgggaattcaagatgagatttgggtggggacacagccaaaccatatcagatgcctaattgataaggaatggatttatgaacaattttatgtgtcagtttgattggattaacgaatacctaaaaacttggtaaagcatttttgtgtgtgtgtctgtgaagatatttccagagactagtgtgtgagtctgaaggtattaggtgggaaagatctgccctcactgttggcaggcacagtctctacagaaggtgaattggtctgtttctgagagttgagatagatttttcctctgcttccttggacttcagaaccccaggctcacaggcctttggactctaggacttgcaccagagacctccccgggtcgtaaggctttcagactcaaactgaaagttacaccatcagcttctcagattctaaatgtgaaaacattggaactttcacaataaatgaagatatgtcttttttctctaaatctgaatttgtgatcttgagatcccagctcttttggtgactgcatatactgcagtaaccccttttggtttttttaatctatcctgtcaaaaatctcaagttgacagccacgtgacaaatgaacaccattataaagctgggtacacatgattccaactatagtggtatgcttttttatatttcactttttgagctttctcttaatgaatactgttcacctgctcataactgttgtacctgttaaactgtcagtttctatgtctgggtgtttatgcttgcaaaaacatgtatgctattcttgcctattttattgtataaattggcctatgaagtgttttctcatattttcatatacttctcaaagaaattccctttcaaaagaggaaatacatgtcttttaagaacatttaaaattattttttcctgaattatattttcaagattttagacgttaggcattttgatcttttgggatttcaacatttgggattatgggcttgggattgttagccaatctccttgttaaagcatcttcaaaaactgcatatttttgaataaaatgtaggttttatggattatgtctctctggattgtgattggcttcctccttattgtgttctcatgaagactaaatgaaatgatacacacaaagggcttagtaggtatgttgtgtaatgttgaattttgatctaatcatgatttttcacgtattcattcttttaggcatggaagagacagcactgattatgacagaaacaatctatgtccttgtctggtttactttctaccaaacgaagtcatcataatcattaatttattccagcattaattttttttttatttctggcatacaagcaatgttataatgtatggcatggtcacagtcaatatttaacaccacgaagtggcaaattcagttttttctgttaaggattattaagagaataagtctatttaaccaaaagaaagagaagctggataaaacagcctttcagaaatttggtgaatttttttcaattttttaatgttatttttaatgtcagtgtgaagccttttgtagtggctctgattcttagcatttcttttcactctgtagaaagaatgtgtattgtgatgtagatcaagtattattaagcagaaccaatttaaacgtattcagtgttacagcacattagtcaatgttatcataaaaaaatgactcatataagaaataattgtactagtcctactcatttctagtctttggcccagaaaataatacctaggatatcgccacacttaaaattcatagagtgaaaggttagaataatgcttggctttattagcctctcctatacaacacccacttatgaatccccacaaatttttctatgctgtgaatcacttatttgattatgagtttactttgagatgttagatgaatacctttaacaagaacacttattctaactcaggataaaacaaaattttggattgaagaatgacaaaataggaaaaagataaaagagcagatataagattattgaaatttgtaatagaaacgagcaagccttagattatgactgaaagtataattttaattaattgttatctatattaaactttttctaaaaaaagtattgttttatatagaatgtaattagaatactaagagtaaacagtttttttcctttgctcattcactggtcaaatatttatctaatgctgtgtgccatgtaccgttctaagcagtagatatataatcatgaatcagtcagacacattccctgctcccaaataacctttgccagaaagaggtggcaacagtgtttagtgcaaataatataaactttactgcatgatgctattttcagagacaaacctgttcaactatcaaggcagaagttggaataaatattcataggctctattatataaaatgcctaatttcaatttttagccaatatattcaacagcagcaaaacgatgattaaaataataaagaagcattttsgtccacatgggagagaggacaactatgactatattttagtcaagtaatggtgatagcttgtatttatgcaacactctcaactaggcattgttctaaacattttacatgtatttattcatgtaacttttccacaaatttataaggtaaatatgagtattaccaatattttaaaaataaataagctgagaaccttaaggttatactacttgcctaagatattgttcaattgtatttttaatggacaaataattattgtatatatttatggaatacaatatgatgtttagatatacatttttggcaaaagatagagttcagattcaaatcaagcaggttgattctaagagctccaatattggttctaaatctatatagccaccaggcaaaagatagcagaactccttctggcctcactgtaacttttgtaaacttctctagtctggatccttagatacttcctgggacttcattttaagactgttaccttgcaacttcgtcagccaacatgacttcaagttccaagtaattgaagattatttctagattagtatcgtgagattgatttactcatcttcttgctaatcttatacttcacattttcttctagggaaaaccctgtaaataaatcatattgaattcggatctctataattcaaactttctgtaggtcattatttctgtgtcttcctcattaacattaagagaactgcttatccccagtcctttaagctcatgattcttggataaaataatgttaaaatgaagtcatcgtgtttgctctttttttctttcctccaccaaatctaaaactcacggatatgaatttacaaactttaagtcatattgcttatattgttccaccttattatacaagtcaaatgtctagagattcttatgaattagctaaggaaaaacgaaaaatcacatccttattttttgactccaaattcaagtcccatgtaaataccaacacactgtggtcattcatataaccagataacagtaataattaatactcctttagtagttcctcaaaaaaaattaaaaatagaattgccatatagtccaacaatttcactctgggtatataccccaaatcattgaaaatgggatcttgaagagccatttgtacacccattttcatagcaacattattcacaatagctgaaaggtggaagcaagcaaaatatctattaacagatgagtggataaatgtggtatatacacacagtggaatatcattcaactttaaaaaggaaggaaattctgacacataataccacatggttgaatattgatgagattatgcaatgtgaaataaaccagtcacaaaggggcaaatattatatgattcaacttatataaagtatctatattaatcaagttcatagagacagcaagtagaatggtggttgccagggacttggggccagggaaggggagaatggagagttactgttccatgagtataggatttcagtttggaaagctgagaaaagttctcaagatgggtagtgatgatgcttgcacaacaatgtgagtgtagtcatatcactgaattgcatacttaaaaactgttaagatggcaaattttatgtttttatattgtacaacattaaaaatatgtagaaaaggaaaatattaaatcattattgatctttggtgaaaaaatcaaagggatgaaaaagtctaagtatattcttaagtgtgtcactgttaaaattaaaacatcgttaagagcgcaagtcattatttaatagttcattgttgggattaaagcattgaacacaacatatatgctgctattctgtgtaatagtaaatgccctgacaaatatgttggttttgagttaaagactacttgctatcactgttgattaccatttcattttaaaataataggaaaaaagcagtaagatttttgtggttaataatgtaaatgccagccgggtgcagtggctcacgcctgtaatcccagcactttgggatgctgaggtgggcggataacctgaggtcgggagttggagaccagcctgaccaagatagagaaatcctatctctactaaaaatacaaaattagccaggcgtggtggcgaatgcctgtaatcccagctactcagagtctgaggcaggagaatcgcttaaacctaggaggtggaggttgcagtgagcggagatcgtgccattgcactctagcctgggcaacaagagcgaaactccatgtcaaaaaaaaaaaaaaaaagcaaatgcctaaccacaggaaataatatttttgtttcttttaacaaaaataattatataatgaaatgtagaaaaatatgaaaatgaaggttgaagagaagaataaagtacattaattccactagtgtcaacaacttaaagatgtatctctcctttcaatctcaatctcaacagctctttctctttttctcctctctctctctctctctctctctgtctctctctctctctctctctctgtctctctctctctgtctctctctctctgtctctctctctctttcttgctctttgatgtaggtacgtacatggggaggggagtgtcatcactttaccccttaagtcctgcttatttatatttttcctattgagttaatgatgatttttgttaaatacttatgttttcttatggttctaaatttatgtttattcctcctatttttgtcttgtcatgtgacctaatttttgtttgtatttaccataaataataaagcctctcccatttagtcattcaycaaatattcattgggattctaatatattgttctaggcacaggaaaatatagcaatgtacagaaatgtctttacattctgactaaaaaattgtatttcatatatatatgtatatacacaataatctttttgtttcatttttcaaatttatttatttttggttttttgagacagggtctcattctgtcacccaggctggagtgcggtggttggatctcagctcacttactgcaacctttgcctccaggctttgagcctgctgggtagctgctggtactacaggcatgcaccacaacaccaggctctttttttttttttttttttttgacatgtgttatctccatgtctctcaggctggcttgaactcctggactcaagccatctgccctccttggcctcccagactgctgggattataggcatgagccaccctacagcctcattttttcaatttaactatccatttgcaaatttgagtgtaatgtagacaaataattatttccaaaacaattatatagtgctctccaaacaatttaccttaacgttcaatctatttgcaatgatttaaatgcaaacattataatagatggttatgatcattgactttccatattttccattaatctatatttatctctcccactttaaaatattatgcgttgtatagtctctccatttttaagtagcattgctagaggtatatttattattttactagtgaaacacattccaaagattttgatattcattgttctcattgttagtgttctcattgttaatgacaatcttgagtttccttttgcttcagggcttatttatttattgttgtaaacttcttattttatgatttagtttaacttctaaaaattaatatttgaaagtagaaaaataaataactatatacaggtatacaaataatctggttctgtaaagtacctaaaatgatgtatcctagtttggaagaatttgtcaaatatttatttatgcttatacaaattcctctttttccttctctaaaaattccaaaactttaagaaacagattgattaggttaactataaagaaaaaaaaataaaccttagatgattaagaccaattacaataaacctaatattagtagacagcatgtctaaccataccttattttcttttcacatttttatatttttgagatgatctgaaaatgattttccctacagttcagtaacaacacaacagagaattttttgcatagaatctccatgtaatttctccattctttctctactattatttccagtggtaaatacaaaaccttgagtgaactattcttttgtatttcctatttctatatctctttcaagatgcaaaactgcttgaaaaaggaggcttagaaatactgggtttttttctcttaaataggccaacactcactgtttttttaaattttattcatgagaaatcataattgagtgacaaagagtaacaaacgaatttactttagctgaagggggaatattctgacagtagggagtgctaaacataagaaagtgttggcaaaagaagtggattaccattcctagcatgaaaaaatatgatcatttcctcctcagttatcatgtcctggagattatttgttcataagatctagtgtatctttctgaaagactgaaatagaaatgttactacaccagcaaagcagrccttactggttcttgcctaaactacgaaattagttttgtctttagtagacttaataattgatgtttccagtaattgtagtaagccttcaataaatatgctgttaagcagaaactcctccacaaaatctgaaggaatgcttcattttcttcttgaaggccaagtgcatggtgaagcataagctgtggatccagaaatgccttatttctgatctcagcttggcaaattgcttaactgaacctaattttctcatttttaaaaatggaataaattgtaaacatcttgtaagatgcctataaggaatataatccttacactgccaaatttaatatattgattgccatagtaagtatttaataaattgttgttggtataaccgtgaaaactcatcaaagaatataatagtttcttcagtgattgcaaagtctctgttgtctttgtagcatagcactgtgcctgacaccgattagatgtacaaaaaataaaagtcacttgagtactagatattttgcattgggtacagtcacaaagttattctttctaactatcactttcaacatactttttcagaaatcaacttccttcagtgtttcagtatcatttgttgaaatcctttgcttgaaacttaaataatctgtaatcctgcttcaatatattgttcattctcagctcacactgatgatacttgcactacagctaaacacatctctcatttttttcatgtctgtttttgctcatgacttttctaccattttccacagagaagccattagataggctaaataacctacaaacatctcgattctctagactttgagataggttctgcaggtagggctcaggacttcctgtgtcataaggacctaacacaatgcttgaaacttagtacacattcaaagtatatttggtaaatgtaagaatgaaagttacagctgtatacagcagtggttgttaatgtgagcatttcactgaataaattaagagcaagatgttaaaagaagatgaatggactgtggggcagaaggaagcagaatgagaaaacaacaattttggtggtggtgttcaatggatattgcccactaaacaaccttagttcaagtcttttgcctattgaccccttcactgtgtttcgcagctattcatatctgctctgctatggtttgttaatgcagtagtaacaaagaactatgctacatcaaaaaaaaaaaaaactattttcttttgtgatggcagttcccatttccctataatcaatatttagactggaaaaatatatacagaattattaaacatttcttctttaatctgctctgggatactgtttatctacttatctaatgtttaaacaaatgatttttgctgtaagtatttggggaaaaataaagacaagaaaaatacaatatgaggtacatattgtaaggatgatataaattctgtctggacagtttcactttgctatactctcattgtctacagtactgtgcaatcatgataaatgtttacaatagggtcagtcccaagactgatctctgaatgatgaaagatggatcagttttgttaaacaaagtttaaagggttgagcatatttagttttgaaatgttacagtaaaaataaaatagcatttgtaatcaaacagattctggatctgtttccttttaaatcttaaccctatcagttaccaagatgaggaacgcagttaatatctcttagcttcagacttctcacttgtgagagtatagtaaggttttgtttatagtgctcctataaaaattaaatgagttaatatatcaaaatactattaatatctgaagttatataaataattgttgccttcttttgccttttgttataattttataaatgattattcatatatktaattatttataattaattttatttattatattcaattcaattacttccaaaatggaatttgaggtggtttaacaatataattatacttttatttaaactatatacttgttgagcatctacaatgtgtcaattgatagtttgggtgtgacaaatctagtgacaaaagtgtttagacaaaatactaaacacagaacaaatgaaaaagctatactaagaaattgtagctgatgcaagctattgcaattgaatataaaattgtattaaatacatggcaagttgcagtttaccaaatatatttaattaaatgcaacattacattgtctagttcctttgtttttagattgccactaccataaggaattaccggttctgaatatataatacttcacatagacttgggcagtatatccataaaagcttttaaagcagaaatactttttattatttcagaagatgaactgcataattcatcatttccctagtaatatcctaacaaataactgccattgtttttcctttgtaccttgtataaaatatgtaacaatagaattatgtgattttaaagtattagttttgttctagattaattgcttttttcctttttaataagaaataggagacatattatagaattaagatactccagggtgtgttttattgatccactaatacatgattcgggtggttaaagtacttagcctttaggtttgcagctcataatataccctaggcatgaataaatggaataataaaatgtgccctggagtgtcttgatgtcatattaaaaataataaaacacatgaactgctatattctgaattcaaataaatggttagctatgcaaacatccaatactctgatttgaattaaactgacacttttaaaagcctaataatatgattactatacataaaattttatttgatatagtatattttttgaaatttattttctaaaattcatcttatggacttgaaaaaaaaatcttcattaactttgaagtacccaaaggcaaatgttgaatacttaaatgtagaagtatcctccaggaaaattcttcacattttttatttccaggaaagtgtttatttcatgacttattatattacctaacttccaggtctttttctcaactctgagttgatttatttttatttaatttactttaaaatgtatttcatactttcaatataataagaactgaaccaggaatttggccaagtattgaggaatcaaagataaataaaatgcatttcccaacttcagatgttcacagtctagaagtgaaacacagtctagaaattataaaagtaatttcattcaaagagaaaagtgctctaagtcagggtcctagctacttctgcctatgggatagggagggaggctttataaacaggaacacattttttaaaaatttaaaggaaaagacagcatgaaaacacatgaggccagtcactgttacctagtgaggggtgttctaccactggcttagggttttgagattctccctgaaggcagtggaaaattgctgaacactttcattggtgtttcatttttttatcaagggaatcataagagcaaatttatcttttggaaagatccctttagcagcagtatggaagattgattgtcctagggtgaagtaattacaaaagtttaagtgagagatggtgaggaactaaagagtgggaaggaaatgaagagcagaatttgagagaaatgactgagttaaagctttctcccttcacaatgcacaccaatagacagaaagtcttggtgactaataagatataggatgctgggaatgaaaggcaagaaggaaaggaagaggaattttcgaatatttagtcctctttagctggagcaataaataatactaacccaaggcatgtgagcaccttttacaattttattaatcttgtaagactcagtatgaattttatttcctgaaagaaatattttctcaatcaacttatctaaacttgcagcctctctgctcctatacatatagcaacctatgcataatggtataaaatcatcttgatatggtattgaaagggccacccctcacccctctgccatcccactaaaggagcaaatttttaagggctgtgatgcagccttatttatgtgtgtatttctagtacttagcttagtatttcaatgcttgtcataggacatagtcaatactattgaaattactttcgggaaattatgcatacatattgaacttttggggattaaataggggaagaaaaaaaggcaaataggaaaacaagttactcaggagcagtagagctactttattgtgtgataagaaacattcatagcattttgccttcattattcagttttgctttcgtaacaatcttttaaatcggtaaatctattccggttatttcctttgttagcacctatctatacttttctactgttttccaaaggatattcaacttccttagtagaataaaaaagatatttaagctctggtaacttcttatatctgaaagctcattcagtctcatcaccaggcaagtttttccatactagtgctatatcaacatgcttgtatttttctcatacatcgtatatactcacttcttgatattttgcacacgctgttttctcatgctgaagatatctatttatctttccagtttcagtggaagtatcacttcctggtaggagacttccctttcactccttgtctgaataaaatactctatttttccatttcataatgtatatttactctaacatttagtacactatattatgagtccttcacttttaactatgagctgcacctcatttctagtgaggtaaatgttacaaagttggtactaaggctcaataatcgcttttgaataagcagaaaattttcttgttgatttcccaattcacctcctttcagataaaatagttatttatatatggtatatgcctcttttattttctaaatgcaaaatagggaaaacaaaataataatgaactaaaaatatgtaagttaggactaaaaaaatagaaaaggaagaagctattaagtaaaatccagaatacctaatcacaatctagtcagctggaatcagagaaaatagtactaaatctgcatttacaaaatgaattaaacagcataaaatgctatacatataaattgtctattgaagatttaaaagaggtggcacttgaatttcaaaggcagatatttttgcctttttaaatcaacaataaaaaagcaatgcattatgtaattctattttgtagtttgtcaatgctgttgaaaaaggataataacaataaccataaaaatgattaatggctgcacaattaaaaaaataaattctgacctcaatagcatagtgtatgtggagaaagtaaaagtgcagaattactgcatgtgattgaagttgttaatagctgagaagactgttataactataagcaattttatacaagccccatgttaaccacactagaaaaacctatatcagatataaaaatgacataaaggaagaaaaatgaaagaatatcactacagaaaattatcaaaacacaaaagaagacagcaaaagaaaaagagaggaaaaaattacaaaaagacacaaaaacaacaaaatggcaatagtaagttcttacagttccataattaccataaatgtaaataaactaacaaattaaagatatgatattttaaaagatcccactatatgctgtctataagagactcacattagatttaagtaaatatataggctgaaaaggaaaggatggaaaaggatattccatgcaatggaaaattaaatgagagaaggcatggctaaacttatatcagacaaagtagacattaagtaaaaaatgttggtgaaagatattacataataataaaaatggcaattcaaaagaaatgtataatattctaaatatgcatgcatccaacatcaaagtatctcaatagataaagcaaatattgacgtctgaaataataaatagacaatacaatactagtaggaaacttcaataccccacttacaataatagacatatcaggcagaaaatcaataaggaaacagcagacttgaacagcactatagaagaaatgagcatatatagaaattccacccaatagcagcagaatctattttcttttcaagagcacatggaatattctttaggatagatcacatgctaagtcacaaaataacttttaataaatttaagaatattgaaatcattccaagtacatttcctgaccacggtggaatgaaactagaaatcaataagaagagaaagaattttttaatttacaaattcacacaaataacatgcctttgaacaatcattggctcaaaaaataaatcataatggaaactggaaaatgtctagaaacaaacaaaaaaatgcaacacactgaatcttatgagatgtagcaaaagcagtgctaagatggaagtttatagtgataatcacctacattaaaaaaagacaaaagacctcaaataaacaaactaaaattatagcacaaagaaacacaaaaataaaaaaatcaagcctaaaggtgacggaagtgagaaaataacaaagatcaaagcagaaataaaatagagaaaagaaaatcaatagaaaaaaattactgaaactgagttagtatgctgaaagataaaatcaacaaacatttaacatgactaaaatttctcatttaaattacactccctagctagacaggcatttctttctgtgaatagcaattaatagtaagcctagtttttgttttccttttcattgttgatatgcatattatcacatattttagatatcatattcttgacaattccagatattttaagtattttcctaatttgccccatattaactttgtcttctaagacaaagaacacaactaagaaaacaaaactttatttttattttagcaaatttccgtagttttaatgttataatttgagttaataattatcatttaaaaagatactgtaagaattaaagaaaggggaaagaaatgtgaaaggtggttcgacagtgaaggataggtttattttagagaaaacaaacctgagaggcgcttctggccatgttaggtcggagcccactctcttagagactaagagtttaagagttgttttttttgttgttgttgttttttgtttgtttgtttgtttgtttgtttttttgagacggagtctcgctctgtcgcctaggctggagtgcagtggcgcaatcttggcttcactgcaagctctgcctccaggattcacgccattctcctgcctcagcctcctgatgagctgggactacaggcacctgccaccacgcccagctaattttttgtatttttagtagaggcgaggtttcaccgtgttagtgaggatggtctccatctcctgaccttgtgatccacccacctcagcctcccaaagtgctgggattaccggtgtgagccaccatgcctggtccagactaagagtttttaaggattcagggttgaagcattcagcggaggcttggactgcttctgtttctgtttgttgtgcttatctgggagggagagttgtgtgttcccaaacatcttcctgcagctgctggcatactccccaacactggattctgcttttagctttcctatcttagcggacctgaagggtaaggaatgtgctattgaggcccactgttttctggggcccattttatgagggtgaagtttggcagttacccaagaaactttacccccacttccttttgtgctcaagctatcttatctgtgttttactatctgccctttctgcttgtagttaggacagaagtgatttccttgaaatgcatgaggctagaaagggagctggaacttaaagtggtggtgtttgtctgagatgacagtgctcctgctctgtcagttactctataaccaaggttataaaaatatactttcactttattttttgaagtagttttgtggtgttacttttaacactttcaaatatgatgccagctgtaggacttttgtagatgctatttatcatattaaagtggttcattatattcctaaattgctgagaagttaatttttataaatacatttttaattgtttcaaatactttatctgcatctattattaagataatgtgttgtttctcctttagtctgctaataggaaagtttcattaaattattttcaaatagtgaattatctttgcattactggattattgctggatctaatgtgctaatttttaaacaaaaatttcaactttattatacattaaaggctacatgtgcagatttgttaggtgtgtatattatgtgatgctcaggtttggagtataaatgatttcgtcatccgggtagtgagcatagtatgcaataagtactttttcaatccttgcccccttccactctcctcctcctagtagtccccagtgtctgttgttgccatctttatgtccatgagtacccaatgtttagctcccacttacaactgagaacataggtttttggtttcctgttcttgcatttatttgcttaggatagtgacctacagaaccatttccttcaacatagtaccaaaagtcctagccaaagcaatcaggcaaaagaaagaaataaaaggcatacaaataggaaaagacgaagtcaaaatttctctctttaatgatgatatgattctatacatagaaaccttaaaaactctgctcctggaactgataagctaattgagtaaagtttcaggatgcaaaatcaatgtacaaaatcagtaacatttctatacaccagtaacattctagctgacagccaaatcaagaacacaatcccatttacaatagccacaygcacacaaaatgaaatacctgggaattcatctaatcaaggatgtgaaactgctctacaaggacaagtacaaaacactgctgaaagaaatcatagatgaaaaaaataaatggaaaaacatttcatgctcatggattggaagaatcaatattgttaaaatggccatactgcccaaagcaatttacagattcaatgttatccctatcaaaataccaatggcattttccacagaactagaaaaacctattctaaaatttatttggaactaaaacagtgctgaaatagccaaagcaatcctaagcaaaaacagcaaagcccaaggtatcacattaccagtgacagtaaccaaaacagtgtggtactggtgcaaaaacagaaacaagaccaatagaacagaatagaggacccagaaataaaaccacacacctacaaccatttgatcttcagagaaaaaaaaaaaaaaaacagtggggaaatgttgcgggaagtcaggaaccccgaacggagggaccagctgaagccaaggcagaagaatgtggattgtgaagatttcatggacatttattagttccccaaattaatacttttataatttcttatgcttgtctttactgcaatctctgaacataaaatgtgaagatttcatggacacttatcacttccccaatcaatagccttgtgatttcctatgcctgtctttaatckcttaatcccgtcatcctcgtaagctggggaggatgtatgttgcytcaggcccctgtgatgattgcattaactgcacaaattgtttgtagagcatgtgtgtttgaacaatatgaaatctgggcaccttgaaaaaagaacaggataacagcaatgttcagggaacaagagagataacattaaactttgaccgccggtgagccgggcggaacagagccatatttctcttctttcaaaagcaaatgggaaaaatattgctgaattctttttctcagcaaggaacatccctgagaaagagaatgcatccctgagggtgracctctgaaatggccacttcagggggcggccgtcttttatggtcgaagctgtagggatgaaataagccccagtctcccgtagtgctcccaggcatattaggacgaggaaattcccacctaataaattttggtcagaccaattgtctgctctcaagccctgtctcctgataagatgttatcaatgacaatgcatgcctgaaacttcattaccaattttaatttcgccccagtcctgtggtcytgtgatctcaccctgcctccatttgcctttgtgatattctattaccttgtgaagcacatgatctctgtgacccacaccctattcatacaccccctccccttttgaaatcactaataaaaacttgctggttttatggctcagggggcatcacggaacctgccaacatgtgatgtcacccccagacacccagctttaaaatttctctcttttgtactctgtccctttatttctcagaccagccaacacttagggaaaatagaaaagaacctacgtgaaatatcgggggtgaattttgcccaatatctggctgaatttcccccgatagggagaggattccctattcaataaatggtgctgggataattggctagccatatgcagaagaatgaaaatggatccctatatctcaccatatacaaaagttaactcaacattgattaaagatttaaatgtaagacctcaaactctaaaaatcctggaagaaaacttaggaaataacattcttggtgttggtattgacaaataaattatgcttagtccccagaagcaattgcaacaacatgttatattttgttgaaaatatttgtatctatgttcatgagggatattgttctgtgctttttatttgttgtagtggctttgtctgattttggtattcaagcagtgatggcctcagggaataaaytgacaaatgtttcttcttttttttaattttctggaagagrttctgtaggattactgtaatttcctccacaaattattcttagaattacaggaccaacaaaattacctgggcctgtaattttcttggaggatacttaactaccaactcaattggttttacagatagaggaccattgaagakatctattttgtatgtgtgtgtwtgtgtctctgtgtgtgtgtgtgtgtgagagagagagagagagagtgagaaagagatttggtaatttttttcttaataaattggtttattcactataagttgttgaacttataggcataaattgtccctaatatttcttcttatcctcttatattttattatatattgaatagctatgggctttgtaataatatccctctttcctactgatgttggtaatttttgttcactatttctctctttctggctttccctctgttcctttctttggttgatctggaaaaaggtttttcaatattatcaaattatcaaacttttcaaagaagtagcttttggttccattaattttattattttctaccttcaaatttcattgttttaaagcctaatctttattatcacatttttttctctttgtgttgtttttcatttcttcttagtttctagtttattaatgtgaaagcttaagttattgatttgagaatttttttcttttctaatgtaagcattcaatgctataaattttccccccaactctgaattagctgcatcctacacattttatgttgcatttttatattaatcaagtttaaaatagatgctaatttgtcctgaaacttctttttgacttataaattattttcaagtatgttgtttaatttccaaatactttgtgatctttatagacaattttctattattgattacaattcttctaaatttaagtctgttatgttaacatagatgagacctatcttgacaaatgttctacatacattttaaaataatatgtattctgcaactgttgggtataattttaagttgtttaataatattgataatatattatataccctggcttattttctgtgtacttgttttattaattaagataaataggtatagttttgaatttggttatttctctttgcagttatattaggtttttcttcaagaattttaagttctgttgttagatccatgcaaatttggtattactattacttcttaatgaattgaccctttggtctttatattgtttgcctttgtcattggtaattttccttatgctgaaatccactttagctaatattactatatacaccctcatatgctttttttttttttttttttgagatggagtctcgctctgtcacccaggcgggagtgcagcagcgtgatctcggctcactgcaaactccacatcccaggttcacgccactctcctgcctcagcctcccaggtagctgggactacaggtgcccaccaccatgcccggctaattttttttttgtatttttagtagagacagggtttcactgtgttagcgaggatggtctcgatctgacctcgcaccctcacattcttttaattgctgttaccagtttgacttcttggtacaattatatttaaagtatttttcttataaaatatatgactggatctttttattattcttgttttaatccagtctgacaatatccgacttttgaattggtgtgcctatttttttattataccttaagttctagggtacatgtgcacaatgtgcaggtttgttacatctacatatatgtgccatgttggtgtgctgcacccattaactcatcatttacattaggtatttctcctaatgctatccctccctcctcccctcaccccatgccaggccccaatgggcgatgttccccaccctgtgtccaagtgttctcattgttcaattcacacctatgagtgagaacatgcagtgtttggttttccgtccttgcgatagtttgctgagaatgatggtttccagcttcatccatgtccctacaaaggacatgaaactcatccgtttttatggctgcatagtattccatggtgtatatgtgctacattttcttaatccagtctatcattgatggacatttgggttggttccaagtctttgctattgtgaatagtgccacaataaatatacgtgtgcatgtgtctttatagcagcatggtttataatcctttgcgtatatacccagtaatgggatggctggatcaaatggtatttctagttctagatccttgaggaattgccacactgtcttccacaatggttgaactagtttacagtcccaccaacagggtaaaggaattcctgtttctccacattttctccagcacctgttgtttcctgactttttaatgatcgccattctaactggtgtgagatggtatctcattgtggttttgatttgcatttctctgatggccagtgatgatgagcattttttcatgtgtctgttggctgcataaatgtcttcttttgagaagtgtctgttaatatccttcgcccactttttgatggggttgtatgattttttcttgtaaatttgtttgagttctttgtagattctagatttagccctttgtcagatgggtagattgtaaaaattttctcccattctgtaggttgcctgttcactctgatggtagtttcttttgctgtgcagaagctgtttagtttaattagatcccatttgtcaattttggcttttgttgccattgcttttgatgttttagtcatgaagtccttgcccatgcctatgtcctgaatggtattgcctaagttttcttctagagtttttatggttttaggtctaacatttaagtctttaatccatcttgaattaatttttgtataaggtgtaaggaagggatccagtttcagctttctacatatggctagccagtattcccagcaccatttattaaatagggaaccctttccccatttcttgtttttgtcaggtttgtcaaataacagatggttgtagatgtgtggtattatttctgatggctttgttctgttccattggtctatatctctgttttggtaccagtatcatgctgttttggctgctatagccttgtagtatagtttgaagtcaggtagcatgatgcctccagctttgtcttttggcttaggattgtccttgcaatgcaggctctattttggttccatatgaattttaaagtagtttttccaattctgtgaagaaagtcatcagtagcttgatggggatggcattgaatctatcaattaccttgggcagtatgaccattttcacratattgattcttcctatccatgagcatggaacgttcgtccatttgtttgtatcctcttttatttcgttgagcaatggtttgttgttctccttgaagaggtccttcacatcccttgtaagttggattcctaggtattttattctctttcaagcaattgtgaatgagagtttactcatgatttgactctctgtttgtctgttattggtgtataggaatgtttgtgatttttgcacattgattttgtrtcctgagactttgctgaagttgcttatcagcttaaggagatttgggtctgagacgatggggttttctaaatatacaatcatgtcatctgcaaacagggacagtttgacttcctcttttcctaattgaataccctttatttctttctcctgcctgactgtcctggccagatcttccaacactatgttgaatagaagtgctgagagagggcatccctgtcttgtgccagttttcaaagggaatgcttccagtttttgcccattcagtatgatattggctgtgggtttgtcataaatagctcttattgttttgagatacgccccatgaatacttagtttattgagagtttttagcatgaagtgctcttgaactttgtcaaaggccttttctgcatctattgagataatcatgttgtttttgtctttggttctgtttttatgatggattacatttattgatttgtgtatgttgaaccagccttgcatcccagggatgaagctgacttgatcatggtggataagctttttgatgtgctgctggatttggtttgcccgtattttattgaggatttttgcatcaatgttcatcagggatattggtctaaaattctcttttttgttgttgttgtgtctctgcccagctttggtatcaggatgatgctggcctcataaaaagagttagggaggattccctctttatctattaattggaatagtttcagaaggaatggtaccagctcctctttgtacctctggtagaatttggctgtgaatccatctggtcctgracgttttttggttggtaggtgattaattatggcctcaatttcagagcctgttattggtctattcagagattcaacttcttcctggtttagtcttgggagggtgtatgtgtccaggaattttccatttcttctagattttctagtttatttgcatagacgtgtttatagtattctctgatggtagtttgtatttctgtgggattgttggtgatatcccctttatcattttttattgcgtctatttgattcttctctcttttcttctttattagtcttgctagcagtctatccattttgttgatcttttcaaaaaaccagctcatggattcattgattttttgaagggttttttttttatgtctctatctccttcagttcttctctaatcttagttatttcttgccttctgctagcttttgaatgtgtttgctcttgcttctctagttcttttaattgtgatgttagggtgtcaattttagatctttcctctttctcttgtgggcatttagtgctataaatttccctctacacacggctttaaatgtgtcccagagattctggtatgttgtgtctttgttctcattggtttcaaagaacatgtttatatctgccttcatttcattaggtacccagtagtccttcaggagcaggttgttcagtttccatgtagttgagcggttttgagtgagtttcttgatcctgagttctagttcgattgcactgtggtctgaaagacagtttgttgtgatttctrttcttttacatttactgaggagtgttttccttccaactatgtggtcaattttggaataagtgtaatgtgctgctgagaagaatgtatattctattgatttggggtggagagttctgtagatgtctattaggtctacctggtgcagagctgagttcaattcctggatatccttgttaactttctgtcttgttgatctgtctaatgttgacagtggggtgttaaagtgtcctattattattgtgtgggagtccaagtctctttgtaggtctctaaggacttgctttatgaatctgggtgctcctgtattgggtgcatatacatttaggatagttagctcttcttgttgaattgatccctttaccattatgcaatggccttctttgtctcttttggtctttgttggtttaaagtctgtttcatcagagactaggattgcaaccctgcttttttttgttttccatttscttggtagatcttcctccatccctttattttgagcctatgtgtgtctctgcacatgagatgggcctcctgaatacagcacactgatggatcttgactctttatccagtttgccagtctgtgacttttaaatggagcatttagcccatttacatttaaggttaatattgttatgtgtgaatttgatcctgtcattatgatgttagccagttattttgcttgttagttgatgcagtttcttcctagcctcgatggtctttacaatttggcatgtttttgcagtggctggtagtggttgttcctttccatgtttagtgcttccttcaggacctcttggaaggcaggcctggtggtgacaaaatctcaatatttacttgtctgtaaagtattttatttctccttcacttacgaagcttagtttggctggatatgaaattctgggttgaaaattcttttctttaagaatgttgtatattggcccccactctcttctggcttggagagtttctgctgagagatcagctattaatctgatgggcttccctttgtcagtaacctgacctttctctctggctgcccttaacattttttccttcatttcaattttggtgaatctgacaattatgtgttttggggttgttcttctcgaggagtatcgctgtggtgttctctgtatttcctgaatttgaatgttggcctgccttgctaggttggggaagttctcctggataatatcctgaagaatattttccaacttggttccattctccccatcactttcaggtacaccaatcagacatagatttggtcttttcacatagtcccatgtttcttgcaggctttgttcgattctttttactcttttttctttaaacttctcttcttgcttcatttcattcatttgatcttcaatcactgataccctttcttccacttgatcaaataggctactgaagcttgtacctgtgtcacatagttcttgtgccatggttttcagctccatcaggtcatttaagttcttctctacactgttccttctagttagccattcatctaatcttttttcaaggtttttagcttctttgcgatgggtttgaacatcctcctttagctcggagaagtttgttattactgatggtctgaagccttcttctctcaacttgtcaaagtcattctctatccagctttgttccattgctgacgaggagcagcattccattggaggagaagaggtgctctgatttttagaattttccacttttctgctctagtttctccccgttttgtggtgttatctacctttggtctttgatgatggtgacgtacagatggggttttggtgtggatgtcctttctgtttgttagttttccttctaatagtcaggaccctcagctgcagttctgttggagtttgctggaggtccactccagatcctgtttgcctgggtagcaccagcagaggctgcagaacagcaaatattgcaggacagcaaatattgctgcctgttccttcctctggaagctttttcaaagaggggcacccagccatatgaggtgtcagtcggcccctactgggaggtgcctcccagttaggctacttgggggtcagggacacacttgaggaggcagtctatccattctcagatctcaaactctgtggtgggagaaccactactctgttcagagctgtcagacagggaggtttaagtctgcagaagtttctgctgccttttgttcagccatgccctgcccccagaggtggattctacagaggcaggcaggcctccttgagcttcagtgggctccacccagttcgagcttcctggccactttgtttatctactcaatcctcagcaatggccaaccccctctcccccagcctcactgccaccttgcagttggatctcagactgcagtgctagcagtgagcgagtctccatgggtgtaagaccctctgagccagacgcgggatataatctcctggtgtgccatttgctaagacccttggaaaagcccagtattagggtggggagtgatccgattttccaggtaccatctgtcacggctacccttggctaggaaagggaattcccagacgccttgtgcttcccatgtgaagtgatgccctgccctgctttgtctcatgctccgtgcgctgcacccagtgtccaacaagccccagtgagatgaacctggtacctcagttggaaatgcaaaaatcacccatcttctgcattgctcacactgagagctgtagactggagttcttcctatttggccatcttggaacctgatccaaattagtgtgtgtattaacatttaatgtaattattgatacggttagattaaatttactgttttgtgattggatttttgtttgttccctctctttttgttgccgttggtagtgttgtcagttttggtgttggtgttactgtattgatacttttaagccttttcttggattctttcaaaatatattaatccatttaaatttttttgactttcatctacataccttattatatttggttggggttgctctaggaattacaatatataaatataatttttcactctgtatgtagagttaatattttattacttcaaatataatctagatatcttaccaccatctgggtttctttatttatgcaaccccctctttgtggagtggctatcatatgtatttcatctacatactttgaaaactgctcaaataattttataacttttataacagcaaagttataaaattaagtttaaggaacgtacagaggcaaaatacagcctattttaattgttcagttgtcattactgttgtttttattttgtcatccctaatgttctggatttttcagttaatatttatctagtttcaaaaatttttttactatttatttaaaagcaggtgtaatgacaaaaatattctgcttatttttttctttaaaaatgtttttattccacctttattcttaaaggatattttcattatgtgtatctgtcttcaattttttttgttttctttcaacactttcaacatgttgtcctgtcttttagtcttatgcaatatgttacttttctccacttgcctaaaasgttttacatttatctttgtttttctccagtttgattatggtgcatctgaacatggttttatttgagtttatcctatttggtgttttctggaattataaaaatctgtaaatttgtgttcttcaccacatctagaaagtatttagccattctgtcttcaaatattattttttgactaacttttttctaaccttctgagactccaattgagaggtgaagccagctggacttcctgggttgagtggagacttggagaacatttctgtcttagaagaggattgtaaaatgtgccaatcagcattctgtaggtaggattgtaaaatgcaccaatcagtggtctgtagctagctagagttttgtaaaatatgccaatcaatgctctgtaaaaatgcaccaatcagtgctctgtggctagctagaggtttgtaaaatgcaccaatcagtgctctgtaaaaacgcaccaatcagcactctgtagctagctagacgtttctaaaatggaccaatcagcactctgtaagatggaccaatcagtaggacaagggcgagaacaaataagggaataaaagctggccgcccccagccagcagtggcaccccccttgggttctcgtccatgctgtggaaactttgttcttttgctcttcacagtaaaccttgctgctgctcactctttgggtctttgccatctttacgagctgtaacactcaccgtgaaggtctgcagctccattcttgaagtcagtgagaccacaaacccaccagaaggaaccaactccggacacataatgataccttgcagccttgagccacaagtttgttgcatactttttagagattcaaacttacattcaagttcaaactactctctgttgtccaaattgaataatttctattaatataccttcaggttcactaattctttcctttgtcatttcatttccagtgaattttttatttatagcattttaatttttagatttaaaattttctgtggtttattcttataacttctatttctttttgagaacttctatccttccattcatttcaagggcttttgccttcatcgagacgcatttataatatctgctttaaagtctactaataattctaacataggttattttaaggtcattgtttcttaattggctttctctttgagagtagttgagctatgcctagttcttctatatatagattgatagataattgtaatttagagttttaaaatattactgtataatactatgggtcctgttaaaatcttctggagatttttttgtttgttttgttgcacttacttgtttgtctgtattagcaggcaaatagatgaggttcagactgaatgatatgacccaacttctattcactataatttcaatttcagtatagtaaaaaaatccttggcagtgatattttggtctgcccagcatgtccaccaaccatgtgctaatttgtcacctggaaattcacattcatcatatcaaagttttttcgaacttttcatgtgttggttcagttccacacatacataggttgggatgaaccgtatactccttgtacagattttctccagcttttctccagttccatcctcttcctgattaccttgtactctctaaataccggaggccttgatttggtactctagctatgaggccagagtatttgcctcattacgctcgtgcacatctacaattctgttcaacttggggcaaagcagtaagagaagagaaagagagagagagaggcagagagagggaaagggattgcttcctcactttagataacaaaagcatcttttccactttctataatgagagagaaggattattttctgagtattttaattatcagcaagtccactgatgccaccatcattgctaccagttgcactgtctccaccatggaaatgcagcttcatgaccagtgcttgagtgggacagaccttggagagtaaaaagagaaagtcaagacatgaaaatttcctctcattctttctgtcctatagcggtcacagttcctagagtctgcaccacaatgagataagtttccttggagcttttggtgactgtgtctgctgcacatttattggattcaggccagaagagatgggagaataaagtgcagagagaactcaccccatgggattcttctttgagttttaatttctctcctcagcaaacttgttattatttatttttcagagtctctagatgtttatgtattatacccagggttttaattttattcagcggaagagagtgtgacataattactctatcttagccaattctgcaattcctatcatacattttaaaaagtcctactatctgttgttttgaggctttactgtagaggagataagcattgaaaagtggaggaccatttaagaggcaattatattaatccaggtgagagataatgatagctcaatggaaacagtgagaagtggttagattctggatctctttctttttttttataatttattttatttatttatttatttatttttttattttattattattatactttaagttttagggtacatgtgcacaatgtgcaggtttgttacatatgtatacatgtgccatgttggtatgctgcacccattaactcgtcatttaacattaggtatatctcctaatgctacccctccccccttcccccacccaacaacagaccccggagtgtgatgttccccttcctgtgtccatgtgttctcattgttcaattcccacctatgagtgagaccatctgtttctaaggtaaatcattaagatttattaacaaattaatattgtgtgtgataggaagctttacaaaatatgagaaacttcactttttgatctgatgtattttagcagaccaaaaaatgcaactaagaaacaactgaaaggtgtttttgaatgaggaagaagtataatgtatctatgtaatggaaccctatgtggtcataaaagggaataaggaagtacaatttgtactgatatggaaagatttccaagatacattgttaattgaaaataaatcaatctatagtaaattacatatagtatgctatcattgtgaaaaggaggaaaataatatacataggtgttcgtatacataggaaaagtgctagcagatgatgatgggaaggagaattattttactgtgctttattgtaacagttttgatccatgtatattacatactaaataattgaactaatttttttcaaggatgtcaaagttttatagtctcaaaatttaatcagtaagtatttatcaataacttgccatgtttaagccactgttttagactttaaagcatgtcaagttaaataagacattattaatattaccaggaaactcttttcattgtttttgttataacagactgcactagacagtacaagtaaaatcttatttaacttcatatgcattagcagtgatttcaaataagtatcaattaataagtgccaataagctctttattcaagtgttgttacttagtaaattcacttcttatttatctgcaatttttctatatttttcccataatttttgcacatttattataagaagaggaagacaaaatcacaagaaactcacagcaatccaactatcctaatgtaactctttcatacattaaactgtgttaagcctctttcacttatcaaccatataatgaatagtttcagttttaactgtgatggccttgacagaatttttctgcattatatcaaatgcgttttccatgtaactatagtcgttaggatcttaattttaaggactgattaagatggtatgcaataatttaccatttccccagtcagatatttagattgtttaacaatttgccattaaaattaaggttaaactgaacatgtcaatgtacaaagcagcattcttcatttgattttattcctcagggttaattaccagaaatgaaattattgaaagaaaaaatatttatagtttctgataatttttcatcaactgcttttcaaaattatcttactggcaataattatgttaggataataggattatgtgtgatttaattaattttgatttccatttattttgttataatttataaatgtatttgacaatctctcccttatttagttctactttaggcaagtttcattgttcttgattattcctgtacattatctctgcatctgcagaaatatttgacaaaatatatgtatatctctactaccatctctacttatttttgtaacagaaattggtgagtaacaagagtacaggtattgttatatatcattattaaacaaaatgtcttataatacagtctcacaagaaggaaatgtgtgaggcaaatttggcctaggtttggaactaaacaatttctagtacatctctagagaaaccttcatttttccaggccagagatctgcttagaaatgaaagtattgtacttgaagtacatcttatttactgctgtatactagagaaggatttagaaatcatatcatatattcacatatttaatatcaatcaatatatttaatattccatatcatatatttgaactgggtttatatatatagatatatatatggtgggaaaaaaagaaaattaaaaaaacaacatgtctataaaggtaaataaaaaactaccaaagtaaataaaatacagttgctctagaaagagattgtgtcaatttgtattaccaccagaaatgcataattatgtgagttccaccacaatcttatgagaattgtatatcaaacatttcagtctattgtaaaatatattaaaaattgctaattgttgctattacaaatatttgaagagatttttgaaatgcaaattgatttctgaatatgtaaaccacagtttacaatgtgttgcttgtgtatatattcttataggtagcaatcttacatttttggcacaagcctaatcattgtatgttcttttttcttttatgcataagtgaattccatttgatatcattatcttaaataacatctagactatagttgcaacagaatcgggcattggtcaatagtttccattttcttgctttgtcactaggcttacgcttgctctgtaaaataaatttgaaggtattcatcattcatttagttatttgttaagcatttattgcacacctgccttgtaccatggacctgctacacagttagaatacaacagtgaataaaacagaagttgtgaccaaatctaatagcaaaagaaacccattaaggtgagttcaacattcagcccacttcatttttccttgggacgtttgctataccaggcagcaagagagggtgaccagataagggctgcagagctttcagcaatggtatagagcttgagaaatatgttaaagtctggggttcctgaattatccaagatacaagggcaataatctctaggaaaagaaaggataagagaagcaagccctaaactttgagtttccccttcaaagaatttgccaaattcttgaactacatagcacaggaggtcaagaaatcacataggtaaagtttttggttgtatcatcttacttcctaaaacatttatataactttggaatatattatatttatattggaataaattatatttacattttagtttagaaagaatttatggaataaattatatttggaataaattatatttacattttagattagaaagaaggtattgataaatttaacaattccagataatattgactggcaacagataattcgtaacaaatgagatttgtcacagtagatatgtagcaagtccatagtaaagatgtactgaaagttggagttaaaacaaaacaaaactgagtaatgtatgaaatctgcttcttactggctatgtgatccagagtaaattaacttgaagtttttgtagctcgtaattttcagtggccaagtgtactttctaaatgcactgataaagtgtagaatgagcagagttcctagctggttgaagcactagttcgttcctagatggtacaaagaaaagaaaaacagagggtttacaagaggctctgcagaatgtggctagaaagcagagcagaggatttgacattgctacagtgaggaagatattttgagctcaggaacctacaaggaagaggactctgtaaacaatgcaggatcatagttgggaataccaatacaacgtttactagcagtggaaatgagccagatgtatagtgagccatctggccttatattacccagccttaaattacctccaccccttatgggattaaaatgatctgccctggttcactgaccacaaaagggtaggaagtagcttctctgagcaagataaattcatagtgttggtctaatttcccacaccaatcatctggcattatgagtgaaaatatatcccagttctttgttagttaatttacaataagatttcaaggacatggttaccacatatctgtaaaatatagtggaaataaacccaagcaataagaactttagtttcaagaaaattaaattgagctgtttattgctattgagctcaaacagaataattctaacaaaatgcttmattttagtcagtaggtgtggttcatctttttaaactgagtgatattataataaaagtgataaaatagaaaattccacaaagttgataataattatttaaaataaaatctattaatagagcaattttaatttcccagattgaggaaaatggtcacaagatttttaaaagtttccargtaccaaaaagaatgataaaaggctcatataaatacacatcattgtaatataccaaacatcacgaatgattgagtcagaagttttcacagaggaaaaacatattttaaaaaaattaaacaactaaaaaaccacgtactattgaatgagattcatacagaaagctacatgagtaaaatgctcaaaagatggtgatgcaaggccttcgaaattctgaaattctatccccagacaagctatcattcaagtgccagggccacataaatgtagttttaggtagcaataatgtatgcaatttattttgaaatacatccttttgtgaggaaattacttaagcatataattcagcaaaatccaaggaagagaaatgcatagcaacaagaaatgatgaaacattctgaagatttatgtggaaaaaaaaaatcccaactaggtaacaggcctagaaaacagctagttgaatttaagttaaaatatcagtggattctaagaatatcttaaaaagaaaaatgaattctattttttaaaatgaagaaaaagattaaggagtgaatgatattagtaatataataataaaagtatttgagtcctctatgaacaagcaaggcaacttttagaagtagcacatttattgctgaagtgtcaggtaaagtaaaatgtggaatgatttcraacaataagtgtaaataaaaatcatttaattcatctagatgttaggaatattttattgatccaaggtttgtcacagtggactaaatttgaagaagtataatttacacacatcattctaaacaacagttacacaatgtttgtgtgtgtatctttcaaataatggaaatgtttattaatttggttatcacacttagaataagcctaaagaaaaagttaggaaggcacattgttacagaataaaatatgattttatcaacttgatgtgaattaaaattaaaaggacagaacatgaaagttcaaaggaaaaaaggagaagtaaagttaaaataacaattttactttaatgcttttgtaataaaagtgtcaggaattgttggctaggaaacatggggactatgcttatggtccgatttttcctgactctttgtaaaatggcctatcccaatgaatgaaccataatttaaatgttatccatgctgcttttctaccagaaccagaagtaaatatgtgtctatacgaggtgacaagtacttaaatatgaaaatgtcttataattttattgggagctaaggtagcattggcaggtaaagttcctagggatatgagtaattgacaatgtatactcttggaactgagacaaacgggatttgttccaaaggtgctcagagactggctctcctaattaagcatagaactgaaaggaatcagtatttttttatacttaatatttctctataagtcacgaattcagtgatcaaatactcatattttgtaattagtcttaatgtgggcatgtttttaaaatatgccatgtgtttttttatacttaatatttctctgtaagtcatgaattcagtgatgaaatactacatattttataattagacttaatgtggccgtgtttttaaaatatgccatgtgtagtagtcaggtttgtctagagggatagaactaatagcatatatgtatatatgaaagggagtttgttatggagaattgactcagacgataacaggtaaagtcccaccataggccgtctgcaatttaaggagcaaagaggccagtggtggatcagtccaagtcccaacacttcaaaactagggaagccgacagtgcagtcttcagtctgtgcccaaaggcccgagagcccctggcaaaccactggtgtaagtccaagggtccaaaagccagagaaattggagtctaatgttcaagggcaggaagcatccagtatgggagtatgatgaaggccggaagacacagcaagtctgcttattccacctttttccacttttccacgtacattttctagccctactggcagccggttggatggtgcccacccagattgaggatcggtctgcctatctctgtccactgactcaaatgttaatctcttttggcaacaccctcacagacacacctaggaacaatacttcgcatccttcaatccaatcatgttgacactcaatattaaccatcacaccaggcataacaacaaaagttgcagttatcctccaatgtgagaattgaaagcattttaagtggcatatttttattaattgtaataatgtatttcaacaggtgaatagttaaacaaattgtggtttgttaacttcaaagaacaaactatgggccaggcactgtggcttacacctgtaatcccagcactttgggaggccgaggtgggcagatcacttgaggtcaggagttcgagaccagcctggccaacatagtgaaaccccatctctactaaaaatacaaaaattagtcgggcatggtggtgcacatctgtagttccagctacttgggagactgatgcagaaaaaccacttgaccctgagaggcagaggttgcagtgagctgagattgtgccactgcattccagcctgggcgaagaagtgagactctgtcaaaaaacaaaaacaaaaacaaaaacaaaaaaactacctagtattatagcccatatttgtatagcaaatgataggtggccttcttctgatgctgcatattataatgcaaaccaggatttaaaatagtgggcacaatttatataaatagcatttaaatttggttgaaatttggaartaaaattaaccactaaaatccctttttgctatttctgtaagaaatattattcttagaaaatcatcactggccatcagagaaatgcaaatcaaaaccacaatgagataccatctcacaccagttagaatggcgatcattaaaaagtcaggaaacaacaggtgctggagaggatgtggagaaataggaacacttttacactgttggtgggactttaaactagttcaaccattgtgaaggtcggtgtggcgattcctcagggatctagaactagaaataccatttgacccagccatcccattactgggtatatacccaaaggattataaatcatgctgttataaaggcacatggacatgtatgtttattgcagcactattcacaatagcaaagacttggaaccaacccaaatgtccaacaatgtgcacatatacaccatggaatactatgcagccataaaaaatgatgagttcatgtcctttgtagggacatggatgaaactggaaaccatcattctcagcaaactattgcaaggacaaaaaaccaaacactgcatgttctcactcataggtgggaattgaacaaagagaacacatggacacaggaaggggaacatcacacatcagggactgttgtggggtgggggaaggggggagggatagcattaggagatgtacctaatgctaaatgacgagttaatgggtacagcacaccaacatggcacatgtatacatatgtaacaaacctgcacgttgtgcacatgtaccctaaaacttaaagtataataataataaaaataaaataaaataaaaataaataaataaataagaaagtgagcataaaaaataagcaaacaagtaatgtgagtgcagcttgattcctctttagaaacttaaggtcagtcacagctttatgtatgatgttcttaacattttcctgaaactgaagtatattacattatgttgggtatcatttgtgtgacatatttgtctgttcaaaatattttgtgttaaaattttaaaataaaaaaggaaaggaacacattaaaacatcatgcataaatagtggaatatttcttcagtgattttatcttaattctccttaggagtgtttatagaaaatacaaagctaacagcaatgtatttacctgtacatagttgttcaaattgtcacaaactaaatggaagcaagccttatgtttgatggattaaatatgtcaatatgtcacatgtattaatgcagtgggcaacagcttcctctagagaaatcttgtgcttcctctcaatgtgcccctcttgccgctacacacacacacacacacatacacacacacacacacacacacacacacacacacacmccgagaagagatagaactatattgctgtctatttaacacttaaagaaaatgacatttttcttaaataagtcttttaaatcttacaaatctttaaacactttgtatagtctgtattcaatgtgtgtaaagtacaatcaattggaacctgtttagtatttctgacacactaagaagaaacagtagagagagataatttaatttcatataattgtattaacaatgtttgacaaaattttaaaagtgttatttttcagaagtcagttcatgtttcttttggcccaggaatgcttttctttcttgaaacagcaaaactgtcaaggaataaaaagagtagtctatttagttcttcagcgccttacctaatcaattaaaagcaaagtcccttgtgatagaatagtccctaaagttaaaagtaagcacaaatataaaaatgatttcatttcaaattgtaattcattcttgaatccttagaatgtttttcttttaaatgtattgagtccatccatacctttcttaagtgtttgcatccttgaatttttcaaccccatttattcaatgtttctgaagaaattcccttgggaattcaaatatcagactatctttctgcattgggggagggtatacattttgagaatctgcaattcttactttattctggcaatttattctgtttttagcttagaactagtgacagaaaagttaaacaaaggtagaatgaagaaatggcagcactgctaaactcccaattcaggttatctctgtgtggattcattgtttggtgtgaaagaatggccaaacagcaggcgtgcactcatatgtaagcacacagacctataaaaaaaacacattcaaaaatgaaaagaaaaaaaaagctttcctgctgctatggcttaacttcaatagttttttacataaagaattaactgaatgaggcttcataagagttgagaagagggtagttggggaagatcgatagataagatgttgatgtctcgtctgatttttgatgaagatatatttgaaagtgtacacagtgtaatacatagtgttgtatcttcatgtatgtatctggaatccaggtgaggtttgtctttcggttttacacaatgcatttctcaattttttaatgttttgaaccataaatccatttctaatactgagcttcccttgtttagaatttttgggcaataggcttaaaggaaaatatacaataaaatatatgtttttccaagacatatttccaataggttttgttaaaaaaaacagttttaggatgcaatatgctcaaataactaaaaatggacacattccataagggaggagaaaaatgctttatatttctcctatctatcttactaacagatcagtatattgtttgaggtgacgatacattgatcaaaacatctacatttcaatttcctttttgaaaggtgttttcaataacatgtaaagctgaagttactgggtcagtgtcaagaacagctctttttattggacatgctcaaccagtatatgtatgtttcttttgccctcatctcttcctgtcttctgctttctggagcctatatagtttacctggaactgaagtagcaatgttgtaatttaaaggtagaagccattaagagtggcaaagcagcaagaatcctgagtcgttagtgaccacaaacttccaaaacagccctgagctttctatctcaatctcatttgagtcgttttattactctttagtttttttgaattacttatgtttctaccctatctagtaaagacagtcatcatgatgaggaaaacaacatgtaatacattctgtttgcagcgatctttctttggtaattataatcaatcgattgcattgggtgtttcctatgaatcattcactgaaaaggcatggctaactgccaagttacattcatcaaatatttattgaggctgacattgcattagatactggaaatatatgacaatataaaaaaaaaccatggctgggagcagtggctcacgcctgtaatcccagcactttgggaggccgaggtgggcggatcacgagatcaggagatcgagatcatcctggctaacatggtgaaaccccgtctctactaaaaatacaaaaaaattagccgggcgtggtgatgagccatggagcgtatgtgggacctgtgggagacagactgacacctctccttgaattggctgaagcttgatggaggtgtggatgaggcacttagggtctttgctccttcattagcccaaggatggcaagggcagttccactgcataggcagtggcagagaggctttgaattgcccctggaggctctttccagggagttgctgagttggtactgtcttgatagctccttcaggggtggctggagtaccagacctggaggacctgcctgctgaggagacatggaaacaagcacctacgttatactctgtctacttttccatagggctactatgctatgcttggggcttgctccattccctagtcacctcagattttccagaacctggaggcatcaccagtgaaggttgcaaaacagcaaagatgatagcctgtccctccctctgggagctttgtttcagggaggtatggacctgttgccagcctataagcatgtataagaaatggctggagaccccagttgagaggtcccccccagagagaaggaacttgacaggaacccacttaaaaaaagcagtctggccatattttggtaaatcagctctgctgcgctgggggtccacttcagccctctgtcacctcaggcactccaatgctcaaaggctcgaatggttaagtcacccaaacagcaaagatggcgacctaccttctcctctaggagtgccgtcctagggcaattcagatgtctgatggctggagagctcaggtgggtgtggctgaaggccttgactgggaggtcctgcccaggattgagtgcctgcttaaagcagcagtcaggccacattttggtagagcagctgtgctgtgctgggggatcccatctgccctgggttggctcaggctctccaaagcctgaaggctggaatggcaaaggctcctgaacagcaaagatgggagcctgaccctccttctgggagatccttcttaggggagtgcagtgctgctactggtagctgattgtaattttaagccagtgggtctaatcttgtgaggtgctctggaaatgcagcctatgggcttttgctgctcagccccctggattcagcctcttgcctggggttatgtacaggagtctaaccttctactttgctagagcagcagctacttttgccagaaagtcgaagtatctaaggctccatggtttccatgcacacctgagcagctgctctgctgagactccatgtagctctgtctgacagactgaagattgaaggccctagtggagtgggttcacaaggagatcttttgaccctagggtagcaaatatctgtgggagaagcatagtttcctggggtggctcattcatttatggcttccctgggctggggaggatcccctgactccatgttgctgccaggtgggccattgtcttgtcttgctttgcttcattctctgtgggtcaagttgtttctgtgattaatgtcaatgtgagtacatgggtgtttcaattgaaggtgttgtatttacttgccccttttgttcctctccgtgagagccacaagcactagctgcttatagtcagccatcttggccacttttatatttttttataagcccttttaaatatttacttttataagcccttttaaatattttggaaacttcttgttaaagaacttaaaatcaaccaggttaaacttgggccttaaggtgagagagtaacctcaaaagtttacttgtgaagacttcttctgaactcctttatgtctctccagtgtacacacactatcatgttcactctatgaggaacccaggattcttctatttggttattccactgtgtaggtcttctagttccaagccacagtatctttataacctgtgttatttccaaagagtcatcaataatgatatccttttatgttggattcttaaaatttgtgtcttctgtcttctctgcttgccagtttaaccaaaatttatcaaagcttttatctgaaaagtgagtcaacttttgctttaattgatttttctacaattttatctttctgttactattttattgttcttctatagaatctttatggtttccttctttttttcttgcttggaaattagatcagcctttctttgttagtttcttaatgtggctgctttggttattttaaatcattctttttgttgaatataggctttcaagctaaacattttttaaacactgctttattttcattcatctgatgcaaaacgtcttctaatttccctggttattttatttttctcttggtatttaatcaagccttgacttcccttttacttgattatttctgagtgtcagacattgtggataaaaattatagaagtaatttgaagatataaattatgttatgttctttaagatgatttacttaatatctgactgaaataaagaataaaagcacatgaagcaaaatgaactcttctgttatttataaaagctaatctggagattgtaacttatattagtggacaagaacttcagaattaagccaaatttatctactcacttattaatatattcaatgttcaaatggggacaagcatctttacaggaagtagagcagaggagaagttgcaatatctagataaaggctttgtccccagaagattttaaaaaataaaaccaaagtgctgctctatgtactgtagcctagaagaaacataagaaagagctaccaatctaagatttggaaaagattaaacagagaaaggaaaaaggccaaagtttggcgtacttgaggaaaagaaaaactattgtggcaagagtgtcttggatactaaaatttgctctgtgtgtctttgtgtgtgtgtgtgcatgtgtaggtgtgtgtgtatatactataagatagaatattaatcagagaggctaagataaatagtttgaattgtaaattttcatataaataatgtaagtgtatggaagtttctcagaatgttgctgatctcagatctgtctgtggtaagaaaacatatttttatatatgtttaatacaaagacatttagaagattgagtgatcaaatttgattggaataatcaaggaaaaacatgtatctttataaattttcatttgaagtagaccttttaaggaggcaaatattcttttcattctttaaaatctatctgaaatatcatttcctaattgaagctactctgatatcatcatctttgtgctttctaccttgccgacatagtttattctactattgcccacagctgattctttactatcttcttagataatagtagccctatatgagcattgcctgctcttaaaactactctatttctggcactttttgcataggggctaaatgcacagactctggaggcagactctctggtttggattcatgtgccttcatttgctatgtaacttggacagattgtttaacctctttgtgctccaattttttcatctgtacaatagggataacaataataacaataataccaacttcatagggttgttttcggcattaaatgacataatgcatgttatcagcataaagcagcatctgacagataaatgtgctcaaataaatattagctctttctctctttctctctgtttttttttttttttttttttttttgagatggagtctcactctgtcacccagcctggagtgcagtggcactatctcagctcactgcaacttctgccacctgggttcaagcggttcttatacctcagcctcctgagtagctgggactacaggtgtgtgccaccatgcctggctaatttttgtatttttgtagagatggggtttcacgatgttggccaggctggtctcaaactcctaacctcaagcgatccagctacctcgacctcccaaagtggtgggattaaaggcgtcagccactgaaactgcctttgcaaaattatgactgagaaagtgaaggggatctaacctaaccgactccatctttctactaacctccaagctgtccttgttcattcctgggcataggctgaactaactttgggaggaatttagtttatagtttatcatttaaaacaaagacaataacagctctttcccaaaacaaacctccttcttaccggggaactcaactgcctttgtaggactaagaaattagccacaagattagaaattatggtttaggagtcacgcagctagaagattctgaccctccctaaactgctcccaagagcagtgcttgagatatttggcagaccctgcacttgatgtatcagctggaaccacccagattgataaactggctcatctgatcttgtagcccccactcaggaactgactcagcgggaagagacagctttgactccctatgacttcatccctgaccaatcagcattcccagtttgctggcttacccttacccactaagttgtccttaaaaattctgctccccgaatgttcggggagactgatttgagtaataataaaactttagtatcccacacagtgggctctgcatgaattattctttctttattgcaattcccctgtcttggtaaatcagctctgtctaggctgcaggcaaggtgaacccattgggcggttataacattgcacctgaaagctctttctcttatgattgctgctatattatattttgaagatgtcatccactcgattgattggcttgattaaacaattctcttataaaacatatgaagtgattcctacaaagacttctacaacatagttcatcatccaaacaaggataattttataagtagaaggctctgctattaataattacattcagataacagttaaaaagcagaagtatgtttatcctattattaggccatcctattataaacccatcatttcagtaaatgtcgacttttagttaatgtatctgcaaatatttactcaaacaaagttttagcttctactatctgttctcacaccgctattgtatcttgcctgaattataacattcacttcccaacttttttttttttttttttttgagacaagatttcattcctgtcgtccagactggagtgcaatggcactatctcagctcactgccatctccactgcctcctgggctcaagtgattctcctgccttagcctctcaagtagctgggactatcacaactggctaatttttacattttttaagtggcagggtttcgccatgttgcccaggatggtcttgaactcctaggctcaagcgatccaccttcctcggactctcaaagtgctaggattacagacatgagccaccatgcccagccacttcccaactttaaaaacatcagaatattatttcaaaatgtaaattagataatatatttccattttaaaaacactccagcaatttctgttttcttcaaacactttgtaactcccaggacctagtatatagtatatgtgtacttcactgtcagtatcatagattggtttctatcatcatcaccacatcatcatcatcatcgatcattttctgtgtaccaagacttaagttaatattttaggtacaattccctttaatccacataaaacttcatgtactatccttatgaatgaaatgaagaagctgaagtttagagaggttagacaacttgcctaatattatacaacttatgagaggtagagtcaaatttcaaaacctgttagtctgacaccaaagcccttggcagtaaatattaagttatattgtcttgctcattaatctattgattaaaataaaagtgaactcgcatacaaatattgaaaaataagtgcctttcctttctcttattttgttttagcctcatttcctgacacccctcccatttcactgaatacactgtagccattctgatttttcttgtcttcatactgtaatgtttatcttctttctaggttttcacatgtgctgatgtcctcctggagtgttttccctactgaaaattgcctggataataccatgaagtgactggctttgatgatatttcctctattatactttttattctctgttcctcttttatcaggcacctcccttctgttttcccagacacagcattatcactgtcctttaaatatcaaattatttgtatcagtcttgtgctagatagtaggtattatcaaggcataccttgcacagcactgaattagcagagtgcctgctggcacataatagacacctgagaatgtgaaagaaaaattgcacttagagttaaacaggcaaggaagatttataagattagtagtgtatttggcatttattacaaagaaggggagatattgaactgaactctactgaaacacaaggtggtaggattgttcgcaaattaggtgaactagtggaaagtataattgtctctctgtatctgcaggttcctcatccatgggattcaaccaactgtgaataaaaaatacttggaaaacaaaaaaagtaacaatgcaacaataaaaataatacaaataaaaatacaggatagcaactatttacataacacttacatggtattaagtaatctatgccagggaggtggcaaagtacaggcattggaaagtggttgacgcaagggttggtaagaagaatttatcaacatcagtataggtttaaaaaaggaaggttttgttagaaagaacactgcagaagagtgcagtgggacgcttcagcaagagaggactgagcatgccatggtggatttttctttagaggtatatatggaccttaaagygggagattaagagtattttggaccatattagccatgtagktcatgataaatgattacatttgtagacattttggtgccttaatgtcagtaagggttgcacaatgagttttgatagtcatgcattccagagatgtatagaaattctagttactatatgttttttgcaaagaaacctggaacaagatgtgggctttaaataacagtataattacttctgaattccacagataaagagttttgcctctggatggtcaccaggtaattttggctctcctcaatctagagatgatttttaagggacttgagcatctacaaattttggtatctgtgaggttcctggaaccaaccccaagaaaccattctaccagaggatattagtgaggggatttgccagtgttatcaggccatctgtgtttgctaatattgctcatctaagttaggcttatactctcccatagagactgggagataaggccattatttttctttatgtttacatttcaaagggatgtatctctggatcctagagaaagactttactgggttgtaaaactagcaaggtgcagagagaagatttacatctcaaaggggtagaaaaataataaaataacaagtgttctgaaataaatgttctaagtaaaaagaggttaggggcctagagtcagaaagaaacctatatatagttcagtcaagcagagggaatgttaagggcttcctgatctacatttatatttgttgagttaatggatagttaactagaaaattcaaaaatattccataatacagtataaaaatcttgacatgtaataatggaaaaactattatgactatgcatttatataatttaaataaactggggaataatacatagcagttaaaattttaaatattcaaatgaatttttctgaatacatttttacattttcctaactcataaaaaataaaataacattattataatatggaggttcacaggtagagtttaatgttttaattgaacatcttagttctgcatttgctaaaacttctaagaaattactgatgactttgaagtacattgcaaatcaagtaacactataacatagtagctaaatagaccagaaataataatttttattgcctactaactgaagttctttcatattttgaatggtgtttaatgtggtttaaattattgcggctataaaggaaatacatccaatctaattaaacctgtgtaatttcaaagaaggtaaatttagtagctatatttatatcccccaaagtgtcattggatatggtattggtaatattttcaaaacattttgcttttatttcttaaacatttagggtactgtgaatcacctcatatataggacaacagataatttagctaaattgatcatattgtttattctctaagttacatggcttatttctttttctttccagcatcatccatgtctctcccaattccagatgcccagccattttgcatgtttatggagcttaatcccagacttgaatttcattaactgaccatagccttagttaagtttctacagcaatgagttcattgggctgaaattttgcaaagatattgggggagagagaggggtaaacatcatctacatttgaaaagaccacatttacaaatcaggactctttaatgcaatttttttccccttgactaactgggagtttatttgcatgcattctaagtgacagtggaatgagaaactaagatttttgtcattttaatttaacacagactcacccagaaagcacagccctgattctgcgtgagaaaggctatctctacagaaactaaaacgtgagtcctgttgatttgtgttactgaattttactatgctatataactgtcctggtaatatgatatggcatttgttargatatataatgagatagtcttgattaagtgcaatttctgcattcttataaggaatacagaaagtgagaattgatatgtttgttttactgtttagtttaaaagaataatagatacttaactctgaagaagataatgtatttgtgctattaactgatattcagtttaaggcatatggttttacatggttttgatattccaatgtatttatggttgataaagtgtgtaaataagatccctcacaaataaacattttccatgcctttttttaacataatttaaaaatctctgtgactaatatgcctaaatacttaggacatatatttattatcccagtttttctcttggattttctaaacagaataagctatcagttaatgatgaagcttggttcacttttcttctttgctctgtcatcagtctgtcttttggctactcgctaatggtggccatctctgctcactgtttggcctgtgataagttgtctttgatagcctgctgttttgttcttgaaccctgccatggctacaactctgggatarcagaactgtcaaaaataaaagtaaaagagcaagaggcacagagcctgtgaaagttagagaggacgtaaggcctgatagttgagagagaggggtaaatgatgaattttcaactggaagatagttttcactttataccatttgctgtcacattacctgaaataataaggggaatttttttccccaataatggccaatgggggctgtttgctttgtgagaatctgctaaggaaacatgccatgtggctttatctttgaaagtgagggtgagacaagtttgcctggctgcagataagtgacttagaaggaatcctattcagatgtacctgtcattaatttatcaggaggttctgtcattcatacatactactctgtgtgcgatagagcattatattggtttcctctgggagcaggtcatattcaggggtcgtcagactcatgctattggatgatgtatgcttgtttcatatagcctttttctgctggtaacttgaacatatgttagatgatcccttgaaacatttcaacagcaaaaggattcacaaaaacttgactatcacttaatatgcaagtgtttgtaacaaaaaaaatgttaatcaacctgtcctcttttagcacagtcatttattctgataattaagtagttatagatatgtttcaatttaatggcctagctcttgatggatgcactttcatagctcctttatttatttaaacaaaaggatatttacttaagctcattaatttacactgaaaaaatgcagagctgctttgaagcaagtctcacacacacacacaaaaaaaaacctttaaaaagtaaagatttttcccaattackatatggctttttactgtggaaattttacttgattacttcatatattttgaaagacaatggcatgtgttgtaaaatgagatagatattggtttgaattcgagaggaatataaaaggaaaatatgcttatttttgtgtgcttagattgtcttgagtgacttgagagatttggggctttttttttctttttttttgagagatacttggcaaataccaaaaaaagaaaaaaaaatccgttcttcattttattattttcatgatggastgtgtaaaactaaaacctaatatctttccttgagttttaagtgtgcttcattctgtgcaaaattaagccaataaatggcaaagtggcagttaaatgaaagcaatcagtaaaatctttctaaagtatttttagcatgccgtgacaaaagtctttactgtgggtaaatgagcaacataaactgattttttttctatttttataatttaaaattgttcattatattctgtattgcaatccaaaacaaatgagataatttcatgaagtagcaaagaaagacycttccaagtagatacaaatgatgcctttacgctgcatttacatggtatacycttttaattttgtcccagttgtgtaaatgtggaatactcaacataaaccagaattttcttattgatgaattaaagcataattagggcattactgtagggaacctattagaccttttgtgttttttatgtttttataaatactattataaatatacaacctattaggttgtatttgttagagacatttacaagatttcacaaacatttgctgctcagattatagtggtagttttaaatagttctatctttcgtaaattttcctctgctccacatgttacattaggtagtcaggcagacatgagcaaggcaggagaggcccctccctaccaaccaccaggaatgccaggagacgatcaggttatgatcaggcagttgttaaactgtctctctaaaagaattattggttgcagcccatgccagggaaaagcagtctcctaatagatagaaacaccagaaactggtgatcagcagtttcctaataagatctcagaagttgagtaagtgtgctcaagaatgcacactaagaggcagaatggtagagtttaactggtatatgaccttcctctaggaatactcaactgggaagggaaaaatgcctcaagtcactaaggggcaaaatggtagagtttaaacattcgacttgtaagggaaaaatgccacagttgtrcatgcgtataacttcagtaaacacactgctcatgcaacccctcccaagtgctagcaggccactgtgcaggcagacagcccaccccaagggaagaatcaagggagaagggatgcaaccgcttggaagcatgccartgtacaaaatgccaagtcaaagctcaagcttcacacttgaatctctcaagttgcctgcttggccctcttccaagtatactttacttcctttcattcatgcccttccttcttataacttttaattaactttcacccctgctctaaaacttgccttggcctctcactctgccttttgccccaggtcgaattctttcttctaagaagaccagagttgaggttgctgcagacccacatggattcaccactgctaacatatatatacatgtatagggataataattgctatatgatagctccctatttctcakactctgctgaartagtttgaagatctctttggaaagaccttttgtaacatttcaatctagccattatctctcatagacttcttttacttcatgacacttgccataataagtataattgtttattgtttatttgtgtatctctcccacaaaacttaaacactatatacagtgcctagcatagtgcctgtaatataataagtaatcaaaacattttgttgactgaatgaaatcagataatgaaaaccagataattctataaataagactatcacacagatccaaaagttatgtaatcactggtttatttaacaaaatatttacagatagactttgtaaataaatagagaattcagtaagcatcacacctcagtagacaacaaaagctactaaaaacttattagatattaaatgccatatgtatgccaatatatttttctcattggtctcaagatttctggctggcactccttgacagattaacaagagaaaagtataacaaatttatttattcaaagttttacatgacacaggagycttcagcaataaagtcccagagaaatggtgaaaaatgtatttttatccatggggtggaatgaagaatggacagttatgtaaaagaataatttgataaaaatgatacgtactaatggcaataaactggggagtaacttggcaaggcctgtttgttcagattctttttggcctctttgtgtaacattcctaccctatagatatgagtaagtgcatatcacattagggtcctcaaaagaggggacaggagaaggtcagagagatctttctgcttctatggttttcttaatttccttcagcttaaaatactcagtctacaataagtctatatttgtaggtagcatttcctgtgtcctatgacatggaatacataactagtattgtctagaataaattatgaaattttctgtggatatcttttgaaatagtttaaagaaacacacaaacacctatgattattaaaagcatccattcatttattttacaagcatttgttgagggttaactatgtatgaaactgtgcagagatctgcaggggatttaccattgtaaatttttaactctaacaccatggaaatgatacacagtggggaaatttaatatacactttaaaatacagtagagctttaactataaagtgtaagttgaaaatgtcaatatccattaagaagtattaagtattacttaatatgaaagtatattataaagtttatagtattaagacgaatgagacatcattttcagctgagggaagcagcaaaagtacattgcagatgttgatttgaacctaggctttgaagaaaactgagggattcttggcataggaaatggaatcaggaaaggtatgaagaaggtgtttagtaagaattagttgcttattttggcaggcatgtcagctaaatgtaagaggatagaaaatattatgtttgacagctgctayggataaaagttacatattaaagtagatcaggacaagatttgtgaaagattaatactagtttaaggagttgggattctgctgatatgtaactatgtccactgaaccagcccttatcttagaaacatagaaagtaaatcccaaagtgctgggattacaggcgtgagccaccacgcccggccaaatttttctattatttttgttgcattagagcaagttttggaacaaggttatgtaactctaacaagtgtgtttattttcaagattatttttaccattctacatcttgttctattttatttatttatttatttatttatttatttatttatttatttattgaaatggagtcttgctctgttgcccaggctggagtgcaatggcatggtcttggctcactgcaacctctgccccctgggttcaagtcattctcctgccttagcctcccaagtagctgggattacaggcacccaccaccacaccacctgatttttgtatttttagtagagatgaagttttaccatgttggccaggctagtcttgaactcctgacctcgtgatatgcccaccttggcttcccaaagtgctgagattacaggtgtgagccaccacacctggccctttctattttattttaaagtcagcttatgagttgttttaacttcttgtaacattttgattaaaaatgcattaaagctaacaaatcaaagataattaagatctaaagaaacattgagtcttctcgtttgtgaagatgatatttgtctttatatttaatttgtcttatattatttctcgttgaagcaatttgtagtcttcataatatgaatctcacaaattttgttacaattattcccacttgatgtttcttggtgctattataaatggtaatattttaatatttttattttctattgttgctgtatagaaatacaattaatttttatactgaccttgaatcctatgactttgctaaatttacttacaaattcaagtattctattactgttattgtcgattccatagacttttctatagacatactagtgttatctgataatcaagacttccattccaacatttgcatttttatttctttcttaccctatttcactggctgggacttctattacaatgttgaatcacagtggtaataattgatttgcttcttgtattctcaaagtttagaaacatgttcagtgttttctctcataaatatgtcagtgtaggtttttcacatataccattaattaatggtatattaatgttactaatggtacattattggtattggtacatataatggtacattaaacatttataaagctaaatttaatgtaaaggtggcacattgaacacttacatctacttcccatccttgagctccaataaaatgacactaaagagtgttttgttttcatttcaagacacaaactttgaaaatgggaggttggaggtctagaacaatgcaacaacattttgctatctgggaagtttctggactagaggtaaataataaacgtttgaaaaaaaataaaccttaagctgtcagtggggaaagataaataatatcattgatcccatgctatggaattcctcagtctcaggaacttgcagcaaagataccttttgtgcaaattatgaaagatggagtagagtggagaaaacaaagaaacagattgattgaaaaccaagaactcctgtcagttctctgcatattcaattttttttgtaggtggaatttccttcttggtaacaatatcattgtgtatctttaaatatattaagtcagagttttcatcaattttgaaattttattttctttttacctcaattttcttcaattttttccacttaaacaaatttgatttatataatttcaattccactacagtagatgtgatgttcttggtttgcattaacaagcaaactcatgaaccacaagttttcaaagaacaccaggtttacacagctttaagaaagagtacaaaccaagcaaaagttagcagggtggtgactaggctgaagcaagtgaggcactcactttgagtgaaagtttgagtatgcatcaatcaactcagcaatctaaataaataatattttaatataatacaatgaaaataaaaaaattaaaaaatccaaaattaacaaaataaattttaaaacaaagacaagatcaatattactgatttttccttttgcctcagcttcaatatggcttgtcacaggactataatatagtgctgggagataaatgagggcagttcctgggaaacaaagtaaaaagacagataaatgaaaaataggataataagataatggtaaatgcatattttatagtttgttttgcattagtccttacatgtctattatcttgagtacatacataactaattataaagatatagtttagtcattgtagggaaaagttttagaaagggtggatgagccatctgacaagtgtcctgctatttgaagcagtaatataaaaggcttcctgacatcaaaatacaaattgacaattgtctgaatcatccttcttaactagcttattgtcttatttttgttattattgtttaaagagtgaagtaaggctcctttaaagtgactttttttagttaaaatattttgcctttaattatttattaactgctttcatttctgattgttcacactgttttattttgtatgaaatagaaaatggtacgatacacactgacaaatgtaaaggctcaagtgggttttcttgattttataagtgattagatatatttgttttacaaacacaaaatttcccttttgtgacataaaatatgatccacatgtatttagaatctaaactagttatttactcttcaacaatttcatctaccttttctggaataaaaatattaccattttattaaaaagcctagtagatttaagtcttataatgctttatttctctttgtaattcatttttttcttttttcacctttactgaggtataatagataaataaaattgtataaattaatcgtgtacactgtgatgttttaatataggtatacattgtgaaatgaacaayacaatcaagctaattaacatataaatcaccttacataattaccgtgtgtgtgtgtgtgtgtgtgtgtgtgtgtgtgtgtgatgagaatactgcagatctaccctcttagcaaattttaagtatacactacattattaactatagtcaccaagctgtacattagatctcatattttttctcttcagctgagtgacagggtaaaaaataaatatttgttggccgcttaatataaaaatatatttattttatctcacataatcctccaataatattatgtaaaataaaatattattcttattctaaataataggcaagctcagatcagtaatataatttgctcacagttacatagttagcagagtcaagatggtcttaacttcaaagcccaagcaatattaaccttgccattttgacatgaagaatgtaataaaataaatagaataaaaatgactgtatagggaaccctgtgtcaagcattattattttttttttctttttggagacagggtctcagtctgttgcccaggcaagagtgcagtggtatgatcactgctcattgcagcctcgacctcctgggctcaggtgaccctcccgcttcagcctcctgggtagctgagaatacaggctgcaccagcagaccaggctaatttttgtattttttgtagagatagggctttgacatattgcccaggctggtcttgaactcctgggctcaagcaatccacctgccttgacctcccaaaatgcagggattacaggtgtgagccactgtgcccagcctcaagcactattttaattgttttaatgctacatctcttttacccaccttacagataataagctatagagatctttggatttgctcatgcacagaacaaagtagtcaagtcaggattgaactgtaatcctttttgattgcaaaattagaaatgtgccaatattatattgtacacttatttgtgaattggggtaaggttttgttttgtttttcactctacatagtgtagctctactaagttctaaataaattcctaattttttgatatgctgctggaatatacaatgattaatgagaacttaatgtggaaaaatctggaaaaatatcaatacatgtttacatggaggacaaaacttttcataatcctcagtattggtagttactgtgaattaaattatattaagagacaatccaatctaaaaaaataaatatctgtacttgaatgtatacttactgcaaataacatatatagaattgatctagtagcttcaaattgttgttcatccatgtgtgaagcataagtgaagaatgcaacatttatattaaaacaattgactgcttctgaacatctacaataggtcaaaaaattgacatttattttataccaagtaacagaatagctgaaataatttttaaatgctcatctgaaactaaacatgtcattttaacactgcaaggctcaataataatcattaggaagtggttatttgggaaaaacaaacaattgtcattagatttctaagactgttatccaagtacttccattaagccacatctcttgagagtcatacaaaccaaataaacattccaacataaatctggggcagagagcaaatgtttctggaaaagaaatattgattgtttttctaatttgctttgcacaagcagaaaaaaaaaacaactctcgtttctctatggattagttgtcaaagcgtatatattctcattgctttacctgctaatacaaaattagaatattctaaatggtacaattaatgttatttatatattttccctttcaaatttacacttaataaagtgacacatatgaaatatgctctaattactcctggatttaactcacatgtttagcaatataatctactactaaattaaattaaaagcaataataaatatatcaaaatcaaacaaaataaaataaaattaatgtagaatatatttaattaataagtaaccaaaatgcacaaaaagaattaaaagaatgtaagaatatggaaattatgtatacaaaacatgaaataaaatcaagctcatttgtggtcactaatacaacataatacatatttgcttttaatgaggatgtattaaacagtgctatctaccactcttttaccacccatgagaatctgcctaaatttgtaagatagataactaaaagaaaggggcaatacataaccatagaataagaaattgctatttgtttttaactgtggagattttactagtgaagataaatgaatttgtgacagtatacttaatttacattgctgaatttaattaaaaataaagaaattatgcttccggtaatcaatgtaaagaaaaaataaaactaattgaagtttcatttttacttccagttttcttttgattcgtaatagcttatataagaatacatagtccatattaaaatacaatattttgtcatctgatttcaccattttataaacttgaataattcatgggaatagaagaatattgcctcatttaggctagtggcaaagatttagtagctttaggtagttcttgatttaaatatcaaattgcgataataggaattgtcggaagcatcaacaattttatcggaaaatgtttcaatgagaaggcatgaagcatgaagctataaagttattttaaaataattttgattagtaaatatacaaaaataagatatattgtgtatttcgtctatttatatatatgtatgtatttactayggtagttatattgttttgctgctgtgaatttctgttaagtgattatttgaaacagaacacctatgagatttggatattatattttccttaaattaaattaactgtattattatctttttacatacttagtgtttttctttgccttctgcatattgaaaaatatcttattttacgatcctaaataaatattgtggtttttttcatattaccatccctttaatattattttaggaaataaagatgaaatatattaaaactttaccatattaaccactgatacaaaaagcaagttgaatattaaaatatggatgattataataatttactctgaattcatgtaactttagagagatacatgtgatattaactaaacacttaatttttatagaaaacttgaataatatatgtatttatttaggattgcaatgagaaatataaaaattataaattgtttttccagcaggagtatatcactaaacagcattgtatagttaacattaaaaaaaaaaaaacttccaagaaaatatttctgtgggctttgtgagatctttcaaattcctgtaaacttatattatctgtcaaacctcatgtgttgcagagttttacaataggattttaagtgctgattgcaagccaataaaaatgagcaatgcttgtgatgagtttataaacatcttaataattatttgaataatgaataaaatataaaattaactcttccgcatttcctgcaataaacttgacaatgtatacagaaactgaagcaagtattactataaatttaaaactgatattttcacaatccaaatctaaagtaccttgtctcatgctagtataattttgcaatctaaaaatatatgctctatgactcatatatgaacacgttattggacttgtaaaaatgctagaaggtaatatttagggaaaatattctgtttgcaagtcaaagcaactaaattgcccttcccgttgaccattttcaatgaattataacaaagtaagagcaatgacagctctaccagcagatgccttaaataaataaaaataaaaataaaaaaaattaagaaacctctaaattcatttttttctaaacaataaatataatactgaattggcttcatcctcttagaaaaataaggaaagaaacaaaagaaagaaacttataatctgttaagattatatgtctaaaaakgtaatagcaaccaaagttagttcaatagctaaaccaatggtttagaatgaaccatttaagcagttctctgattttttttttttactttaagttctagggtacatgtgcacaacgtgcaggtttgttacatatgtatacatgtgccatgttggtgggctgcaccccttaactcgtcatttacattaggtatatctcctaatgctctccctcccccctccccccaccccacgacaggccccagtgtgtgatgttccccaccctgtgtccatctgttcttattgttcaattcccacctatgagtgaaaacatgcggtgtttggttttctgtccttgtgatagtttgctcagaatgatggtttccatcttcatccatgtccctgtaaaggacatgaactcatccttttttatggctgcatagtattccatggtgtatatgtgccatattttcttaatccagtctatcattgatggacatttgggttggttccaagtctttgctattgtgaatagtgccacaataaacatacgtgtgcatttgtctttatagcagtatgatttgtaatcctttgggtatatacccagtaatgggatgcctgggtcaaatggtatttctagttctagatccctgaggaatctccacactgtcttccacagtggttgaactagtttacagtcccaccaacagtgtaaaagtgttcctatttctccacatcttctccagcacctgttgtttcctgacttgttaatgatykccattctaactggtgtgagatggtatctcacaggtctctgatttttaaaaaagtayaacttgaggacatttttaaaaaagaacatagtggcatttgaataaatatattttctggcggccattttcagcattttaaaagcattcagctagtattgttttcaatggtgtgtcttagtttactyattagctcttaaaattaaaacaataaataaatcccaaactatcaaaatactccctgaagctcagtagaaatcaactgaaaagtttcatttggtctggaaaataaaagaagtttctgatatcttcatccaagtgtaaatgatctattttatggcataacttaaattaaatcaaaatagagatagaaatacaaggatatgaatgctacattttagaagacatgttaaatcaaaatatttgctaatgtaactgaagtggtcttttatcttaagaattctcacatcatgtcttttttctcttaattgtcaaatttttaaaataatttttcacacatagattttagagaatgttgggtaataaaattgaaagtttgaaagattgatactttaagacccttaattttaaaaaggtatagtgactttaaaaatgtataaaaatggttttaagatttatctagtttttttctattaaaagatttccatacatctttagaatatgaaattagaagttttttagggtacatttttgattttttcctatcttaattgtttaggagcaagaatgggattaaatagtgcaaattatatagttggtagattttgatccattaagaaaaatgatgtggtaacgattagagctggataaaaatgtaagttgctactttatgatgtcatttagtttttcattttcagaaagaaaaggttttgtcaccactcaaggctattagtaagggattcatgcctagggcttaatgacagataaatcataacccagttgtaaaaccatatgggtttttttgagaggctgtagaaaatcatgatttttggaattatacagatcataatataaatcccagccctgccactgatcagcagtgagatttaacctgttgaagcctaattttmtacctgtaaatttgggataaaagtgattttctatagtacatctatgaccatgaaatgagatactgtttgaaaagcatttggcacagtttttggtacatggcaaattctcaataaatttcagttcttactattattgttattactattactatttttaccatgaaaaatattaagtcttaataaactaatagtatgaaaagaaaatgccactctttggtaatctagaccacctttatgcagaacatctttttatgtagtttaactcaaggagctggaagaaagttaacaccttccctactggaaattacaatcaaaacattaaattgtttattcattcctttgggttactggctgttgcaaacctttgtaaaagatgaattaagccattatcagatatcaatatttttttctcagacaggattatcagattagtttcctttaccaagctgagagtaaaaaaagaaatacaagagaagtggatttagaagaagacgtggtgagggagatcttgtagtgtcaggaagtatgggctgggtcagaggctcccagggcagaactgcagatatcagtctgtccttccttgaagtttacagtattccaaaagaaaaacaataagaaccacggaactggttctctgtaaaactaaattcactcagtacatcgtgaatttattttcttactaatttatgagaattaaaatttcatttcttcttttcaaattatggactttaaaaaaattttatcatttattgaatcctaaaatattgggcactttgggagaggtaataattcagcccctttcaactttcagatacttgatgtgaaaagggggaaatgcaagatgctaatataatatttcctaggtaacttgacaagaaacatttcatttctcacaaagccagcattcatacattcacttacttaaaaaaatataaccaacattttaagtgttaggaattcagcagaaatagagacaacatcctagtgtcattccacttgctttttaatggaagaagagagaaaagcaaacaagtattaccattcttgacagaaataaatgctaagtgatataaaactgggatatgagtgattgggtagaccattttattcaggagttaataaatgccccaataaatatagtaaggtatttaaacttagatctgaatgacatgaaggaattattcactgcttctttgatggactacgtggaaatgggatgggttgctggggtgacatgagagagatttcttatgcatgtatgtggggtatcagtacatctaaagaagcagtctgagatcacatcatgaagagccttatatttcgtgctaaatgtgttaaatctttagaattttatcctaaaagtaatgggaagagattatgaaattatgcatgatttggtgtatagaggacataggaagtcatctaggagtcccttgtaataagttcttccttcatagatatgattatgggcttcagtaggagtagaaaggagtaggtagttatctgtggtctgtcagaaaatgtgttctcacaggaaacattttccctgagtcttgtagaagggtagttaggtgtttgtcacatcttaagaaatagagcttgggtgatagatgttgaaatcccaggcaaaatgagaagagtgggaaaaagcatagactttaaaaacatgtcttgatcactaacacttaatgactgaggtataagaccatagaggtaaaagtcagagataaaactggaagtctcacctcttgagagtgataaagaacagcagcctaaaaaccattaataacaaacctgggatgatcctaaataattaaacagtgaaagtttgtgccacttaaagatgtgccgttgggatggttgggtgaatactgagaagggatatattttactttacatataatatgataaatataatactataatataattaaaacaacatcatacaacatagtataatatagtcaggacttttttgttcatgacttagatctggaagccaactatacagtaagtttaaggtacaaaaaatattcaccctacaaaaaaagacataatattttaaggaaaagccgtatactttatttatgtggtctagaattgggctcagtatgaagaaggctgttccaacaattgtgaagagtgaagtgggatggcaggtgccagcaccaacacttccagagaactggcttgcattttggacattgccagacatcagggagcagtgatttatcacccagctctgtgatggctgctccttcaggtgtagacagtactgcttagtattaatgtttcaataatgtgaggcgtgttggaaagaaatttcaggctcaaaagaaatagtaacattcatctagttctttcaggtatgaattcaaacctaatatgaaaaatgacaaaaaaattcataaaatagattatatattttatattacccaaagaaaattaaaccaaataaatctctcctcacagaaccaatttctactttataatttgtttatgtacttccagcttctttttcctttgatttctctgagaggttttcatcaaaattatcttcaatgaaaatttaatataaggccttattttgccttgagttaagttaaatttgttgctttatttctaaaagctgaattcttttaacataagataaacatggagaaggaaaaggataactatgagatttcttattgcaaaaattcagttaaaatatcatatttaaaaaataacttgagtttgccatctagtagcagttctttgaaaatccttccgctaaaggcaygttagaccatagaacctcgaatgtaatgtctcttatatacatgaaactttcctgaaatatcttattaattcacttctttacaagatggttcattccagtgttatttattagaaaaccttctatatttttagccaaagttgcctcatactccacactcaaacttctcagactaaatatcctaacttctcaaaagagtagaggtttgctttgttatctacataaaataagcccaaagtcaaaactaccatcccagtcacacatccttcctactctcaatgtcatactcaaaagaacacattacttctttaaacctgtgtatttttatatttttttctgacacatataaatgtctcaacaatgtgttaatattgttgagtctaatttatttatcagtttttagagaatacctgcctttctcttaccagaaatgtttacacatcccagaaatgtatatccctatttttaatacaaacctgcatttcttatttcttcaactaatgatattattttttgactttcctctttaaaattatatctcctatcttccttcacctctctcttcccttctaacacacagcctctgccatctgtagtaatgtttttgctcttttttgttaataatattcaggcattcttctgaaactatactgtcttccatcttttgtgaatagattgactataaaagttgaaagtataaaatattagccttatgtaaatttgttcaaatagagccaattactattatatttttcttcttgtatacttatgtttttctagggtttccttccttccttccttccttcttttgtcccttcttttttctgtcctttcttctttccttgattcctttttgattttgctttaaacattgcactaatttttaaatatttcagttaaaactttttgcttcatttcattacttttttggcttagggcttatcacttttttataatataatttcaatgtttattttagaatgagtggtacgtaggcaggcttgttacatgggtatattgtgtgatgttgaggtttatggtatgattgattccatcacccagctagtgagcatagtccccaagagttagttttcccacccttcccctatttcttcatccctccccaccaatagtccccagtgtctattgttgccatctttaattccattggtactcaatatttatctttcacttataacttgtttttttgttttgttttgtacctgcattaattatctgaggataatggccttcagctgcatctatgttgctgcaaagaacatgatctcattctttcctatggctgcctagtgtcccatggtgtatgtgtaccacattttctttattcagttcactgttgatgggcacctaggttgattccatgccttgctattgtgaagagtgctgtgatgaacatatgaatgcatgtttccttttagtaaaacaatttattttcttttggatatatagccagtaattggattgctgtgctgaatggtagttctgttttatgatctttgagaaatcattaaactgctttccatagtgactaaattaatttacatccccaccaacagtgtataagcattccctttcctctgcagcctcaccagcattgctgtttctttgacattttagtgatggccattctgactgatgagatggtgtctctcattgtggtattgttttgcatttctgtgatgattagtgatgtggatcgtttttccatttttttttttttttttttttttttttgctgcttgtatttattcttttgaaaaatttccattcatgtcttctggccactttttaatggaattatttgctttctgcttgttgaattgtttaacttactcatagatctggatattaaacctttgttggatgcatagtttgtaaatattttccctcattctttacattatctgtgtactctgttaatcgtttcttttgctgtgcagagtctctttagtttaatgaggtaccacttgtcaatcttgtcaattttcgtttttgctacattgcttttgaggattttatcataaattatttcccgagactgatgtccaaaatgttgtttcctaggttttcttgtaggattctttatttttcttttttctttttactttgaaacggagtctcgccctgtcccccaggctggagtgcaggggcgcgatctcggctcactgcaagctccgcctcccgggttcatgccattctcctgcctcagcctccagagctgctgggactacaggcgcccgccaccacgcccggctaatttttttttatatttttagtagagacggggtttcaccgtgttagccaggatgatctcgatctccttacctcgtgatccacccgcctcggcctcccaaagtgctggcattacaggcgtgagccaccgcgcctggccttcttctaggattctgatactctgaggtcttaacatttaaatatttattacatcttgagttattttttgtatgtggagagaggtatgtgtccagtttcattcttctgcacatggctagccagctatccaagtaccatttatttaatcaggagtgctttcccatttattattattttttttaactttgtcaaagaccagattattgcaggtgtgtggctttatttctggttctccattctgtttcgttggtctatgtgtctatttttgcaccagtatcatgctgtttttgatactgtggcattatagtatagtttgaagtagtataatgtgagtcctctagctttgttctgttttttatttgttttttttaaggttttcttggctattcaggcttgtttttttttcagttctatatgaattttagaataactttttctaattctgtaaaaaatgacattggcagtttgatgggtatagtgttgtrtctgtagattcctttgggcagtatggccactttaacaatactgattcttccaatttatgagcatggaatgtttttccatttgtttaagcaacctgtgatttctttcagcagtgttttgtagtgctccatgtagagatctttcacctacttagataattgtattcttacgtattttaatgttaggggttactgtaaattggattgtgttcttggtttggctttcaacttgaatgttgttggggaaatgctattggcagaatctgctactggtttttgcctgaaatgctactgattattggcagaaatgccactgattattgtacattgactttgtatcctaaaactttactgaagtccttcgtcatttctaaaagtcttttgatagggtctttagtgttttctaggtatagaatcatattgacagcaaatagagatagtttgacttcttttcctatttggatgacttttacttttttctcttgcctgattgcctgggctaggacttccagtggtatgttgaataggagtgttcagagtgagcatacttgtcttattccagttcaccatgttggctaggatggtctcgatctcttgacctcgtgatctgcccacctgggcctcccaaaatgctgggattacaggtgtgagccaccgcgcccagcctatctcttatccttctctctcctccatctctctatttttatcaaatcaattctgtgatgataaagcatcctacaaasttcattacattgtgctaagcttttaagtaacctctataagaagatggagagtgaatrgggccaaaagatgaaaaacgatatttgagaaagctgacagggagcttattgtgctcctgaaataataaatataggaaacacttatccatttccattgatacagaacaaaacagcacaaatgtaaattagagcaaatatatttcagtttaattcattgaagcagaagtaattcatttagttacttcaatgggaattaattccaactactacttaggtccctatagtttcagcaatgatttaagattgtttcacatttgtgcatctcatttcatgatrctaattctctttctatagacattgtagatcatttggaaaatgtttttagatattcataagctttcggtatttaatactaatatttgtcaccagccaaacaaatatttctaattatcttggtaattagaccttagttattttatcatattagctcctttgctaagacgtaatttagttaacctagtcacagaaaaacaactgttttctattgattgcatatttgtttctttgtttttatgagttcgtgagagagtaattaaaatttttctcctggcttttctcacttgtaggaatgtgtttttttctgcttttagttaactgccttataggtctttgctgatttccattaatcaatagctagctatgcttttaatggatgcatagacttcactgatcaactgacttcgacactattttttagtaatcagcatatgagttacttacggctaaatatgctgatttcatgattttgaaaagaggataataaaattttaatacaagttaaatttgtgtctgcaaaaattgtttctccatatctcttacctgcattgtgagttttcattttaagactgaataaattagttgcatcatctgtgagtaccctcaatgatttcacacagattacttaaaagtaccctgataaaaattatggcttatttggaatttaattttattgtgttttaaactgctgtttaaaacaataccgtttaaaaaaaatactgtctttttgtataataaatgtgaaaatatccaaattcatgtttttgctaactgttgattatcatagacattagccaccactgtaacactattaaaacatgcagagtgggctaatatagagctccattttatgcacactaaaatttcacatatcaaaaaaccagaggaaatttttgttatctaagaaaaaaagccttttgatatattaaagaccttgaatattatgcttggggctcagttcttccaaaagccataaattaagcttgctactgcagggcactcagcccactcatctcttccctacaatgacagttgatgggccaatgcagactcagtagccatagccttataaatgctatatgatgacttctaatcatttcagctaaaatgaaaggtttgtttttctctgacacaaaaaggagttaaacctgtgtgcattaaaatactaaaaatataaaatattatttacattatatatatataggttttcataagaatgaaagaacttgtattatatgctaggcattatgctacaaatttgtttcatcttayaccattcaacctgaacaacactgcaagaacattcattattaaaaccgttttataagagcgaagctggctaaggaaggttgagtaacttgcccaaggtcatcacttagcaagtggcagaatgagaatttgaatgtgatctgtctgagtacatcacagctctgccttatatgtgcgagaaaactaaagtgagcaagcagctgtgttaacaacaaagagtgatagctattatgctggcattttctcttcacactttccagatttggggtagagtgtaatgcggcttctaaatagaattgcctcctgtttcttttaactacattttaaagcaccttcaggttttgctggaccatttattttgatgttgcatgttttaggcaaagaagaggtttgtgaagtgcaagggaaagagtaggtaagcagtgataaaataccctgagaagcaggaccagctatgttattttgagaatccagtataaaatgaaaatgcaggacacattgtgcaaaaagcgaaacaacaaaacaaaacaaaacccaccttttttttttcttctgtggtctttcttgaattgctgtggtgttttttattttctatttaatattgtgacccctcaatcatggggcctcataggtgccttgggcaaagccccatgacttggtccctgtaatgtatatgcataccctaactctcctaacacctgtgtccaggcccttgctggagtggagagtgccagtggtatctgtacaggagtggggcattgccaaccaagaacccaagatggggaagtggggagatggtggaggtcagaaggaggcaggacaacctgtggacaaagactctaagccccagctcctgatccatgtcccatcaaaccttctaaaacacacagaagcataaaattagtaataatttaaagacaacattcacagagttttattaaaccctaaacacggggcttctttctgagtgcagaaccctttgcaattccagtgatgccatacccatgaagccagctctgtgtgcaggacctattccttggaatagacttgatctcagaaaatagatgacaacaaataagccagaattgaacactgtgtggctcttattaaaaaaaattagtttagaccaaagcaaaaatcctaaaacccttttaaaaatcaaatactgttatgcactgcattatgtttcagtcagcgacagaccgcatatgcaccggtgaccccgtaagattatactttatctttactgtaccttttctatgtcagatgcatttaggtacacaaatacttaacactgtgttataattgcctatagagttagtacggtaaaatgccatacaggtttgtagccaagcatcaataggctatcccatatagcctaggtgtgtagtaggctacaccatttaggtttgtgtaggtacactataggatgtttgcaccgtgacgaagccacctaaggacacatttctcagaacacaccactattgttacgtgatgcatgactgtaactaatggagagctttgtgctagtctcacatatagaaaagtcatctggagaagagcagagtaagcagcagggcccatcgggccttgagaatagctagaggtaaagttaggatatcattttattcccttctgcttaatttgtttgtttttttgtttgtttgttttttgagacgaagtctcattgtgtcgcacaggctggagtgcggtggtgcgatctcggctcactgcaacctccacctccctggttcaagcaattcccctgcctcagcctcccgagtagctgggattacaggtgcatgccaccatacctggctaatttttttgtatttttagccgagacagggattcaccatgttggccaggctggtttcgaactcctgacctcaagcaatctgcccgccttagcccctgaaagtgctgagattatagccatgagccactgtgcccggcctgcttaactttttaatagtaagcatgcagtctggtagccataggccacaatccccaacctgtaggaatggagtcagtaagggctatgagagtattcacattaacttaaacttttttttaatgagttgtcagtatttcagatttctcttaaaatttagatttcagcttctgattaaaaaatactatcaatactggacaaagctgaatggtgcctaccaccggccctcttccagggccagtatgaatgctggtttgccataccattctttgttgttttccagagactgagaacactacctttgatcatttcacttttactattgtttatttcaaaaagaaatgtttattcccctatcaaatgcaaggaaagaaagctgatttaaaaacaaaataaaaagaaatgaaacactggccacattcttcttacaatcagcccaatttactcattcacattacctgtctgacctcaggcaaaaaaaaaaaaaattgagtttgagaccctagcttaacactttgactcctccctcatcttgcccttagctcactggtttctctacttcatactgtcacttttattcttcctgttctttttctattatttatttttttaatagggtcttctagtactctattaataaagtcttctttttgttgctttatcgtatctttctttcctccttctccttctcctaccaatacagattatacacttccctattttataaattatttttagtgcacactgtgcaagagagataaattatttttaaaattttggactcgagataaaatctgttggagtctggacaatatattcatgaataaggaggtcatcagagaaataagataagcaacacagccatttattaatatgctttcccctaggttttattgtttcagaggaagtttataatattgccaccaacaatttagaaaaatctatattttgcttttactaacctgttgcaatggtttgcatgtatcccccaaaattcatgtttggacacttaattctcaatgcaatagtgtagatagatgaaacctttagaaaatgattaagtcatgagggcagagcccgcatgaatttaggctgttaccttggagtggttagttattcctggagtggcttcctgattaaaggatgagtttgccccccgtcctcaccttctttccctccactatgttatgatgcagcaagaaggcccaagccagatgcctgcactttgatagtggactgcacagtctccagactatgaaaaataaacttattttctttacagtacattacccagtctatggtattctttcatagcaacacaaaatggactagggcacttgtatttggcaactaagttttttggtggtggtaagctgaatacacttgcttgcgtccaggtttttgctcaattatgcatttatcagaagatccacaacatttagggctttataaagaaaggccaaaatacttatttgattttgttctgaatcagcaagcaagttaaagaccagaagactgggacagtggtaatcatctgaataccatgttagcaactgataaaatgagaattttttgatagaatcagaccttatcattattatggaagcagaatgggtattaataaagatgagattttacttttctttttattaagttaaatattaacactaaatagtctcttcaaaaaatatagctctctggttacagataatcagttcaaactttcactggtgacttcagacaagtcccttctcccaaaatcttcttttttaaaaaatctatagaacagagatcacaatctgacatcaaaaatttttgtaaacatcaagtgaaataatgtatataaaatacttaacacagtgtctcaaccatagtgggttcatactaaatataactacaggaaaaatatgattatctactggggacttctgtatttgattgaagcaagaaagaatggctttctttgtattaactttccttctcagtttttgtgtattttgccattttaaaaatctatttactgaaattattaccatcactattaggctgtaacatgaccaagcaaccaatcaagcttttcgtgaaacaacaaacaatcaaataaatgcctaaatccctatttttttttcctttgcagaagaaaacatccttttatttttctttccctcagatctcttttgagtgaaagagaatttggatttgttattggtaataagccttaagagatttgtgtaaattcaaacctttcagaaatctgtatttgtaaagaaactgatataaaaactctcagcacagcaggaatagtgttgctgttttatttgtatttttctctctaacaggcacttgaaacaaaataggtatttggaaattcttttctaaaggaacaaaatattcaataaatgcatcaaattttttaagatatttcattaggaaagatgttcaaaagtcctgtatatacattatacatgtctgtgtgtgcaaatgtatgtacataaacataattgatgttttcaaatacgtccttagatatcaaacattgtacatctaaataatacaaataatacaacataacacaaaaatatacaaataatacaaatataaaaattgtacaaaaataatacaaaaaaattgtacccaaatggtcgggcgcggtggctcacgcctgtaatcccagcactttgggaggccgagacgggcggatcacgaggtcaggaaatcgagaccatcctggctaacacggtgaaaccctgtctctactaaaaatacaaaaaatttagccggacgtagtggcgggcgcctgtagtcccagcagctctggaggctgaggcaggagaatggcgtgaacccgggaggtggagcttgcagcgagccgagatcgcgccactgcactccagcctgggcgacagagctagacaacgtctcaaaaaaaataaataaataaaataaaagaaagaaattgtactcaaacaagcccctgaaaaatactgcctttaaaatatttcaaaacaaaataaatgtgggcaagatgtctaattttctacagaaaactgtgaccttcctctatttaatataaaattgttgctgaaaagcagttgcccgagcatagacagcatttctccaccccatttgcatctaagtagacccttttgattagttccagctcatggctagatagtaataattcttattatcactttaaatggaatgcatctctccatccttttcttccacaaacatttattttaaatccactatataaaacatgtattaagtaagattaaaataagattataaacaatgtagcaatgtagaaataaatagtttattttatgtaattcatgccaatgctgctagttaataagtatacatttgccacaacactataaagataatttctcataattattatgagacaaatctaatacagttattataataaatacagacatttagcagaaccttttaataagcaaactatcttaactgacagttacctgttttgaattcaaagagtatctctattttaaagaattatcatgaatggctctggatcaatatgattgaagaattctggacatagaagtgacatttttcattgaatctactagaaaaatcattctaaaaatgatttctgcatatgtgtgtgtaagtttttcttattaaaatttttcaacattttgttatgaaaattttcaaacatactgaaaaatagaatttcataatacccttatactcactaatattacaatgtacctaatttatattttgctacattgtactatactttctttatcacgtatccctttatctgtctatagttcaatcatcttattattttctacatttcaaaaatatttgtagaatcgctgcactgttcccctacataccttagcatgtatatatgtaaaggtcattatttgtttacaattcactttacaattaaacttccacagaataaaatgcacaaatcctaggcatattattacattaattttgacaattgcatatgcctgttcaatccaacacctgtcaaggtacaaaacatgctttatcatcacaaaggaaaaaccttcataccttcatactttttttactgtcaaacacttcaccacccaaccccagaggtaatcaatatttttattaattttgtctcttttagaaattcctatcaatgaaagtatactacatgtattcttttgtgtaagacttccttcatttagcatggtttatatgagactaatccatgttattgtatatatcaataattacttcatttttattgctaaacagttttttattatatacacattgtttatccattctgatgatgacaatttaggaagatttcagtttttgcctattttgcttaaatctgctattaactttcttgataagtgtgtgtagacctatgtttctgtttctcttgagtaatttcctaggagtggaactgtagggtcataagaggtgaatcttgaggtttataggacactgccakatctttttctcaaagtgattataatctctaattgtattcttttatcaagttctaatttggaaattagactttcttacctaatcaatatgaattcaacctttcttgcaatatgtatctttccatcttcctcgatagaggagagatatacattaaagatataatgtacatctgaaagtaaaacaatttcttttaaagatgggtaaagggtgaatgtgaacaactttatataaaagtaagtaagtgcagtcacccctccatatccactgatatcgcatccctggattcaacaaatcacagattgaaaatattaaaaaacaacaacaataaaagataacaatacaacaagaaaaattacaaatgtaataatacagcatagaaactatttacatataatttatattgtattaggtattctaaataatctagtgataaacgtaagtatagaggaggatatgcatagattatatgcaagtactgcaccacttaacataaaagacttgaacatttgcagattttggtgttcatggggagtctttgaaccaatatcacatggataccaacgaatgactatatatattattttaagaggtatttaatttaaaattgttacatagaacattgaaaaaatttgttaaaaataatataggctttattcccataatcaaaacataacagcatttctttctttcttttttttttttttctttgagacggagttttgctcttgttgcccaggctggagtgctatagtgcaatctcagctcaccacaatatctgcctcctcagttcaagggattctcctgcttcagcctcccttgtagctgggattacaggcatgcgccaccatgcccggctaattttgtatttttagtagagatggtgtttctccatgttggtcaggctggtcttgaactcccaacctcaggtgatccgcctgcttcggcctcccaaagtgctggaattccagacatgagccactgcaccaggcctaacagcgtttcttaacttactattcaagtgaagtgttggacatcattatattcagttttaaaccaaacctaatttaaatcagaattaaaactacatttatttttgataaagacyagatatctgtcaatttcctaatggctgccataacaagtatcatacactaggtgatttaaaataacagaaagttattgtctcacagttctgaaggctagaagtctgaaatcaaggtgatggcaggaccatgctcttgaaacctgtagaggagaactcttccttcttcccagctactggtggtttgctgccatttggtaatatcatttgacttgcatcttcagcattctaatctctggctctattgccatatggcgttctcctctcatgtgtctgcatctcttctctttttataaggacatctgtcatattggattaaggttcaccctaatgacctcatcttaaccttattaaaatctacaaagaacttattttcaggtaaggtcatcttcacaggtacatagggttaaaatttaaacagttttttggaagataacaattaaactcatagaataggatgcatgacatttggtatatttcccattttgaatatgtaagaaacaatggcatgattaaaagcttggtcatttcttcttaaatatattaggatatttgatgatgcakataagttttgacagttggaataagtataaatttttgattttgctattttttcttattctcttaatctaatagctttagaaattatcagatagaaagtagagtatgtaaatgattgtttccttcaagctctttcacaaaaatgccaraaataacaacaacttgtttcacaaaatcagcagaacattactgattgaaaaaatcagctcaaagagtgaacttacacaagtttgcaacaaaaaaagcttatctgccagcaaaaatcattttggaaagctgaaaacaatttttattttttgacactgatataatacagcctcaaatattttgattattaattatagttctagaaaagccactttctcatttcaaatggaaatttaacatcmagaaggaataaaaactgctaacagtactgaaattctatgaggaaatataacttatttgtcttgtgtatttgtgagacatttacctattatcaactcaagctttacttggaatgcctactttctattccagtaaataaatatgacacagatatatagaggttgagagagagaaaggagagggagagagaaagagacacacagacgaagacagagagagggatggagagagaaagacattggctttcacaacgtaacaaagtaaaaattaccacattcttagatatttaatccattgaaaactaatatgttctagcaaaagtaaaatgaaattagtgtattaatcataagtaatataattttaagggattaatttttatgtttctgtatacagaaggtaataatataatagccttcattactatatgcagaaaccgagagccagaattatttaaggttacatagcttgatgaggccagagaaaagaatttgatttttttttaaactctggattgcagtagttttactctttttttttttaagtgtcttccttcaatcattctccaagttatacctataaaattttagtttaaaatcccagctgtataagatctgactcaaggtaggaagagatattaatagaattttcraatggaactctactataagattctgatttcatctattcctatagggacaatgcagctaatggtctcctttaaagatttaatagcttataaatatatccaagtaatgctgttagattctatgttttgtattttaatttgaaaattcagagaggctggcatggtttcagagctctggagaaaggaatacagacataatcaattaataataacatcttagattaattcaccttaaaagaataggtatatcagtttatatcaaattctaagttctcctgtcttcatttttattatagcaataaactaaaattagctccacaaaggatggaggttaaaatgttgagttacagtgagaatactgtaaaaataggagaaaaatagagaagtaaaattaatatcagaaaacgaagggagaaaaatagttgaagttctattctgagctggtggaagaacctcatgycttcacaaaatgtgcgggaagagttagaccctgaattcctttcctcaaggtaaaacttgtcattgcttcttggaatcttgatcccttagctttcatccctcacaccaccattcctcaattcaaattcatctaacagaagtatgtcaactgttgaaatcattggtcgactggcagtctcagattctgtaatcttcctaaggtagaaaatgaatcgggtgagatcagtaagtaaatagcaacaacaaataaataaaagaggctgctgtcctggtgcggtggctcacacctgtaatcccagcactttgggaggccaaggcaggtggatcacatgagatcaggaattcgagaccagcctgggcaacatggtgaaaccctgtctctactaaaaatacaaaaattagtggggcacgttggcgtatgcctgtaatcttacctacttgggaggctgaggcaggagaatcgctttagcccgggaggcagaggttgcagtgcgcccacattgcaccactgcactccagcatgggcaacagaatgagactccgtctcgaaaaccaaaccaaaccaaacccaaccaaccaaccaaccaaamaaacaaacaaaaaccctgcaactgcctattctgtctccttgtcaatttcctacaaattatggattcttgtacaatagaggcaatcaaattctcctaaggtatatttataatttgctgattttttaaaaatttcaactgtttttatttaattagatgtttcaaggcttcgatttatttgaagtatgctaaagaatctttatatctaatctatttctattgccgtaaagtttgaattcttgtgtgcttacacactggagcaaaacactgattctggaaaagaataattctcatgactgaatttaaacctactttggggctaagatttaaaaaaagtttatttaaaaatagatttattctagagtttcataagtaattaaaatagattaatgaaatattgcagcaatgcagaacatacataaatttctctttaggaagtcacaggagttgatgttgacttttcacctataggcagatattcttgtgaatcctgcatgttatcaattctaagattccattaatataagatatatcataaaccttgattgtacattttgtctgcaaaattgcatcagtgcacgtagcaatttaggatgaatcttgatttgagaagtattaaaatgagaaaaatattttaatatgtgaagaaatatggcatgatatgttagagtatgtttcattgttttcttattacagtagaaacagtttataacagaattgtacagtcatcctgacatatatcacacatccatatgcagaggtcagatgaaaatagaggataatttgtctttcaaaacaaaacaacaacaacaaaatcaactagaagatacatccactcaaatactgtgtcattgatttggtgagaagaacacaaatgtaaaagcagaaatatttctataccaaggagcatatcattcattaagtacaatgtattttagagtactactgatttgtagctcatgataaccatagtatgaactggaattgactttctatgatgtgtaaaatagaaaccattttccaagcaaattggtaatgtaaacaaggaaattatttattatactcaagactgaagtttagcaaacttttaaaggcttgaaaatatcactgataaaaaataaatgagctcatgataaatgattcttatctatgaaagtaattacaagactctttcagttacaaagaccagcttaacattatctctttcctctagcaaccctttgagatggtctatatgtcacacctctcactgttagtgagcccctgggcgtgaatgagttaaagaggaccaacacattgcactatcacttgataaattgtaaagggttgaaaagtagaattaaaaagagttaatgtcaattactgcttacttttctgctcccacgagattgaatttgagtctctcttctatgaccctatagcacatagtaaatagctaatttagagcaagttccccactgttttgaattgatttacttgttcttagatatccctccttagactgaaacaaatgacttataaatactcctaatcgaggatcatatctaacataactttttatctctcagtagctcccatttgacttgatttgctattttttgcagtacaactttattttatactcagtttatgaaatgcaagtgaaacagatttcataaaaatttagagtgggggatgaggaggggggatcttttgctacatggcaggttatatatattttttaaaagctacaatgcaagctaatgctttttaacaacaaaatgtttactagttgattatatatgtaacttgaagctgcttagtagtgctattacttcttggttaaaacaatcacttcacatttgttcttgtcatgaaggaaccacccttctctgttttttgttttttgtttttctgtctttcccattccatttaaaaatatgtactctatatatacctagacagattttgatcaatttcagaattactgatttgaatggccatgtacaatttattattttactttaagtgatgatggagtttcctaagtctgtttcattttttaaatttcrtgacaatatctggatggtcagaagctgacaaccagtttctgctacaatttactttttaatcaaagaaagtatgtatgtattccatgataggtatttttgatgacctgcatcacagtgtgaaactcctgtcaatttccaactaacaacaaagaaaaagaatagaaaaaaattggatgcacagagaataaaatgccatttcacactgggtgctttgtaaatgtaacccaactcacacaaatcctttaggcatcagtagagatgaagctgagccagaaaagaagaaaacatgtccaaatagagaaagtttgctcagcaaattgaaattcaggtctgaaattgataagtttgagttaaatctactgcaaagggcatatactcattcttttcttaaaatgcaaagtttattaaatattgatttttgttgcagattctttgcctatttccagtctcctcttccacttgattttctgacacagtacttattacttaggtaaatgggaataaaaacagaatgctaaatatttaaacaattttatctcagtttgcacacagaagtaaaatatactcctttatgtaattatagctcaatatagaagatataatttggcatattgtcccaaagcaaataccttttatattgttgtgtaatatgttgaacaaaaaacagttcagttgtaaattagaaagcttttacattaaatattatataatttcattatttgagctgtatcaagttcatgaatgtaaaagtgttttgtattaaaaattcctaacaaacccaaaagagaaagctgagttaatatattaaaaattgtttgtctctattgacccaaactaaaggacaaacaagctctcttcatttctaaattctcattgacatatttatttaccaatatataaaagagacattttcaggtagaaatttattgaaaagaggccaggcacagtggctcacgcctgtaatcccagcactctgggaggccgaggcgggcggatcacgaggtcagtagatggagaccatcctggctaacacggtaaaaccccgtctctactaaaaatacaaaaaaaatagctgggcgtggtggcatgcgcttgtagtcccagctacacaggaggctgaagcaggagaatgaactgaaccccaggaggcagagcttgcagtgagccgagatcgcgccactgcactccagcctgggcgacagagcgagattcgtctcaaaaataaataaataaataaataaatttactgaaaagatcagagtattctataaattttctgattctttaactatactccagcaaagaaaagcaaagagcatatttattcccaacccttacagggagttgtaacatatatatgttttaaatagtactatgtgttatgattataaaaaggatatgcactcattggtgataatttccagattacataaaagtatagaaaatataaataaatttaaattcaatttttttctcttaataaccacttattgagtgattggtatagatatactaactgctggactgttgagtatttagaggtaaaatacaatattctcatttcttgcttacagtctactagttgacttccagaataaatagattaccatgattactgttttatttcaacacaacaggtttctcagtatgttttttccaacttaatataagaattttaaaaattcattaaaatttctccaaaacaatttttcacagctttatctgaaagaccatcattaattatttaagctttgccatatttttgaggttttaggtttcttccagtgtttattataataaatgatgttatgagaaacttgtttatgcttgttttgatgcttcctttatgacagaattctagaaatagaattcctaggtcataaattatgaacatataaaagttgctgatgtataacattaaattggttttcagaaagattgcagcaaatttacctgacttccaatgctatatgcaagttgccatctcatgacaaacctgtaagaaataaatattatcccattttataatatttgatgatttaaacatgaaaaataatacatttttattgtatttttgttcttcatgaataagttaaatattttatgtttattaaccatttagatttttactgctgtgaattgcataattttgtacttcattgaatagaaatcattattttgatacagttaaacccattgatttttttttaacttttgctttttaccctttagggcttttattaagtttttctccaaagcatgacctattgccctacaccctcttctgttcaccgtcttctactagttgtgtgcatgtatttatgcatgtatgtatttatataacaacctatcaattacatccacatatctttatatatatgttttcacatagtaaatcattttttcccatcactgactttaaaatccattatttctgcactgatttttgatgtcatgtttatcaaacatcaagctctcatatttaaatgacctctcctttctgttttatttatgtatgttggtaacatgcttgtattaatgtggctttatagtgtgtctgaatagataggatgaacgatcctccctttttttcttttgttaaaattgcattgggttttcataaaccacctgtgtatgagttgatagtagtcaaaggtgcaacaaacccaaatcttatcagcaccaactctgtcttttaggatcagaccctcctcctggtttcttagagtttttcaatggaaatctctttagtctctcacacattcatagcattatcaatccacaagggatttggaaagtctacactcagattttgtttcttaatcattctgcaactaacttgcttttacagttttctcccttaatgtgcacagactcaaatgtagtttaaataaaataatatgtaaggtaaaattctatataaaatgtattttttcttttagtaacattttgtgtaaatatataagtatatacacatacacatttgcatatcacgtgcaaaatcatactattaccgtgcttcaaagattgagctacataaaatcttgcctcccactgttgtacagaaataaactctccaggacataattattatgattcttaaatattcacaagctaatgttattcttaaatattcagagctttttgtaggattcgaaagcctaagtcaccttgtcaatggtgaaaataaagtattacttaaacttccatgtttatcttttctatttccttcattggggtcacatcttctgtaaagttcttttactgtatatttaaattttctttacttcactagggaaatattttcttttccagggaaaattagatatctacaacttaaacttgtctttatctgccttttttacaagaaaatattttaacctttggctgttactgagaggtgacagcgtgctggcagtcctcacagccctcgctcgctctgggcgcttcctctgcctgggctcccacttcggcggcacttgaggagccctttggcccgccactgcactgtgggagcccctttctgggctggccaaggccagaaccggctccctcagcttgcagggaggtgtggagggagaggcgcgagcaggaactggggctgcgcgcagcgcttgcgggccagctggagttctgggcttggcgggccccgcactcggagccgctggccggccctgcgggccccaggcagtgaggggcttagcacccgggccagcggctgcggagggtgtactgggacccccagcagtgccagcccaccggcgctgcgctctatttctcgctgggccttagctgccttcccaccgggcaggcctcgggacctgcagcccaccatgcctgagccttcccccacctccatgagttcctgtgcaactggagcctccctgacgaatgccgccccctgctccacggcgcccagtcccatcgaccgcccaagggctgaggagtgcgagcgcatggcacgggactggcaggcagctggcacgggactggcaggcagctccacctgcagccctggtgtgggatccactaggtgaagccagctgggctcctgagtctggtggggacgtggagagtttttatgtctagctcagggattgtaaatacaccaatcagcaccctgtgtttagctcaaggtttgtgagtgcaccaatcgacactctgtatctagctgctctggtggggccttggagaacctttatgtctagctcagggattgtaaacaaaccagtcagcaccctgtgtttagctcaaggtttgtgagtgcaccaattgacactctgtatctagctgctctggtggggccttggagagtctttatgtctagctcagggattgtaaatacaccaatcggcactctgtatgtagctcaaggtttgtgaatgcaccaatcagcaccctgtgtttagctcaaggtttgtgaatgcaccaatccacactctgtatctagctgctctcgtggggccttggagaacctgtatgtcgaarctctgtatctaactaatctgatggggaggtggagaacctttgtatctagctcagggattgtaaatgcaccaatcagcaccctgacaaaacaggccactcggctctaccaatcagcaggatgtgggtggggccagataagagaataaaagcaggctgccagagccagcattggcaacctgctggggtccccttccacactgtggaagcattgttgtttcgctctttgcaataaatcttgctactgctcactctttgggtccacactgcttttatgagctgtaacactcactgcgaaaatctgcagcttcactcctgagcccagcaagaccacgagcccaccaggaggaatgaacaactccagacgcgctgccttaagagctgtaacactcaccgcgagggtctgcggcttctttcttgaagtcagtgagaccaacaaaccaccaattccaggcacattacttttatcaaatagtgcaaaataaaagttatcacaaataattttatagctttggaaatcgaattttaagagaatactaaggctagaacaaaatgtccatgtttaataatgaaatatgtatactatttaaataaattgtttatggctatttttcagagaactaaaatatattgagattaaaagcctgaataaaataataagtagttaagggattttaagcaaaggcattattattrtaggaccattttgtgctttaaagaaccattctccatgtaattgtgatgacttgattggaagtcagaaagatgaactgagaaattttggaattattgaagaagatttwtgtgacaaatattgttaaagtgggaattagaaggggcagaagtgaacaaagactttacggggcgcccttgataaaaagctttcattgtaatagagaaggaagggaaaatggtgggagcaaatgtaggtgaatttgcaatcttggaagtagtgagttgagggagttctgataaataaatactattattgcaaaataggaaccaaatagtctgctgatactgggacaagaaataagagtcacaggtttgagacaactgggaaactaaaagtatttaacttttttcccccccaacaaatgctgactacaaaccagagataaaaactttactgaatatttcacattacttgttttacaattttgtacagttgcagaaaggagaaaaccagattgtctgggagaaagtacagttgaataaaatgaagtactttgttctctttttgttttgattttcggaacagtcaagccctgcgtgtatttgcatgcagaggagaacaagcgcaatcgaagaggcatgtggtgctagacaggaagataataaatttggaagcaaagttctggaataagaagagtgataaaagcaaggatttagattaaaaaaaaaaaggagttttagtgagtgtgaataacaccttttcccccatgatagacgaaagctaggaagatacagataaagacatgaaagaatttaattagagacaatccaggagagggatgggaaaggaggcccccaaacatgtccactgctgtagtgatttcactagccacgagttagctaagtaaaatagcttctaaagaagtctaagttacagttgaactgcataggtggtttttttttttaatattgttttttaatttctaaagtgctatgagccaggcaccattctatgtcctgtaatatttgtcatgatctttgtgtgcactggtggagttaacactgcatcatgggagattttgttgctaggagttagagcaaaagaatcaaagaagaaaagtgagacaattgtgatttatggattaattcataaaggaaagaggtttagttgactcacagttccgcattgctggggaggcttcaagaaacctttaatcatggcaggaggcaaaggacaagcagatgccttcttcacaggtcaggaggatggagtgagtgaatgcaggaggaacttccaaacacttataaaaccatcagatcttgtgagaactcactcactatcatgagaacatgatctaattacctccacctgggtgctcccttgacacgtggggattacaattcaagataagatttggataggtacacagagccaaaccatatcacacactaagctacaaacatatcataatgactcaattgttataagtcataaaggagacaatgcatgttactcaaatttaaaaaacaagaacaaagcaagaaataagaaatggctcagaattcagatttcttcaataggtagagtacacatttttcagttgtcaaaaaaawtaaaatcctgagttcctattgttgaattttgccttcctattatttttttaaaaacagaaagaaatatctaaaaagtagtgataaaggtgagagacaaaatgttttcttggaaagaccagctcattatcttataataattcagcaatatttggtagaaaaagggcttaggagactcactattgactctgtttatcacaaaaagactattaaactaacaatatctatttttttcaacatttaaccccatgtacacactgtctccatgcacacactgaacaacccattcaaatcagcaagaaatagtcacatttataactagcataattttcaatttctacttcaaatttaaaaattgaacttttaaataatcagcgctaaacagcatatctgttatagaaatcttattcaccaggggtcgtactaacgtttagaacattttagaatattctctttgtcttgaattgtttattgatatctctaacctgcaaccaactaattttctcattttttcaattatgtcaaattacatatgaactagttttcattaattttttagcaattagcacaagccctttaatcccattagtaaattgcctgttataatttagaagtcccaaagttgcaggtttaaaaaaaaaaaaaacagtcatttcttttacctttctgttttcccactaataataaataactcacaacagcgattttattttcttctgtcaggagacttctaccaacatgattaaaatgacactccaagctgtagctgttatcaattataccaattaaggtcaaatagaatggaacagcagttttcgtggaacacaatatgggtgatgtaaactgttattaatttaaagacatcacattacctatgacagctcttcagaagttatcattaattatttctagacagtcatctatatccacatttctgaattaacttgttttgtgttccttgaatttgggggaaaatgggccctgctgaaaatcagtgttttccaaatggaatagctctcctgatctcttcactaaaaaaaaaaagtagtagggkttttcttcttattctttaaataatagactgaaaaattatgaattttgatgtctttgcacagaaataggaaaagcttaaacctctttttagtaagttaaaggagtagttatatctatatatctaaaatatgatattttaaaaaaatattttaatagttcattataaaattataatttttcattatatttttgctaaaatgtatttatattattcagagttattaacactaattgctgtaccaccaccaccaccaaacatccagaaatctcagtggcttaataaacttcatctgttgctaaytccttcctgagtggtttgcctccaagcagtaacaacaggctcctacaatcctcaaatgtctctgtctttatcttaaggaggtgaatgtggagaatcaagcataaaattgtgtggacacaagttagtcatatgatcccaagctaattgaaatggggcctgaaatcatagctttaactgtgagtccaaaaggaggtagatatgctttgataaaaatagagcagtgtctttgttatagtctaccctttggccacccagtatttcattagtgctatttttcatatcttccacttacccccaaatcctattcaaacacagtattcagtttatttccggaatctttggctaattgcagttattaggttggtgcaaaagtaattggggttttgccatcacttttgcaccaacctgatacctatgttaggtccacatgtagtagcatattcatgctttgtaatctgcatgttaaaaatccatttattctgcccctggatccttcatatatacataatgacagatacagatacactaatatcaataacaacccgcatttggaaaacacgagaatagaaggcacacagaagtcattgatccatggcatttatggaatccagctaagaacatattgtgaggacccacttcctggtgaaaaaaagaaagcttctcaattagacctgatcttccctgggagtaactaccttgttaagaaaaccaaatttagtgaatgctatttcttctcatcctccatgctttatctaaattacacattaaaaatatctatttcttggctgtccagcttacagaacccatctcatgttcatgctcatgtccaagagttctttctaggattgcagagtcaaatactttttaacccggacttgtggctatttggcaatataaatcttttaagaacttggcaaactatttgcttccagtcagtttcaggtacaagtagctcaaaccaccagacattattctcaactatgtttcatttctttgctatcttgctgtcatgcctctttgtatctcaccttaaagtcagataagcttgtgaccatcaagcttgagtgggcagaacatgtgctttatctgatctttggcacaaatatgatacactgttcagctgacccaatttctctgggtcttggttgttcaaagcattttaaatttcaactcttacctttttccgagcttccttattccctttcacttcactttaaatctgctaattattttctgagctcatctctttcttgtaatactctgctaaaactgtcaataatagtaacataccgcaagaatgtatttttcaaacacttttagacctataaactgagtcagctttggtctgccttccaagttaccatgggttatggtttcttgtggttattgtttactttaacttattcctctttttttttttttctttccttaactttcagcttcagaggcgatatatacaggtttgttacatgggtaaattgcatgtcattggggtttgatgcacaaatgattttgtcaggttatggtttaaaatgtgttttcattttaatcaccaagggaccaacctactttattctcttgcaatctgtcaccccctactaagttaataatatgtgtttcaattttgttttgtcaatatctcactttaaggatccagttttttattagtctgtataatcaatgctgactactgcaaatctcaaaccctccgtgatatttgtcatgcaaatttgaattgggatattactgattktgctgctgctctcctgcrtagcttttatctaaaaagtgagttagaggccgggtgcggtggctcatacctgtaatcccagcactttggtaggctgaggcagccagatcacctgaggccaggagttcaagaccagcctggccaaacccgtctctactgaaaatacaaaaattagctgggcacagtggcgcatgcctgtaatcccagctacttgggcggctgaggcaggagaatcacttgaacctgggaggcagaggttgccgtgagcagagatcgcaccactrcactccagcatgggtgacagagcaagactccgtctcaaaaaaaaaaaaagtgatttagatattcagaatccttctagctagtaactccattgtcttttcagtatgacctatgatgtctctttttaaggaaaaaagaaagcatggatgctaacctacagagtggttatgggtgggcctgtaagtccacattttattaactttctatatgttttcaaagcaaatgcaaaggagactatgatctatgagttaactatgaatttgggaaaacaatttcctcaacagtaaaaacctaaaatttttaaaaatagtaaagcaaaataacackttagcaaagtctcaggatacaaagccagtgtacaaaaattagtagcatttgtacacaccaacaacatccaagctgagatcccagtcaagaatgcaatcccactcgcaatagccacaaaaggaataaaatacctaggaatacagctagccagggaggtgaatgatctctacaaggagaattaccaaacactgctgaaagacatcagaagtgacacaaacaaatggaaacacattccatgttcatggatagaaataattaatgttgttaaatggtcatacggcccaaagcaatttacagattcattactattcctatcaaactaccaatgacattcttcagataacttgaaaaaaaaaattacaactcatatggaactaaaaaagagcccaaagggtgaaggtaatcttaagcaaaaagaacacagcccgaggcatccaattacccaacttcaaactatactacaaggcaacagtaaccaaaasagcttggtattggtacaaaaacaaacacgtagactagtggaacagaatagagagcccagaaataatgccatgcrcctacaatcatctagtcttcaacaaagttgacaaaaacaggaaatggagagaagacttactgttcaataaatggtgctgggataacttgctagctctaggcagaagattgaaactggatcctttccttacaccatatacaaaaatcaagatggattaatgatttcaatacaaaacccaaaactataaaaaccctgggagacaacttaggcaataccattctgaacataggccctgacaaagatttcatgacaaagacatcagaagcaattgtgacaaagacaaaaattaaaaaatgagacctaattaaactaaagagcttctacaaagcaaaagagattatcaacaaagttcacagacaacctacagaatgggagaaaatttttacaaactgtgcgtccaacaaaggtctaatatctggaatctctaaggagcttaaacaaatttacaagggaaaaacaaccccattaaaaagagggcaaagaacatgaacagacactttccaaaaaaagacttacatgtggtcaacaaatatactaaaaatgctccacatgattaatcattaaagaaatggaaatgtttgacaaacctgacaaaaacaagcaatagggaaaggattccctatttaataaatggtgttgggaaaattggctagccatatgcagaaaactgaaactggacctcttccttacaccgtatacaaaaattaactcaagatggattaaaacttaaatgtaagacctaaaaccatataaaaccctagaaaaaaacctaggcagtaccattcaggacataggcatgggcaaagacttcatgactaaaacaccaaaagtaatggcaacaaaagccaaaattgacaaatgggatctaattaaactaaagagcttctgcacagcaaaagaaactatcatcagagtgagcaggcaacctacagaatgggagaaaaattttgcaatctatttatctgacaaaaggctaatatccagaatctacaaggaacttaaacaaatttacaagaaaaaaacaaccccattaaaaagtgggcaaaggatatgaacagrcacttctcaaaagaagacatttatgcagccaaaaagcatatgaaaaaaagctcatcatcactggtcattagagaaatccaaatcaaaaccacaacgagataccatctcatgccagttagaatagtgatcattaaaaagtcaggaaacaacagatgatggagaggatgtggagaaataggaacacttttacactgttggtgggagtgtaaattagttcaaccattgtggaagacagtgtggcaattcctcaaggatctagaaccagaaataccatttgactcagcaatcccattactgggtatatacccaaaggattataaatcattctactataaggacacatgcatacgtatgattactgcagcattgctcacgatagcaaagatttagaaccaacccaaatgcccatcaatattacagtggataaagaatatgtggcacagttttggctctatgcagccataaaaaatgatgagttcatgtcctttgcagggacgtggatgaagctggaatccatcattttcagcagactaacacaggaacagaaaaccaaacactgcatgttctcactgataagtaggaggggaacaataagaacacatggacacagggagggaaacatcacacactggggcctgtggtggggtggaggggctaacggagggatagcattaggagaaatacctaatgtagttgataggttgatgggtgcagcaaaccaccatggcacgtttatacctatgtaacaaacctgcacattctgcacatatatcccagaacttaaagtataattaaaaagaaaaaaaaagtataaagaaaaaaaagaaatggaaatcaaaaccataatgagataccaactcacaccagtcagaatgactattattaaacggtaaaaaaaataacagattctggagagattgggggaaaaggcaaataattatacacttccctggtgtgtgtagggtgggaatgtaaattagttcaccgctttgggaaagaggttggtgatttctcaaagatctcaaagaggaactaccatttgacccagcagtctcattattgaatacccaaaggaatataactcactctaccataaagccacatgcatgcatatgttcatcacagcactattcacaatagcaaagatatggaatcacccttaaatgttcaccaatggtagactggataaagcaaatatattacttataaatcatggaatacyatgcacccacagaaaagawtgagatcctgtcctttgcagaaacatggatagagctggaggccatcatcctaagagaacttacaggggtacagaaaaacaaataccacatgttctcacttacaagttggagctaagcattgagtacatatggacacacagtagaaaaccacagacaccagggcctacaagggggtgggggtgggaggggaatgagaatagaaaaatggcctattgtgtactatgcttattacctggatgacaaaagaatctgtacaccaaacccctgcagcacacaatttaccaatatagcamacctgcacatgttcccctgmacctaaaataaaatttaaaaagaaaaatttacttttcacttagaaactataaactgtcatgaatattcaattttaaaggtttcatgcctaatgaatattcatttactgccatgttttaaaaacgtacatgcttaatagtgtgaggaatattggctggttagttgtattattgtctgtatagcaatttctctttctcaaacaagtataagtactaccaattttgaaacacattttgatggaaagcttaatgtagacatagtgcatggccacttactgctaaagatggaattttaattagggcctctctaatgttctttttactgctaacattttatcacatgtgacacactcaaatttaagccaaagtcatgctaggctagcattttaatgtgtataaaacgtcacatcctgtctccaactcactaaatataataatcaaggctagtttcctggtgatattttaaaggayaagaaaaggatacaagaattaaaaattgccttttaagacaattttgtccttatttctacacagtatgtttattatagaaaaaagaaaaataaagagaaacaataaacgtttgcaaagactttatcacccttaaaataaataattatttctggtttgttgtatttcttttgtgaatgtgtgggtatgtcttataatcaatgtgattttataaatgtggagttctgtttctcatgttttgtaagcatttttatgtcattaaagaatatgtgaatacatgattgaaatatatgcataatatttcattataatattttattacatacataagatttatttaataaatcctctgttagatctttaggcaatttgcaatttttatggacatgagcataactgtaaaaagtatcttacacagatctttacatacatctctaaagacatcaggggtatatttatatttttgagacttttgagcacatatagtagtctaaaattatgtttttcagaatcagtgtatcaattcacacttccatcaataatatgcaaatgtgttgctccctcatttctatttcagtaattattgttttctaacttttgtcaaaatttgatagttggaaagctcccagaatcattatttgatgtcctatattgttaaatattcttgtatgctatttgcattttgtgtgtatgttgtgtgttgtataaatgagttttctgtattaaatatatattgatttttattacaagcaaagcacartgctacacactggatacacggtggtgaacacaatagtcaacatccctgctcttatgaagcttaacattctacaagataaaaggaacattgaatatggtactktaagctctcttaacaggcccttacataactgactctcattgaatcaacacccttcattcctacagcaaaatatagtgtctaatatctataggaagccgaatatttgtgactggaaggctagtacctggagatgatgtacatttctactccctccacttgttttatcaattaagatttaaatgtgtttgatctcaaatttgtttgcccaacatgttcctgttatggtatttttgaattttagtgaatattatttacagtaaaaaatatgagcacaaatgaaatatgaatttgtttctatgaaattttgtctaatgtttagacaaccaaagtttagttgctaaaattaatactattacataaggatgaaaattactgaaaaaataattgactgtgcagatgacatatgctctcaggattttctgaattacatttttcttccatctaaaattaacagaaattggagattatggtatattcatgatggttgtttgcacatgggagaaggctgcatggaactctaattagcagactattgccacaagaagaagttttaaatataaactaggaaaaagtgtacacttacatggtttatgtcaaaacaaatctttaatacagacaaatgatttttcatggtttcctatttgattccactgtttcttttcaattattagaagtatttgatagtaagacaacttctactataattaagtcataataaacataagggataagggtggaattataaaatattttcaccagggatatatgatttgttttttgggtatttttttggcagattttttcagactagtttaaacttcagcataatcgtctaataaataattatatcctgggctagatcttagaaataggtgaaatcactacttctagaagaggtgtctccagagaagctttgcgaggaccacattgttactttttatcttctcaaagtaaagagatagaggaaaaaaatgtgcatttagtatatatttatatatatataaacattcatctcagaagactaaaggatacctttatttttacctactattaagtctgtttgtgtattcaatattttaaaattgtttttaaatgagacaacctgttatagaatcattgatttatatttcccaaccctggatagtgtatttgcatgttatgctttattcacaaaaacagtgtggaggtcttttagccagtgcatttagcttagatgatacaaatatatttttgtttgaatacttttaagtcttagaaaactttatgcttatcttttattcagctatataaagtcctgtgcaacatgtaatgtttgtagtagatttaatagatgcagcagaggatcaaattgtaaacattttgaggcagcaatgccttagcacaaagtgttgaacatgctttgaattccatatagcgatatactgtatctctacagaactgtcagggtgaagaaaagcagtgttccaacagctataaacatgtcacatacagacatttatttagacaaatagagatgtagccaggtgtcattttaaagctcaactatttatgctcttggcagatagttgaaaacagaatacacttatatctcagagctttgaaaatctaaaaacaatcaacaaacagtatatcacccatggtcgctgtatcagaattagcctaagcatgtgaaatgctaagttattatattttgatttcatatttaatcatattaataaaaactagaatagttaagaagaaaccaaacttgttccattgtggagattgtttaaatttttttcttctcttatgtcctgtcttagattaaaagttctaaatatgtacagtatttaagagagagaagaagaatttctaaagagtggaaattatttatatataatataacttgatataacataaatatataatttccacttatgtccatgacaggctagctctaccactataaaacactataagaacagacaaaataggtgaagcaacagtgtttagaatctgaataacaaacagaatagggatgtgagaagtacaagaggtgaacctcacagttacatcacttttctatttggaagaatttttttttttttattgtggtggaaggcagaatggtagaacccaagaaaagcatagtgctctcattgttctkaggaggcagaaatgagagttcaacaatggtgaaatggctgtaattgccaatggaaggtatgaagacaaaaggctccaggactttgcatgatgttgctttggtgtcttttaccaggcactgagttgcacatgcccaagatgatatattgaaagtttttgcctagaaaaaatactgagtagctttgatctaaagtttcatagtgctagaagacacactgggtataatataacaaaatgctttgctaaacacccgaatcatttaatcaagagtccagaaaagatatgcaatatagaaaagcttttgtagttgggctgcaatagtcctagaataaactttactctagaatcacactaaaaacgaaaacaaagcaaaacaaaacaaaaagctgaaaaacaggactggaaataatcaaggttatatatcagtagattaagtattgccagaacaaatttaatactttaaaggagcacagttaattagatactgaacaatataatatccacaatatgtaataaatawttactagatatatggagaagcaagaaaaaagtatcatcattagaaacaaatacctatgactggtataycaggattagctgtttcaatattttattttgttattataaatgagtatttagagaaaaatataaacacartaaattaacaaaaagaaacctcagtagaaaaatggtaactattacaaaaaagaactaaatgaaaattctagaactgaaaactccaatattcaaaaccaaaaagaaggcattggattaggtttaacaacagatagaatattgtataagaaattattggtcagattgaagatagaaaaatgtaaatcattgaaagtaatccgtagagaaaaagagtgttaaataaaataagcgtgccacagggacctgtggaaaatattaagcagtctaatttatgtgtcactgggattccaggtggaaagagaaattgtatgaggctgattacttcatggcaaaacatctttttgcaatttgaaagaaaacactagtctggtgatgaaagaatcacatcaaatactgarcaaagtaaaatttwaaaagcccccatgtacataacatagtcaaaatgctataattgaaatataaagaaaattttaaagcaggcagaagggaaaacattctacttacatagggaagaatattgactgtggtctcatactttaaataaaagcaacaataaaatgaagtcactaaaggctaaagaaagggaaaatataattgttgaaatataatttatactccagaaataagtgtccttcaaatagtgttcacaaaaaacaggcaaaataaaagtattttctcatgaacaaaagctcagaaaacctaccacaaacagtactgcatgataagaatgcagaatcaggtttgctgggttaaaatacaataatacattataaaagttggagtttatacaaaaaamatccggcataatgggttatgcctgtatcccagcaattaagaaggctgaggcaggaggatgacttcaggccatgagttcgagaccagcttgggcaacatagtgtgacctctgcctctaaaaaaatagaaaaattaaaaattaaatataaaagtcttccaataattatttataaaacttctccaaaatataattaataaaaatgatgatacattttgaagatacatatacagagatacagatatatctctatttctatctacatccatatctatgtatatagggaaacaaaatggatatatattttatattgagagggatggagagaggaaggaaagggggaggaaatgagggataggaaggggaaaatagagaaaacatatgtgtgacaacaattgcacagaggcttagcaaggaaaatgaaagtataccaatgtaagtttcttaaatttttaacaaaaatgatttcaagagagtctgttctgataaatagaagatgtataccgtaagtcataaaaactaccaaaagaagggaggggcacagtgaaaaagagccaataaacaacagaaaagggaataacaaaaatgtatgcaaccaaaaagaagataggataatagaaaacaaacaaacacaaaacttacaagacaagcaaaatataaatagcaagatgacggacataaccatgtcaataataatattactggtaaatggattaagcactctaattaaaagacaaagattgccataatcattaaacaaagagggaaccaactatattctctgtacaagagcacatactaaacataaaagactacaaaggttaaaagtaataagataaaatatgtactttgtaaatgtaaacaataagaaaactgaagtgatgataataaagtcagcaaaagtgaaattcgtagtaaaacaaaacaaagttatttttgaaaatcatctcgcaatgataaagggttatttcatttaaaaaaaaaaggatagaaattcaaaatgtgtaaactagtaagagaggttccaaacacaaatagcaataatggacacaataagacataaataaacaaatctatataatgaaatttaaaagcaataaagcatgaaaaagcattctaaatttttgaaacatttctgaaaagatatgcattaatctgttattgaagctttatatccgaaatggtaggccatggatcttgagtcaaaaggacagtttacatttactttatatggttttatatttttcaaatagttaccttttaataatataaatttagttaaaataaaaataactgcttcacctaaaaaatagatttgtaatgacaggatataataattataaatatatatgcacccaacactggagaacgtagatatatgaarcaaatattattagagctaaagagagagatagactccaatataataacacctgtagactttaacacctcactttcagcattggacaaatctttcaggcagaaaatcaacaaaaaaattgaacttaatctgcactatagaccaattgactgaataaatattgaccgaataaatatttacagaatatttcattcaagggctgcagaatacccattcttctcctaagcacatagatcattctcaatgttagaccatatgttacatcacaaagtaagtcttaaaacattcaagaacattgaaatcatataaatcatcttctctgatcataatgaaataaaactagaaatcaataacaaggaattttggaaactatacaaacatatggaaattaaacagtatgctcctgaatgggcccacaaagaaactaagaaaattgaaaaatttcttgaaacaaatgacaatgggaacacaacttaccaaaatctatgggatatagcaaaagcagtactaagagggaagcttaaagctataagcacctacattttaaaaagtagaaaatcttcaaataaacaacccaacaattcttattaaagaataagaaatcaagagcaaatggaacccaaaattagtagaagaaaaaaaaaaagatcagarcagaaataaataaaattaaaatgaagaaaacaataaaaaagatcaacaaaacaaaatgttgcttgttttcgaaaaggtaagcaaagttgwtagactaagaaaaagagagaggagacccaaataaataaaatcaaaaatgaaaaggagacttacaactgacaccacagaaaattaaagaatcacttgtggctactatgaggaacagtatgcctatcagttgcaaaacctaatataaatcaatacatttctagatacatacaacctaccaagattgaactatgaagaaatccaaaaccggaacagaccaataacaagtaatgagatcaatgccatgataaaaatctcccagcaaagaaaaggccagggcccaatggcttaactgctgaattctaccaaacatttgaagaagacctaatatcaatcctattgaaactattccaaaaaatagagaaggagtgaatacgtccaaactcattctacaaggccagtattatcctaataccaaaatcagacaaagacacattaaaaaaatagaaaagaaaagaaataaaactacaggccaatgtccatgataaacattgaggcaaaaacagaatactagcaaaccaaattcaacaacacatttaaaaaatcattccttatgatcacatgagatttatcacagggatataaggatggttcagcatacataaatcaatcaatgtgagacatcatatcaactgactgaaggacaaaacctatatgataatttcaactgttgctaaaaaacatttgataaaattcaacattacttcatgataaaaactctacaaaaactgggtatagaaggaatatagcttaacacaacaaaagccatatatgacagagttgcagctagtatcataaatggggaaaaacagaaagcgtgccaaggatgcccactttgaccacagttattcaacatagtactggaaatcctagctaaagcaatcagaaaaaagaaagaaaaaaattgcatcaaattggaaaggaagaagtcaaattatatttgtttgcagatgatatgctcttatatcttggaaaacctaaggactccaccaagaaactactagaactgataaacaaattcagtacagtagcaagatacaaaatcaacacacaaaaatcagtagcatttctgtatgccaacagtgaaaaatctgaaaaagaaataaacaaagatgggcatggtggctaacgcctgtaatcccagcactttgggaggccgaggtgggtggatcacctgaggtcaggagttcaagaccagcctgcccagcatggtgaaatcccacttctactaaaaatacaaaaattagctgggtgtggtggcagacacctgtaatcccagctatttcaggggccgaggcaggagaatcacttgaatccaggaggcggaggttacagtgagccaagaccatgtcatgaactgcagcctggtcaacaagatcaaaactccatcttaaaaaaaaaaaaaaaaaaaaaggaagtcaacaaactaatcccatttcaatagctacagataaaattaaatatctaggaattaaccaaagaagtgaaaaaaatctctgcaataaaaactgtattatattgataaaataaattgaagaggacaccaaaagtggaaatatatttcatgttccctggattgtaagaatattgttaaaatgtccatactactcaaagcaatctgtagatttaatgcaatctctattaaaatgccaatgacatgcttaaatgaaatagataaataatcctaaaatttacatggaaccccaaaaaaccccagaacagccaaagctatcctacacaacaaaatcaaaattggaggaatcatattacctgacttcaaattatactaaataactatagtaaccaaaacagcatggtcctaacataaaaaaagacacatagaccaatggaacagaacagagaacccagaaagaaatccatgaatctacagtgaactcattttcaacaaaggtgccaagaacacaattgggtaaaggacagtctcttaaataaatggtgttggggaaactggatatccatatgcagaagaatgaaactaccccactctattctgtcatacacaaaattgaaatcaaaattgattaaagacttaaatctaaaacctcaaactatgaaaaggctaaaaaggaaacaatggaaaaagtctccaggacagtggactgggcaaagatttcttgagtaatgccccacaagcacaggcaatcaaaacaaaaatgggcaaatggggatcacgtcaagttaaacagctttttgcacagtaaacaaaataatcagcaaagtgaggagacagcccaatgaatgggagaaaatatttgcaaagtattcatctgacaatggattaataaccagaatatataagaaaaataataatcaaaaatgggcaaaagatctgaataaacatttctcaagaggagacatacaaatagcaaacaggtatataaaaatgtgctcaacattgagaaaggcaaatgaaaactacaatgagatatcatcttgctccagttaaaacggcttttatccaaaacacaggcaaccagaaatgctaaagaggatatagagaaagggaactctcatacgctgttgataagaatgtaaattagtacaaccactagggagaacagttcggaggttcttcaaaaaactaaaaatagagctaccatatgatccagcaatgctactgctgggtatgcacccaaaagaaaggaaatcagtatatttaagagatgtacactcccatatttattgcagcactatttataatagccaagatttggagggaagctaagtgtccatcaacagacaaatggataaagaacatgtagtatgtatacacaatggagtagcatttagccatatgaaagaatgagattctgtcatttgcaacggcatggatggaactggaggtcattatgttaagtgaaataagccagaaacagaaagacaaactttacatgttctcactcatttgtaggaggtaaaaattaaaatgattgaactaatggagatagaaagtagaaggatggtttccagaagttgagaaaggcagtgcaggtgttgaagtgggggattgagtatggttaatgagtacaaaaaataaaaaaataaacagaaaaaatgaataccttctactatttgataccacaacagggagaccatagtcaataaccatctaattgtatattttaaaatatgaaagagtataattggattgtttgtaacataaagggyaaattacttgaggtgatggatatcccatttaccttgcggtgattattacacattgtatgcctacatcaaaatatctcatgtacctcgttaaatatagacaccatatacctacaaaattaaaaattgaaaaatagatttctcatcttgtaaagtacatatttttcaataataatagctaaatttaagtaattatgttagtatattaatttcctatacttgtaaaaaaatcactacaaacttaatggtttaaaactacacaaatttattttgttttcttttttttttttgacggagtcttgctctgtcgcccaggctggagtgcagcggcgcaatctcggctcactgcaagctccgcctcccgggatcacgccattctccagcctcagcctgtagctgggactacaagcggccaacaccacgcccggctaatttttttttttttttttttttttttttttggatttttagtagagacggggtttcaccgtgttagccaaaatggtctcgatctcctgacgtcgtgatccgccgcctcggcctcccaaagtgctgggattacaggcgtgagccaccgcgcccagccaatttattttcttacagttttggaggttagaaatctaaaacaggtcagcactgctatgttccttctagagattctaggggagaatgcttgtctttctcagcttcttgaggctgcctgaattatttggcaaatggccttgcatcactccactctccgctttaatcctcaaatctccttctctgactctggctttcctttatccctcttatcaacacgtttgtcactacattggatcaatttgtataatctctccatctcaagagctttgacttaatcatatttgcaactttccttttgccaagtaaggtaacatattcccaggttccggggattaagacatggacatcttcgggggtcattatccgactacaacagctgggcgttgtactgattgcttaacattcattatttcatttaccttcataaaatccttatgatacggctctattcaacagaggacacaagtttagaaggataaatgagactgcatgagatcacaaggtgattaagttgagagacagaaatggaacctttatctgaatgactccagtgctcttactcttaaccattatgttatctactctctttaatattatcagattggtttgtgatagtattatccagctgataatttgtgaaatttcatattagttgtcgtttaattttcaagtgacatttcatacttgttctgaatggtatatattgtgtcaattaaatcaagatgaatgaactgttgactgtaggttagctttgttttccttgaacaaccttatctactttttgaaacaacttcagtttcccaaaacccgagtggcaatgctaaaatgtctgtgggccccttaccgtatgttcgactacccttcagccaatctttgcagtctgatgacatgaagcttttctgcaagaagagcttttgttattctgtcaatgtccacttttctcacactcttcctttcacagaatggtgttaactcttaggcaaaaattgactttcaagcctgcttctgtattctgccctggcaagtctggaggcaaacaactgaccccagtattatgtttcaccttaatgtaatagaatgactccagccaatctgggtatataatgtggacagaggatggctaaatattcttctattaaatactacttttgcttttcatatagcccatgaaaacttaattatggaacattccatttgtaaatctgcccaggagttcttggttattgtctagcagccattttttaacattattatctggtgcaaaaactcggtagccaaatttactttcaagggtttgttctataaattgatgaagattgcctctattgctttacattatgttgacttgtattcatattaaaaaatataatctctagcacaatggcagttttatcaatgggaaacatatataactatatactatactatatatatagttaaataattatttagatgatatccactttttaaagactagagtgtctttgagtgtgatatcgattggatatatgtccccacccaaatctcatgtcaaattttaatcttgaatgttggaagtggaacctggtaggaagtaattggatcttggaggtgattctcattaatagtttagcaccatccggttggtgctgttctcctgataatgagtgacttgtcatgagatctggttgtttaaaagtgtgtagcacctcttccctcactctctttgttgctccttctcctgctgtgtaagacaagtgctccctcttaggggagcttacaaattatctgccatgattgtaattttcctgaggcatccccaggagctgagcagatgccagcattacgctctttgtaccacctgtggaactgtcaaccagttaagcctcttttctttataaattacatggtatttttttatagcaatgccagaacggtctaatacaaggtgcaagtaccattaaagtttttgagcttcagagctgcataaagtttctgttggattaaaactatttgtggtttcatgatacgttgaattattggggtttcatcactaggccctcttatcacttatatattcactctgttatcgtatgcagtgtatacactggcaaatctcttaagttttgtagattactggggtctcactacaagaccctcattttatttatataatgaccctatgttatggtatataatctgtacactgatgaatttccacattgtgactccaggtctcatctcttatctctcagtttcatagttggacagtccaattttcacttaaaattaaagattatgtatgttgcatgcagatttaaaattaaacatgcttcctgtatatatttgtttgtattggtttttatcataataaatagtaacattcaatcattttgccataaacttgggaaacaatatttatatatttctcctctaaatatatttaacaaatatgtctatatttttcttatgttccattagtctaagagccttgtctttcaatttatttaattgttataaagtaccaaagaaataaatattgttactaatctataaatgagaagtctaagatacaggaaaatcaagtaacttgcccaagatcacacagctggtaaataatgaagtcagaattgtaatccagtaatttaacctcaaaaatttgtttctttaatcaacatccatgctacatccaggaaattgatcttgtcaactcttgtttttcaaatatttctccaatcctgcttgctaacatgctatctacaccactaatatctccagtttaaaggactccaaaaagtctcctattttttttctgttctaagaaaacaggaaataattaatggacacttcattaatattaaaaaagagctatgttgctgtttatgatgtagagggtcattgtcaggcaaacctaacatcaggtcctttgtccgccatctgtacaatgaatgcaaatatttaattaatttaatttatttatttatttatttgagacagggtctcactttgtcacccaggctggagtgtgttggcatgatcactgcttactgtagcttcgacctcccaggctcaatgtgaccctcccagtgcagcctcctgagtagctgggatcacaggtacatgccaccacacctggctaatttttgtatttgtttgtagagttggggattcaccatgttacccaggctggtttccaactcctgagctcaagcaatctgcccacctcagcctcccaaagtactggaattataggcatgagctgcacctggaagagatttattttagatatcattattgcattagtttttagttgaggattgtttagaaaaaaaaaatctctcttaggtatcctaggtgaaggaacatctgtttaaaataatacaaatcttaacaatattgtatcatggtttctttaaaaaaataacaattctacttctagtaatatagccaaagaattgaacgcataggctcaaatacatgtctgtgtaccaacattcataacagcaccattcacactagccaaaacatggaaacaatccaaatgtccatctaaggataaatagacaatatgtggcctatatagacaatgaagtattattcagtcttacgaataaataatttttttatttacacaaatttatgggatatgtgggaaattgtgttacaggtatataatgcatagcaatcaagtcagtgtatttaggatattcataacatgagccccagtatatttttgttaagtatatttaccctactctactataaatattgaatttattccttctatcttgctgtatgtttataccctttaaccagttctcttcatcctcttcccttccctgactcacctttcccagtttctgtagtttcattgtctatctctatgtgatcaaatatttttaatctcacatataagtgagaacatgtgatatttgccaatttgtgccggattcatttcacttaagataatgacctcccagttctatccttgttgctgcaaatgacaggattccattcttttctaatgactgaataatagtccatgctgtatatataccaaatattctctactccatcatctattgatgaaaactaattggttccacatatttgctattgtggatagtgctgcaataaacatgcaagtgcaggtttcccttggacatattcattcttttttgttcagaccgatacccaagtaatgagattactggatcaaatggtaatactattttcagttttttggaaaatctctatactgttttaatagtttgcacccccaccaacaatatgtaagtgttcccttttttccacatcttcatcaacatctgttgtctttttaataataatcattttgacaggtataagatggtagcttattgtgcttttaacttaatcagtaatgattagtgatattgactgatcattttttatacacctgtggccatttgtgtcttcttctgagaaatatctattcatgtcctttgcccgctgttgtatgggattatttgtaattagttggtcttttcctgttcagttgtttgagttccttttatattcttgacattaggcccctgttgggtggatagtttgcaaatattttctctcattcaacaggttttctcctcactgtgttgtttcctctgctgtgcagaagctgtttagtttaatatagccccacttgtctgtttttgtttttgttgcttgtgcttttgaggtcttcataaatgttttgcctagacaaatgtccaaaatactttttcctagattttcttttagtattttttgtattttcttgtcttatatttaaatctttaatttgttgtaagttaattgttgcatgtgtggaagatagaattccagttttatttgtctgcatttggctctccaatttttccagcaccatttattgaagagggttctctttcctcaatgtaagctcttgtcatctttgtcgaagattagttagttataaatacatgacattttctgctttttaaattgtttcattgttccatgtgtgtatttttaccaataccatgtcgtttactatagccttgtaatgtattttgaagtcaggtagtgtgatgtgatgccttcagctttgtcctttcagctcaggattgcttgcactatttgcacttttctttttcggttacatataaatttttaaattgtttttgctaattttgtgaagaatgatgttgatattttgatggggattgcattgaatctagaagtaagtgaaattctaacacatgctgcaacatggatgaaacctgaaaaaaatatggtaagtaaaataagccagacaaaaaagaacaaacattgtatgattttaattatatgaaattcctagagtagtcaaattcatagagacagaaaatagaattgtggttgctaggggctggaaggagaaaggtatggggagttcttttttaatggtacagagttccactatgggctgggctcagtggctcacacctgtaatcccagcactttgggaggccgaggcgggcggatcacctgaggtcaggagttcgagaccagcctggccaacattttttagtagagatgaaaccctgtctctcctaaaaaagtgccaaaaattagctgggcatggcggtgtgcacctgtaatcccagctacttgggaggctgaggccggagaatctcttgaacccagggggcagatgttgcagtgagccgcgatcatgccactgcactccagcctggaggacagagtgagactctgtctcaaaagaaaaacaaaacaaaacaaaacataacaaaacaaaacaaaaacagagatccactacgggaggtgaaaagtgctagagaaggatgatggtgatgcttgtacaacagcgtgaatatactttatgatactgacctgtacaaccaaaatggtttaaaataataaactttatgttatatatattttatcacaataaaaaactacaattcatatggatacacaagaagaatcaagtaacattttcaaggagattgggaaccagggtaccatcaaaaatatcaacaaaataactatattgactttttatgcattctttcctccattaatatagtctaaatctcataatatcttcatttcaatattcaagtgctcacctatatgccaagtcttcatgaagttagggtcattaagcacaaagaagatattgccatttttgaggcagtttctctaagaagaaaaatgaggagaaagtgaaaaatactggagatctcttctacacctggcaaccaggaaaaaaaaaaacaaaaaaacctgaattggagagtttataattcagttaacactgtaaaactgtctttgtcctaagtgccacaggactggaatatactaacaatcacattttatgactgtagttaaattggaattttcttgactactgtcaagaaatgttaatagaattaaggatcaggactacacttatataaatgaccaaaagaaaaaaaaataaactttacttaaatatttcttggaaataagtagaaatgagcccatatctcagtattataataaagacaaatatgtagatgaggtaagacctatctaaagatattctaagtgacataatgatataaaacacttaagcaggttatttccaaatagatataattataacaactttgtgctctacaattttttgaagaactcataaatatctgctgaaggcctatgaggagctcacaacaattaaataaaatgtcatgaggttagtgaaaactccacatagtgtgagaattaaaagaaaagaatatatatatatatatatatatatatatatatatatatatatgtaagtatgaaagamtatatacaaaaggcaaatgagatgtgtatgtgtgtgagggtgggttgatggtgttcgaaaggggtactgtaatatctcctctacttgtttttcaggcaaaaaaaaaacaccctttcttttttattttaaatgtatatgcataattactaagaagaaaaaaatgtgccactttactttctttcagaataataatatttcttggtaaaaactgaaataaacaataaaaatgaatttattgttggcagagccaaaaaatacatgtgtatgtatgtgtgtgtgtatgtgtatatatatatatgtgtatatatatgtatatatgtatatatatatatatatgtagttaatatccttttgtttgtttgagcagtaagccaattaaataactacaacaaaatattttattaaggttgtatcttctctttactaatgtttttaatggacccttcaaaaatctatgagtccgtaaaagtatggtagatagtaggtttaaaagggaaaaaataaaggtttcaatatacattcactgaagtgaagaagatgaagaaaaaaaaatcctttatatatcatgtatttttcaatgtttttaaatctatatgagcaaaattttgacatagtaagtaactcttttgtgatgggccagttgaatatattaatacaatgaagtgtgtaacaaagagatggagacctgacagccagagtccaaagtctggctttcaattaaggatgtctttagctaaaagactttgggctagttgactaaaaatttcatttttcacatctgtaaaatttgtaggctgaatgagatggtgagatcaataatttctaaggccatcagtagctgtacaactccataagtctgtaagactgatgaaagcattctccttatggcttaaaagaatttataattcaaggttgacatacacagctatctttctaagcatcttctctaatgagatcccttgatacttcaaatctaacttcaccccaggaatctggggatgtcgctatgagtttcaatatattctaatgccaccaaaacctatttctgtcctactgccactatgttagtcataytttggtaagaaaaattaaattagagttactcaggaattgcattgcttgtttgcaattgatacgtctacataattctatgaattccatattataagtgaaaatctggttctaagatcttaacaatacttcttcccaaatcaagagaagtctaaatttttactttaaaaatatgttcatctttgctctgcatttattcaatggtgttccagtctaggcctacttactagcttgtactgacttcagatatttttataackttccattctctttatggtttatttattmccccctttattgaattactacagtctagtgcatataaaaatatttgaaagaacagctgtgaattaaaaagacagctctgaactatacagatttaataaatctaaaattttatttaaaatttataaattctttgtttctttctgtctgtttttgcgtcttggtagaattttgaagtggtgccacttgattcctttctcctcttcctttgtgtaattgctttactagtgatctgtataatttcaggtgtcttcatgatggtgaacatctacctttcacttccaagtttaagatacctttgagtgttgcttgtaggtcccgtctagtggtgatgaattccctcagcatggaaatgcagcctaccaaaatctgtgagatacagcaaagcagtgctaagagagaactttatagcttcaatatctgcattaaaaaagtagaaagattacaaattaacaatctaataatacacttgaagggactagaaaagcaaaaacaaaccaaaactgcagaagaaaagaaataacaaagtcagagccgatctaaatgaaaaaagaccaaaaaaaaattacaaaagataaaacaaaactagattatttgagtagacaaacaaaactgataaactaaccaataagagacaggagacaataaaagtagaatcaaaagtgaaaaaggagatatgaaatataaaagatcattagagaatattatgaataactatatactcacaaactaaaaaggctaaaggaaatagataaattcctggaaacatgcatcttcctaagattgaaccaagaaaaaatttaaaaacctgagcaggccaataaacagcagcaagattgagtcagtaataaaaaaaaaaatctttcaacaaagaaaatcccagtgccagatggatttacagccaaattctaccaaaggtatgaagaactaatagcaatccttctgaaactgttcaaaaaattgaggaagagggaattttttctaactcattctaggaggccattatcaccttgataccaaaaccagacaaggacacaatcacaacaacaaaactccagaacaatatcccttataatcatagacacaaaattttcagcaaaatactagcaaaccaaatacaacagcatatcaaaaagataatacaccacaataaattcggttttacaccagggatgcaaagatgattaaacatatgctgaccagtaaatatgatacagtatataaacagaatgaaggacaaaaaccctatgatcatctcaatagatgcaaataaagcacttgataaaattcaacatattttcatgataaaaccctcatttaactaggcattgaaggaacatgcctcaaaataataaatgtcatatatgacaaacccatagccaatatcatactgaattaggaaaagttgaaagcacttcccctaagaactggagcaagacaagaatgcccgcttgcaccacacctattcaacatagtactagaagtcctagccagagcaacaaggcaagagaaagaaataaaaggtatacaaactcgaaaagagcaagtcaagttatctttgcttatttaagatataatcttacaggtggaaaaacctaaaaattctagaaaaagctcttaaatttgataaatgaattcagtaaacttgaaggatacaaaaaagcatacaaaaatcagtagtgtttctatggaccagcaacaatttagctgagaacsaaatcaagaaggtaatctcatttacaatagctacaaaaataaatataaatacctaagaatatatttaaccaaggaagtaaaagatctttggtgaaacactgatgaaagaaattgtagatgacacaaataaaaaatatcccaagctcatggactggaaacacaaatatcattaaaatgaccatactttcattgaatctgcggattcattgaaatctatatcaaaataccaatgtcatttttcacagaattagataaagcaaacctaaaatgtatatgaaaccaaaaagaccctgaatggccaaagtgatccaaagcaaaaggaaaaaacctggaggtatcacatcgcctgacttcaaattttattacaaggcttagaacaacgtggtactggtataaaaaacaggcacgtaaatcaatggaacagaatagagaacccggaaataaagtcacatacttatagccaactggtatttgacaaagtaaacaagaatacacattggggaaaggacacccttttcaataaacagtggtgggaagattgaatggccacatgaagaaaaatgaaactgtcacaggatccttggggtgttgtttcgccagctgggaacctctgtggctggtgacgcttttgcctgagttttgctcgggcctgctgggctcgttctgcctgttttggcctggcaggctgcgcttggctcgcgctactggcctggatgtcacacctgacatgggtgagccaggcgtggagcagtgagggatgtatgagggagcgaggtggggtctggccactgcgcacagccaggcatgccggctgggggtcggggggtggggcagctccaggtgcccgcacgggtgccggctccctgtgaggctgcggctagaccaggcttactgcaagcagcttccatggctggcaccagggaacgcagtagcgcccagaagattggagatgccaggaaccgcagagccccaragagggtgtcacagcccatgctcgtcagtgcccaaaatccagagagggctgaggcggcaggggcctgatgtgtcagcactgccccaagagtgggcacagccgactgggtttgtgacagcacctgggcttggcctcaactttgctctgagatcggagagggcgccgggagaggccaggcagtgagagcaggcacttctgagcctgctggggcaaggggctgcttcccgggcccggagagtgcagagatgcttgggtccgtagccatggcttgggcggctgtagctgcaccccaggaggcggggaccctgcctgtccctggcccccaagagcacagaaatgcccgggtccgcacacacagctgggtggctgcagcttcacctgggaagcaggaggctcctgcccagctaactcggaagggggcgggacttccacctgttccttgcttcccttggctctgtggagtgcgcagccccctccccgcctcccccgctgcagcccgcgtcttcgcagtggcagctccagacrggcctctcctgcaatcaaaacggggccctcaaacaacaaaaacaaacaaacacggctcctatcccctatctctcaccatatacaaaaataaattaaaaatatatcaaagacataaacataagacttgaagctataaaaatactagaaggaaacctaggaaaaactcatttggatattggtctaggcaaataatttatgactaagacctcaaaagtacacgcaacaaaaatagacaaactgaacttaaacyaaaaagcttctgcacagcaaaagaaacaatcaacagagagagctgacaacctgttgaacgggagaaaatatttgcagactatgcatttggcaggggactaatatccaggatgtagaaagaactcaaataacccaccaacaacaaccccccaccccaaaacaagtaatccaattaaaaagtgggcaaaatacattaatagacacttctcaaaagaagacatacaaatgaccaataggtatatgaaaaaatgctcaacatcactaagcatctgaaaaatgcaaattaaaagcacaatgagatataatatgcctgtcaaaatggctattagaaagacaaaaaataccagattttagtgagaatttagagaaaagggaactctcatatactgttggtgggaatgtaaattagtacaagctttatggacaacagtatggagatttcttgaagaactaaaagtataactacaatttcatacagcagtcacactactgggtatctccccaaaagaaaaaagatcaatgaatcaaaaagatatctgcactgataggctcatcgcagcactatttatagtagcaaagacattgaatcaacttargtgtcatcaatagatgattgrataaagaaaatttggcatatatacacaatggagtactattcagccaaaaaaatatgaaattatgacatttgcagcaacatggacaaaattggaggacattatctgaaatgaaatatgtcagacacagaaagacaaatattgtgtattctcagtcataagtggacatacaaatgtagaaacatggacatagagagtataatgatagataatagtgactcagaagggtgacaggatgagatagagtgggtgaagagaaattactgaatgggtataatgtaaagtatttgggtgatagataccctaaaagccttgaattgacctctttgtgatggatgcatgtaacaaaactgcacttgtatcccgtaaatttacacaaataaaaatttagaatatttgtttggctcttccaatctagacccatatcactgatctttggtttcatctaccaatttatggggttacaaccccataattacatttgaaattacatttgaaaaagaaatgtaagttacatttggaaaagaaagctttcacctttatatagtagggtaaaaatcactcttttaatagaaaatatataaaataaaaccttttaaacaaatgacaaagtttttacagtcaacattactatatctaggaataaagttgaaaaatattccatatggaaatccagtcggtcaaaaattttggaagtacaaataataagtaaaatattttagtaagtgctagaaaacatattaaaatggcttatcttttctctaattctgactgcaggcagaaattacctttaaaaggkttatcaaatacaagtgatgtttaaaattagaaaattaaaaataaattccaatttcatgccaaagtttttaatatgcatattttgtgtagtatactagaatatctatatatgaatgtactctaaaaatgaatcatatgcctaagagagtaagcaaaascagacagaatgtctgctttcaagaacctagtggaagatacaaacatcttaaaagtcacagaagtaaatctattgcaatgataaatgcaacaaaagagagctatcaggatataaggtcacttaaagagatttgatttaataagctaggcaagaatgacttctttgaaaagggatagctgatctggaatgagtagagacacctagataaaaagaaagatggcatgcatagaaaagtatttagaatagaaagcatatgcaaagagcctgtggctgaaagatacaatatgactatgagtgactgatagattcaaatggcttgacatgtgagaataaggagtaatatgaaaggaagaatgggtagaaagcattccaggtagaaacaactgtctggatatatgaacatgctctgtaacaaaataaattatggaagaaatgggactgaaacttgtcatttgcgatggagaagagagaaacacaacagtgagatgagaaggctagtggaaggtaaggctagagagattgtggtcagatcatacaggacattgtaaactatattaaatttatgcctagtgttctaatattggaacgctaagcatgtgggagttatttatatcctactgctcaatgtcatagccaagatctgattgcaaaaattcaaaaaattgcaacctgaggcataaatgggttaaaggggttgcctttctccttataagaacaagaacttctgaaggattttaaacaaggcatgaatgtggtgggggagggatgttaagagtttccttcatttacattctgtaatgtgattcttacttcccttcactgtaattcttacttccttacaaggcagagtgaaaccccaaggtacaacacacttctggtatgctctcaattaatcatgaactccattacacctaatcaattcaagatgattcagaaggtacttgagtgccttgatatgcctcttggtcttggttgtgcatattgaaaatcaatagagtacgatagatacacgggttgcaaaatattggtctgaatcagtcatgacattattatatatcttaaaagttacttttctcaggaaattgcttctaatagcttgctgatgtttttttactaattcaaatgaggaacagaaatatttgacatttcagccttctaggtaaactttcgtttatgttaactgaccagtaagaaaattggtctggtatattttatttaaggtttcaagctctcccttgactaaggtttccttgaaactgaagtatgagtcatattcatgtttgcatcatagcaattaattcaatgtctggcattatataaggtcttcaatttttgtctattgaatgaatagaagtgaagttgatgcaatttgggtttttaaatatgttctgctgcagaggttcaccaattcttaaaatgtcaaatcaattcaatacatgtttaatgagctactactctgtacaaggtagtgctagacaagtatttataactgccacacaaatgttttaagatgctgcttctctcagacacagttttactttatcatgtgctccattgttcctcatggttctgtttaatacttatgagtagctatatatgatgtttaatgaacaaaaccttcatttgagtagctatatatgctgtttaatgaacaaacctttctcttcaatggaaaaaaaaggtatatagctttgtttctgtttcaaagatatttttattatataaaaatataatgggatatgggaaaaatttgtcccttgagcaattaccaattagcaagtactaaataatgatctaaataatttatataatatatttctctttttaataactttaagaagcctttgagaaagatcacaagttagacaacattgttcagggaaggtaaataacttgctccttgtcatggtgcataaaatatacagtcaataattgaacagaagaatctctgacttacactctatgctctgatccaattctaatagtggagctattctagagaaagtaagtgcagataataactaactctgcttcatttcctatggaaacacaccttactatgaaaataatttgatttggaggtttctttctattaggaaattggcacattgtaaattattcaatgttaactttgataaatttaaaaataaaaggtagtaggcttctggctatttctgcctatcagggtatggctgtgcctgcatcatattctaattttaaaaggccctaagtaaccacatagctattaaacagggtacattgagaaacgagtttagaattaagacagtactttaagggacagatgtgcttactttcagtgggagcaargggttgaaacaataaaaggtgggtgggagccagctgtggacaacaagcgtttttacaagggcatgtttctcttttgtctctgtgtttttaattctcttaccacctaattctctgcaaacatattaataagkatttgatataaatttttatttgatactccaacttgtccttccattttttgagcagatttaattttaatataccctaatgcaataaagcctatttatctgttaattatgtgtctatgtagtaaaataatgctaatgaatagtaaaatgcctacattaaaattggttagcttcctctcaccacattcaacaaatttttttcttgaattacaggtgttacaaytgtaacaatgttgttcaaaaaaaggaaaaaaataagtttttatagtagataatctgggctttattcagaaccttcaacaaaataagacttttcatatctagtgttgtatgctttatgacatggggctattatgttactagtcagggtgctgagttatgaaaactattgaaatgatcttattatactgaagctgctttacctaaattcactcatttgtaattcagaaatccaataataaatttgagttttagaacagtcatgatactagaggcaaatctgtttctctaagttgctaagtgaattaccctgaattgcataactgatttgtatggaaatagatgtaaatataatataaattacagctaatatatcttgaccatttactacatgctaggtgccttgtacgttgcaagtcatagaatttctatattttggtgaagaagagagaagaactatgcactcacctaaatgttaagtaatttctcagcaaatggaggatcaaggtttaacctcaagcattctatgtgtacctgttgaagatatgaaaagcatatgaaaccatgcatttaattcctcagttatcttttaaaatcctgaatgttgtatttttgcccttgtgctctcctaccctttcaatatagtaacaaaactgtataccttcatcctccatttgctgacatgcaagtggtgatggtctgactcctgaacatttttatgactcgtttttgttttgttttgttttgttttgttttttcacattagacttgcaggaccttctctttatccctagtaatttaaaattttttaacaatgtcccttaatctcagtctttttctttcattctgctagggcctccataggtttcatcaatgtagaaatatgtgtccttccaggggacatcggttgcagaggaggaggcatgactggggctgcccactctgtggagcctaaacaggtgggagccctgccccctactgtgttggccgggtgggagccccacgctcccaggcccagccctagctccgaatcgggacatccctgtgctcttggggcctgggaagcccccctgtctccgcagggtgggaagtgcttgtttctgctcttcctcgctcctggcgactgctcccatttcggagcaaagttgagacggatcgccagtggtgctgcaaccyagctgggtgtgcgcatgctcggcaaggcgcttacatgccagtcccctgctgccttggccccctccggacattgtgcagcaaggagcttagggagagatgccagtggatgccgaaggtagctccgcgtgggcctatttgcaaccctccacacaaacaacctgggtgctatagattgcatgttgattgcggctggaagcagacaggctcctgggatgaaaggggtggttccccagagaaaccccaccttcaagctagggacagccagaagcctgggggcaggatgccaattccaaggggagtcgtggcccagagtgagaacttgtgctttttctgggcccacccatggctgcccatgaaccaatcagcatgcacttcttcctttctgagttcataaaaaccccagacttagtcagactcagacagatgtggagactaccagctacaggaaggaggtacccacttcaggtctcctcaactcgttgggctgatctgcctgcagaaaggaggtacccactatggttctcctgagagctgttctatcgttcaatgaaactcctctctgccttgctcactctccagttgtccttgtatctcattcttcctggacacatgacaagaactcgggacccaccaaatggtgggactgaaagagctgtgacaccaacagtgctgaaatacaccctcccactcaccacattgcgggcgacgagaaggagagaagagctgcggcccttctgggagtccagacctgggggctctctgagtcaggcctgtgacaccctcttgtggctctatggttccttgcatctccaggcttctgggcaccaccgtgttacccgcatccagatgtgagtgcctgtagcagaagctcyatgcagtaaatacctctggtccagccacagccttgcatggaactggcacatgtgccggtgtgtggagctgctcaccctgccagagccgctgatgtgcctggctatatgcagtggccagaccccgcatcacttgcccatacaccctttgccactctgcacctggcttgcccttggcagatgcgagattcaggctgttagtgtgagctgagtgcagcctgccaagccgagtggacagaatgaatccagcaggcacaggcaatactcagggagaaagcgccgccaggcacagaggtttctggctggtgaagcaataccccaaggatcttgtgacagacggccctggaatctcaagagggaatttttttttttttttttttttggccaatatcatgattttagttttaaggtctgtaagcatatcttgtatgaaatgaaacattaggcagtttttatacagagcaatactaaacagaggatgagataggttttaaatagagtaatttaaaatcagtgaaagacacctctatatgagggacagtatttaggaaggagtaagttttttgagcatgtgaagaatttagcaggcctggtgaagtgggtagttcctttcacaaagaggatgaactctaagcccccttccactctctacatcagaaaatcccaagagccacagttggctcattctgagatctggaatttgggaaatatttgggagcctggccaggcacctgaaagttatacagtacctataagtcagactgtgtattccagtaaggtctacagtttaaaaaagtgttatgtatgtatgaccatttgtttattaccagcattttattaattgattttgaatgcaggagtgatgaagagataggaataccttccttctagcctacaagcagctttgaccttctattagttgcattgcaaaacagatatacaaggagcagatagcctctggcagaagaaagcaatttcttattatctcctgcatttttacagtgtccacttagtgattttgttttcttcctgatctaacctggaaagagctagtgtattttccaggtctacagtttcaaacatggagtgacagagatgaaagataaatatgccagtgatttcacagaggcttcagtcgtaactacttgttatttgtcttggcaattcataaagttcccatagccattagagtaatcatttacctttgctgaattcatggattaaggtgaataatgtgttcctggacaacagtcaatcaagatctggtctaagatcattaatttatgttgcctggctacagtgttcagaaagggtggctgtaatttaaccacttaaaaaatggctaaaggagcacccaggcattttctgttttggtgacctatggttgtaggagtacactgttactgaattgttgcaggtaaagtgtagtggaagatgcattacctaatatcagctaatagcaaaattagcaaaaagttacacaaaatcaaaaggagggttatttaacaaagtctgacaaaataacaaatttacagaaagttattgtagccctatattgctgaaaacaaggaagtcctgaaaaaaaggctgaaataatgtaagatttaaatgaacagttgaattacaactgctgttgacagatcctcatgaaacaaaaataaaacaatcaattttaaaataaatatattacagcatcctcaaatgtaaggagaaataaacttactctgcctgttacatgtatagcagtagacattaaaaacaactcttagaattcgttaggatttctataactggtttctgattaattgtggattacttaaaacctttttataagatttatttaattatatctacagataaatagatacacgtacttcattataaagagtataacaaggacagtattctcatttacatcttcagaaatgtattatattttattacagatgatgcttaatgactgattctggaaatatcagtgctggtatatatttgagcaagtacaattgaaatctgaagctaatgcagattgtagacacaaagcttggtttatgaatagaattctatggaatcatagagttctttagaaaaattaatctgttattcctgccatagagttggttttcacagggtccatccctacccaaatacagatactgggaccttttcattccacataaccaccattcatttaggtaccatcctctgagtcagtgggtttgtatgcatcctaggtcttggaaaagaagagtatagaacatttacggtgagtctcaataatgttttgcgtcaagaaaaggcattacttgtgctagattgtgtgcaggaggagtcttcactcacatgtggactgatgaactgtaaatgtagatatcctggctttcacaggactccctagtactagaacttaatgttactgggcagtctgcatgttgaatcagcacctgttcatatagtttccctcctactagtcaagttatttttctctgtccctactgacttcctgcaagattagactccatctaatgtttttgctcaaacttaccatgccactgacacccatctctttacccgagtgagatagagtaatctggatttttctctattcaccttccaacctattattttacataaaaactgcactttactttttttacagttttcatttcagattttttagaacacatttacttattttagtgaaatctggtattgcatcaaaacatgtggctcacttacccgagggtttggggagtgatttttaaacctggccacagagaaaatcatgtggagagtaacacagaaaagtctcacctacatcccattctcaaagattttgtttcaagtagtttgatggggccctgtattttgacatttcaagttgagattcaaataagcggacatggttgaagaatactggcttatagtacttaagagctcttttgaaaatcttaacattgacctatcttgtagatttgttgcaaactaaataaaacaaaacaaattaaataaccaatgaaaaatgttgagcacagtgcctagcaccaagtcagcaaacaactagtgatgatgatgatgatgatgataatgatttttcttttcctttacaatgatactaatactatttctccttatggtaatgtgtatttgaaggatttgaagactcttctactacaaaggtgtagtaaggtgaaataacgcacaatcattagtatttcaattggtttttcactgtctttcatgtgtaagcattcatatgtctgaagcaatgttttgagcacagaagattttatatgaataacccctgttattggtataacacaaagtggttgtgttcatatgctcttcatcaagatctgaattcaattctaagtttctatgagactaatgttgctccaaacttgtcaagatagagtcggtcattcttgatttgatctaatttgggttacatgagacaaaaggcaagaaaattgaagtgaatgaaaaaaaaatgccaagtggagttgtaagattttatattaggaatgaagcaaaatgtatttataagaaagcaagtaaagtgtccttagttaaggagcaatatgaatacacaaggtatccttgttcagagaacacggtaaaaaacaaatctttctattcattgaactttaggtttgttacaaaggttaaccatgacattcaaaggaaacctagtcaaataagcttaagtttatgttaaattggggtatctttaataagtcaatgctttcactttgcatttaaaaacaagaagctgaatcactaaaatagyaatagcttcttaccttcatgtctaagaatttgtatttctttaacatagaagcaggaagacttttcttcatccttactaaatcattttctctttctccagagtaaaatttactgatgcataaacatagttaaatatcttggggctatccattctcaggaaagaaaggtgatatggcctaataattctaagtattttcaaaatttttatctgcacagaaaacagaaataaaggtactatactgaagctaccttaaatagatttaaggtagacatagagaaaaaaaatgacagtgcagatgagtaagtatagaaaaggaattcaagtgaggtcaataaataaatattcttatgaggtttatatctagaatttactagatggaaaatacaattcctagatctctcttattgtaacagtgagttatcattgctacataggcgcagttattttgaagactaactttgcattttttaaaagcaacataagactttgtagaaacaaaataaaaacaatttattataaatagactaacctctgaaataaatttgggatggaacatcggaatttgtgctagtaaaaattcaatgttttaaagttctgcctttttcaataattgctgcaggaactttttaaagttcctgcttttcaataggttttaatagatatctatctttcatggcttattcttctaaaactgaaaaattacctaactgtgatcattcatatacaaaagttatctatatactttacatattatattttgttaaatgaaaagggataaactagtgtattaggtgttggtgcccatgtaaatagagctgccaccttgtggataactaggtagtgggccactcaatgttgcaagatgtagtaaaaaaaatcctatatatacccactgctcaagaggcgataataatgttcacaacagtttcaaacttctttaaattcttaagttctgcctatcaaactatcacctgtaggacatgttcattctttctgaagttagtaataaactaaaccttattaatatgtaggttgggaaacattggagaatggtttatccagtttaattagcctctagtgctgatttgttttgataatacaaataattagtttaaccrcaaaattgatgtaacagaaataattgtcaggcaattaaatattgcaatgatttcagctcctgggaaatatatagtatgtaagtaccacaataaaattgagaggtacttggcttaaactacaaaacatcttcaacttgacttgtcagaataattttattgattccattttcttcatattagaaaacatttactaggccgggcgcggtggctcactcctgtaatcccagcactttgggaggctgaggtgggcggatcatgaggtcaggagatccagaccatcctggctaacacggtgaatccccatctccactaacaatacaaaaaattagctggacgtggtggcgggtggtcccagctactcaggaggctgaggaaggagaatggcgtgaacccggaaggcagagcttgcagtgagccgagattgtaccactgcactccagcctgggcgacagagtgagactccgtctcaaaaaaaaaaaaaaaaaaaagaaagaaagcaaacatttactaatatacatttactgagaatgaagcttaaattgatgtctatagagtgttttgccccctcatattaaacttttacacactattaaagttaaaatattttatattctctgaactcacaaatgctagctggccattttagttggaggaatgtaataaataatgagacaacgttggtaaattcattctcaaatgcagtgtttgtyattattcctttatgaaattagagctatatgcagcattttacttttccacatgtgtatattaaatagaatattcaagaaatgacaccatccttttatttttcttgtagtttcttaaagttttaacatttttacatttagaattttttttacattttgtaatcaggttgtatttcttaataatattattttagtatagtagaaaacagttacgtgtcttattatcaatgttcacatcacatacacactatcttatttttgaccttaacccagatacatgtgcagactgatgtccaagtatcatcagacttttttccaaaggacattctgaaaataaattactgaaaggtcttgaagtttagtatctctacttttccaaaagaaacaccactaaaaaatcacaaaaaaattttataaattctactaattattactttctaatgatttctccccactgtaagagaatatatgtatatatattttcttctgtccttatgtataaaatatactttggagtaataaaactgatattcatatatgaactattatatcctgtatttatctgaatgttcctgagtgtataratgtaattatttaaaactaaaatataaattctgtcctaataaataaatacaaaatttgaagttgacttaatgtatgtgataaagattcactcattattctagtccaacgttagtatgaagtatttctagtacattatcttttttcctatcaattttcctaggaattaaagtataagccaataattttgttaatttttaaacaattcaaattttaaatatgaaattattttcatatgtaataagtgtatgtccttaaaatactaagtaattcattagagactccatcttgtataatatttaagcattgaaatctatattcttaaaaaatctcactgacatattttaataacaaaaaccagctttctttactaggtaccttattcacttgtaaacaaattttgtgtaggatgtgggttattgatacaaaatgcctatacgttgatacctgtggaaattgacaaataaataaatgaacaaacaaacaaaaatgcctgcagagccctaggagtatttaagtttcccaatctttatattgctgtatttctctaggcacattatatgtggcattctgtcacccaaayaaatgcaaaacaaataagagaggttatgatttctgtgcactaaaatcaccagaaaatacatttgtctttaaaaattaactgaatgtagatagatagatagatagatagatagatagatagatagatagatagatagdttatatcctgttgcatgtagaaaacatgctgaaattattctgggagggttaaaactccaaaacaaacaaacaaaaaaaaaattgagtgagtcagtgttataaatcaagttaatttgcaacattatttttgagttgaaatattaagggtttaacatatttatatcattattttgagggcaccaaagtaactctaaattttaaatcttccatgtgtctttaaaatwaacgcatttgattgttttcataacaacgataatattaattatatcttatatttatgtaatactttttattttatataacaagcttctatgcattgtctcatctgatccccatatctttattattattattttgctgtatgtagcattaccactctcagtctatacataaaagatgctaagttaccagagtttttacagatagtaagtggtggagcaagaactggaggatgaatcatttcaaccctagtctagaactcttgctcccatgtcacatgctaactcgcttctcagagtaatcaaataaactgactatcataaaagtcagaacttgggaggaaatgtgaacatatgaaagtgtattttcatatattatcaactttttgaactcttattgaggccattgagtaaaaataattttctgtcactgtaaatgcagagggaatgtaacaagtatttgccctgaatccattattcagaaataaatgaaacagcataaagtcatgcaagtgcactgttggtgactttcctttccctaaagttggggtggttgaagtgaatttccttgctctttctccaggtgcttgtactgttcgcatgctgagctgcacagctttcaaagggcttgccctgggatatggctgggctagatttagaaggaactggtcattgaatagctctggtaattcttgcatctcacagttatgcggttgacagctcctttcagtagggaaagcttgggtatatttcaaggtgattgtagttttgtccctctggcagcaagctgctgcaaccagcttagcccattatcctcctctcccactggatttaagcctggggagaaatctggggcttttgtcaagatagaaggtaagagatggataattattccctgtgtgtgctcaaaaagaacagcactatatcatagagtagctttcaattactgaaatgggattgtctgaagttccagtggcttataaattactctttgtaaaaaccaatatttaacattattgtattagtgatgtgcttttaatatctctttcatgtaatatcatgtaataaactttaaggtttattacatgaaactttgcaaacagtgtttaacactcagagaataaaatgcatttccatttttgtggttttattagaagatttaaaaacaaatggctgctctgaaaaaattgattaaaaacttcactgtacaattgactacattataatttttctcaatttgagtttcttaaatctcaggggctagtactgtaaaatcaaygcaaagtaattacaaaatttaaaattccagatgttatgattacatacatcttgtcctttaatatccattctgtcaaataccttttataaacactgctacttaacaaaacacatttggaaaataaaattttcactaattctgattaattaattaggtaaatcagtcttagcatawttagagggcagtattttcagtttgtgatcmcccaggagctcaacattactttcactctccttttaaaggcagaaattatagtcagaaatgtgcatttcaatttgtagctgacagtttagggttaagatatgattccaggtaacagaagccaatgagagtacacccagttgatgtttgtgacatcatcttccagtcagagtacatagaacagctgaggtagcgttcagtttcagcacagtgccattatgatggatgtttacatctcttcattgagagccaattatctcgcttttgtgtgaggcccaaggatcactcatgcttccaggctgcacagagcactgttggatctagctgaacgaattgttttctctgtctctggtaagggcttsttctgttttaccttctcttttaaaataaaggtagatgtgtcttacagagaaaatattataagggtcaaaaaggattactatctggtaagcttttattcaggaatgtttatcattatttaaaggactatggagttagcaaaatgaattaaaaaaagagcttgctaacgtgtacctgacaaactaatttgcagcagaaaatgaaaggcaggtaaatccggcttcgctttagaaaaaggaaaatactgctattataagaccacaattttgaatgtgtttttaaaactgtatatgtgtatgtatatcattctgcatcatttctctatatttttctattagtattaaagaatagtggtagaaatggtcaaccaagtagtgttgctgtagacttaaaatgagtcaaagtttctaattgttaaatggcagttctttgggacagttttccaaagttgcatttatacagggaaaacaaagtttaccaagtgagcaaaggctctggcttctgaaataaagttgtaggactttacattcatatttaccatttaaatatttggaaataataataatgaaaaattttaagaatggatgtaagggtttctttgtggaattaagagatattaaaatcatttattgcatttttgttatgctttttggtgcataataaaatactgtctttacatagccagaaaatatttaaatcctaaaaatatatctttatattatttaatcatttgtcagtagtaacatttatgcctgaggatcttgttatattgtagcaaaacaaatatatttagagctgttgaactgctatggataggtgattgaatgtgacagagaacctgaaaagtcactacactaaaagctttcaattgactgagaatgttcacatgataacaaatgaagaattcaaaaacatttgtatcccctcaaatgttgtctattattatggtataaagtagcatactgttgttattttaaagttggatgcagttatttatgaaataaagccacagaaaagtgtaattaattgttattttgtttaacgtgctcttttattttaatagcatctccattcctcctagggttataaaacttttgaataatggcttgttcatcaagtgttgatgtgcttatgctttttagatttatttttactgtgcctttaacatagaatatttctgcctttgcaaactagtaattttgataattaaaactcaggatttggagattctcgagttgagctttaagacagcaggggtttttcagctatgtcacactctgtgtcttctgctagcccagtcctgtttggcagctctagacattactgttgttcgaattgtctcctttagtccattcaggtctgaacaaaactaagtttatagacagtgtcagaygtgtattaattaaatctaaacaagtgagcttaatgtctcagccacaacaatacgtaatcaacaaaacctcaaaaagcttccaatatacatctagagtcaattttttgctgagaaaaatttaagttggtatattctgtgaatttcaaaatttaaagtgaaatctaaaagttttggataatatgagcttgaaagcatgagtcactgctttgaaatgaattttttttctttccctaagtactctatagtgaagttgaaaaacccagtggtactgactgtgtcattttcacaggtgattaaacttaactaagggaaaagcatttgtctcctaataattaattctttaaaaatctatttatatcattctgtcaacaatgaagaaaatcttattcagctaatgaatgatctagacatttaaattgcatttttttctgtgtatgattccttctttcagtattagccttgctagtcacaaatgcactacattgatggtgactgcagtgttaaattgcttatctccttcttttcctttggacaactttatacaacgcaagtacacgagatatgagctacctagctaatggacttcattcatttcacaaaaagttttttattattatttttaatttaagagaggacatcaatgatatcatagcaatttcctatgccacaaagtccctaggaaggcttcccagtacagggtgacataaataaatgatgtgtgatgttacttgtactgccctattctctgcctccttttaaatacatatgttctttrtctgacttatgtaaccagtattaagaagagatggaaaaaaatagccatgaaaagatacttattaactcttctgaagttctctgcatactccatatgctgggggtgatatattttttcttttgaaaatgactcctcaaattatgtttttacctattgcaaaataatactcttttgtatattttaacactttcctagaatttagtttattgtaagcccctttattagtttcatgtaatgattgaatgcacaatactgcttggttttttagtttctcagttcaagcacttgaatgatcatgaattctatgcttgtcttgacagtgggaaattctgggcattccaggccaactttttacttaagccaaaaaatatagtaactatgatgtcattttggacagcttggacttattgtgtgaatgtctggatatttaggtgtatattttaggtacataaatgtaatgtttttatgcattttaaagtttaaaagatctttttatcaaccttgtgtatatatacaattaattcttaacaattgatatgtgataaagtaattgatattatgcaactaaggaaacagagactaataattcgtaacttgttgccaaagatcacccagtcagtaagtcagtaaatggaggagctaggactcagaaacaggtttacaaatttcagtgccccaaatcaatcaatttctctttctttctttctttctctttctctctccctccctcccttaatacagccggttatctaatcagtcacttctcttgagtatctacttcgtgccaggcactcttctaggtacttggcatttataactgaacaatgtaaaaaaattcttgttgttgcacatattattttttttctacctgaaaagctctcatctttaatttactataaaagtagaatgtattttaaggtgtggctaattaaaaccaaaaactttatgggaaataggaaacataagttaaaggatacattcatttgcatttcttgtgtttctgtgtgtctctaagttctcaggtatgttttaatctaaaatagatttttacattatatttgggttttgtgaaaagtctatcaattattttataactcatacttgattctgaatgtggtcactgaaatattataagaataaaatagcttgtggtagatatcaaaacagtatcaatcatttttggacaaagttatcttgtatttataatgtatgttcaagcaagctagctttatttttattgtctattttacaatcaattatttgctggtaatagtatgccgagtttacagttgtttgactttggacaaggttctttatagtataagtaaaataataaaaaatgaagaatttttttattttaattaaaaacttaatatctcccaaatgatagtagtttgtgtttgaacaagcaaactagagacaatttactttttaaggccaattttttcactgtcttggtagctactaatgctagttcctaggacaatggcactaaaaagtgatatttattcgctattcaacttatttacagatactcagtgatttaaaagaaataaaaagcctaaaatacaacctcctcagagaaaaccaatccatacgtagaacctatcagttgaagataaattrtttttagatagtatcatttaattagccactgaagaatctgtctagtgacatacatataaattgtacaacaaaagttaactgaacacacttgatttggctcaaaatattttactgtggtcctattgcataataataaaacaatagccctgaacttagtccctttagtaatgcccatttgaagtatgcagaataagacagtaaaattagaattcaataattgaaagtacgaatgtgattttttatctgctttytctctctgcctctgaagctatgacaaacgaatgtgcccttttcaggggttaataaattatgaagacttttccacttctttcagagttagagacagagaagcttgttcacattcgaactgcataaaatgaaaaaataatctagagctattaagcagtagatgtttaatagcactaaaggtactgggccttgggtttagctatttttaacaacttatatccatgaattaattttaatagtgtttttgatgagaaaatataaatggacaacagtactttttaatgctaaattctgctaaaagcagagaatttgttgttcagtgtttgatactggtctcagtggcatggaactgagcatatcataaaggttgtctaggtaaattttcacaagtaagtggctctctacctgtgtgccatggcacaccataaaactctcaagggtatstcctaacatttgggtcaatgtggaaaatgcattttgcctaaaactgagtatacatattkgtgctgcagtcagtcagataaaatatggagctgagtgaaaccaataatatggggaagaaaatgacacaatttgctgtgatgagaggcaaggtgtaaagttaagttccagcaacttttctccatttgaagtacagaagaggctatgatcatgctagaaaacactttttctcagcagagcaagaaaagagcagatgcttttaaagacactttcttttttgtttgcgtgcacttgttgcatgtaagaatatgcaataagtgcgtgcaaattgtattcaggtagtctgggaccaggtgtgtctaattaaaaccaaaaactttatgggaaataggaaacataagttaaaggatacattcatttgcatttcttgtgcttctgtgtgtctctaagttctcaggtatgttttaatctaaaatagatttttatgttacatttgggttttaaatgttgacttttaatatttttaaaagtctgggaccagactaccggaatacaatttgttgttccacccttttcagtcttcatgccttcataataaaaaaaaaaaaaaaacgggaaataaaagtacctacctcgtaagtttgttgtgaaaatttcatgaactaatcttataagcatggagaacagtgccttgcatatagtaaatgttcaattactattgcctctctttagtattttcattgttttcattgttactgacttgcttagtattatgtgkctgtgtcttttaattcattcaggagtttcattaaaaattgctattcactaacatgaaaactctggtatagtacaaacacaattttgggaaccaatcatactaattacttttgaaactagatgctgattgtagattttgttggtaaacacgggttaatcatttactgcatataaaacttctgatgttttaattttaactattgtaagataaaaaatgaattaaataacttttaggaacttttctcaaatctaaaatgatataatatgggatatcatatacatacaaatctaagtacgtaataaaatagaaagtcttatagctttaccttttatcttttactctgttttactttgctactttttattctatgatttttcataagtcaatgagagtttcaaacctggagttatgaaagttttatttgtctgatatatgtagagaccaacagtcygcttttcaacagtccattgtctcatattggtgatgaagtggtgatagaattgagttaaagtttttcagttcttctttactcatgacgttctgtattcttaacatagtcattagaggcaaagtatgtttttattttaaaaatctctctctctctctctctctctctctctctctcagtgtgtgtgtgtgtaggttgcttgtttgttttgttttaatgaagcatctaacatgtacttaatactacctcaagagagatacaaatagaaaaggataaaaaatgtaatgtttaaattaggttattcttccccactgtttataatcttgtagaatcaaggcattaatgaatgtgtaaaacattttctaaaaatctattcattccactaaggtattttcccttcacttttaagtgctctgactcattctacraattatttaaagctcagccactcaactactgagcacttatggcatgccagcagtgaacagagcaccaccactgctctccaggggttcatggtctagtgaccaacacaaagttggaaataaataattacaatccattgtgataagttttacattagagatatgcacagagtgctcaggggacacccacaaggagtgatttattctatgtgtaaaaatctggaaaatctttaaaaataagctgtcacttagctgagttttggaaaattagagactttttcasgtacaggtgggcaaaggatatttcagatagagggacctcattaagaacaaagtcaaaatgagaagagaaagcacagtgtgttcagttaaggtcaagttgcttatcataagcaaaggcaggagtgagggagagctaaaaatttgcaccaaggtatcagaacagattctaattgtaaataaccagtaaggacaactgtcataactgcataactttaatccttggctggatgtttaaattaggttattcaaattttaaatactctagaagggctgtgatgagatggatcactgtggttttgagaaaatgaggaatgcttcctaaaagaggtaagaagcaggattatttggcacyatttaaagcagtctgacacatcaaaggaacaggaatggtcaacacattctacttcattaatttccgctaactttactaggtatatcaatctattaagttattttaaataatggataatgttggatggggtgattaattactcaagaatagaaaggtgggtcacacrtgacataattgagaggaataccagagtttgggaaagagtttctgaagtcagtatttattcactatttatgaacttgagcaaacatgaactagggataggaagtgtatgatgctgaatgacaaaatgctttactattgggctggggtcagtgggaaaatccagggaaaggaactccccttcttatagaataactcagttcattgcacttattttttaaattatctgaacaacattatataaaagttatatattaaataattattttaaaagaaaacaataagcattgtgtcattcttttcttggtgtaaaattttctcaagtggcatgtgatttacagtgaacacaaataaataatgggggaagatggaaagaggtgctcagcatgggaacagagcataacactagctagtttcacagctgtctcttaggctgtctcccagaaatttattctaagtttattcacttatttcatcatggtgagattccgatatatttagatggtatccaaagagaattaggctttatgtatgaccgctcccatctacaatgttataggcattctgataggtggcgaagttacataaggatggtggtggtggtgtatcaagaaaatgtgtgtcatagcagagcacaacaggcaataggacagaaaaggcatgacagaagaggcaagacaattgcctatctacttggaagggaaccgcttctcacttgcctgtatctttaatattaactctcagagcattcttgcataagagcgtgcaagtgataactttggcatgagaaagagaacatggttctgagggtagaaaataggataaactgaggggcattagggaggtggagatatagaaaggtaaatatttgggggaaagaacaaaaaaaaatccacagacagggttgtagtcacaaatcatagagggtattttactctcttgaggtcaaagattctccctaattcttttctgaatacctatggcctagcaaagtgctctgcagaagtttgctgaatgaatgtctggctgcctgagagaaggaaggaaggaaggaaggaaggaaggaaggaaggaaggaaggaaggaaggaagagaaactaggttctttctttgtgtactttagacatgctatgcttgagatgtccactaaagagcaaataagacatgtaggtattggttatcaagaagccttaggaaattcctctatttaaaagtggtgaagaggaggaagaacaaacaaaggagactcagaatcaaagagcctttgaataaggaggataactacatctagactattaaaacttcagatcaggaaggaaaagatggtgctgagggtagaaaatcctctgaaacctctatgcaggaaatacaaatctgaacatgacactcctttcccctcttccccataatcttccttccattcccttgtgacctaaaactcttcagtggccttccattacgtacaggataataacaaaactagtatgcttcataaggcccagcatgatggtctstgtgttccagcaacatttactttcttttcatctctcttacaatttcttcttcagttccaccactgagccttagtttatgccattctgtctggctagcaggttcctctgaaccttttccacatgtttacttcaaatttattattcaattctcagttaaagaagcacagccttaaggaattcctccttgaccttcctgatgaggccagatatccctattacaggttcttaacacagtatttaacactttcaaaagtttccattgyaggctttcttggttgattaaattgttaatgccagtcttcccacgagactgtaatctttatgaaagtaatggccagagtctactctgaatcagcactgaacctccagtgtctggagtaaggaaatcagctagatatatatggtcaagtgaataaatggtgtgagtaaacagaagattgcaaaaagtgtatttacacctgggaacaacaaagtactgagatgctactgaatgttaatcatagaaataaaatttgagtggactttcttagagcataaataaaatgcatgcccatatctgcagcctccttcccactaatatgtgtgtaaccctataactaattatataagtatttaagtaagagaacagattgtgcattttgagttatgcacagaataataaaaaatattgtatcctaatggtcatttgtaacacacagatagttgaaggatatgaagagatacagactcatcatagaaactgtgtatgtgagtgtgtttgtacaaaacttgtaccagggtataactgatgctactaaaactagaaagaatgtaattgagaatgtgatgtcccatcatatgaaagggtgcagaaagtctcaaaatatagaacaaagaaaattgcactttaaattgcagggaaggtcactggtggccttaaagaaagtagtttgagatattagatagcaaggagtccagcaggaaattgatacttaggagttgaagtcatgttcaagcaatttacaacagaaaaggaataaagacttgctggtcagaactgtcaaataataaccctttcaggaatggaaaaagttgatttggtgggcagatatatgaattattaagtaacatttacctttgtaaattggccttcataacttgtacaaaacgtatttataataaataaagtgtttatagaacatatagctacgtttaaaaatttcaagcacagttagaacaaaagatagcaatatatccaaaaatatagaaaattgtgggagtcatttactcagcagttaatttattcttttaaaatgactctttcagtagccatttataagcatgtttatagatggtaaactgttcatgagtgtgtaggcaaataaacaaagaaaccttctggaatgaagacctagactctctagaaggttgcaggatactctaagaagcaatggttgacgggcgcctgtagtcccagctactccggaggctgaggcaggagaatggcgtgaacccaggaggcggagcttgcagtgagcggagatcaagccactgcgctccagccttggcaactgagcgagactctgtctcaaaaaaaaaaaaaaaaaaaaaaaagcaatggtacactaggagatattcatggcctgctaaatagaagagctcttaaactctaagacattggagaaattaactgaaaccaaaagagagaaaggtatattttagacacagcttaaaaatcggttggattggaaaatactactacactctaatatataaatatgaatgtacaattaatgtgtatgtatatacaaattattttaatttaaatatgtaaaactgtataatggtgtaaacttttgttttaaaatttggctacacattgagctatttattctggtagctctatgatgattatagatttattctcaagaaatttttgatttacttagaaaaaaatcactttaattratttgttcttgttgtagaagagggcaagatatttttgaataatctaaagaggaggaaaattatattctacctctttccaaaatagtttgaaaaacaaagtaacaggatttgagtactaaccctaggagctaacatggaaggaggactgggatgcaccatggcttcagagaaattgagatcaaaaggggggttttgaaactggaacagttgggcacaatactatgcctaggaaacatcacagccacctctatgtgacaaagatactcactcagaaatctcttgtattcgggctaaactgaagatgactagaccctagaaaccagacagaagcacagagacccaaaaacaatttgaggatgcccatggggccaaaatataamgaagttcaaaaaaggaggcagaacatggtgtctgatgtctgataggaggaatctaggcaagaagactgaactcagagacaagattgtagtttccaggaagcctagaagggcagaaccttaatctagaaacctggcatgctaacctgggacccagtaactggaggagacctaattgctcctctctgtttttggcaagagaactcgagggctggacggagtgtctgagatcagggagttgtagaaccttggtggatttctacccataggatgagttggtgtttctattagtgaagggtagatggctgatctcaccatttggtgtattttttttagtttagagtgggccattatagtgtgggcttaggagtcagttggctaggcattaattcctggcttcccacttaaccagtgttgtgactatgagcagagaatttaacttctctgtgccccagttgcctcatcagtgggatgaagtgaggatcaaatgagataatgcataccacccacttaatactgcactgacacagtacatgctggataaatgctgtcccttataattattattactcacccataaaccctatgcttcagttctgctgctcctgaaactcacctctgggcattggcacatgttctttctgtttgaagaactctgctatgtcaattccttttcatcgttactggtggtgtttggggtttcttcctagaacctctttgatgagtgaggtgtccctcttttgtgctcatagagcattttcactttccctgtaatgtatttaaattgaccattgccttctctgtgtcccccattagcctctaggctttatgtgttttgggattttataagttgtatccattgctgtatcagcagtgctagcrcagagtagaagctcattaaatgctgattaaatgaatgtatgatgagagaccccagacttagatccctttagggagccataatctgaaaggatttctctattagagtttaatttggggagctctattagaacttagtggtagagccagaactagaaggtctgaggtgagagataaagctacttttagaaggaggcaatgaaacccaccccttcactaatccctgtctgtctcctgccccaatggtgttggtaaaacaacttacatcctgagagtttctgacacagccctcgagctgctgtggcagtcaccatctttcctaatctaattggtaaaaacatgcctggagggtagtcagcaaatgaccgcccagcatcattaaacagtgcaaagcattctagaaagtacaggatgtgtgttgcttatgtgcgtgtaggcgtaggcatgacctaggcaagatgctgctgttcttagtatttataagcatttctcttgcatttctttcatcttaattcacttttttaccttagtgagaaaaatgacaaacaccaccagcagcagcatagccttagaagtcacaggggcaggctgaatatggccagtcttttctcctcctggactcttctcactgcatgaaaaatgtatttgttttatattgctgtgtaacaagttaccacaaatttagatgcttaaagcaatagacatttattatcttgcagtttcattgggccagtgatatggacacagcttggataggtcttttattcatgggtctctggaggctgcaatagaggtgtctactaacctttttttctctctggagttcagggttcgttttcagacccaggtagtttttggcagaattctgtttcttgcagctgtaggatggaagtccctgttttcctgatggccatcagtaggataccaccctcagaatctataggccgccttagttccttgccaggaggctctttcatgggcttttcataaaagtgaagcttacttcttcaaagccagcaggagaatctcttgtttaagtctgctaaaatggaatcttacatagtctaataaaatcatgggagcgacccatcacctttgccttattctattggctgtaagtcacaggttctgcccacactcaaggggagggaataagacaagaatgtgaatcattgagggtcacctcagggtgtgtctaccacagggaacaatcacagaacattctcagagacctctaagtgactgtcagctgccactgccaaatcatttgttagatatattttattaatttccctaagtttgcaagtagcagagctcacccaacaagaataattttgattgagaaaaatttgtcagtaaccaagaaaaattgattattggagccagatgagatggccagatgcctaccctgtgagctcaaaaagaaactgtaccctcatgtactcattttgagtttggagacctggagaaatggctgcagtgtttgccactaattagacaatttggaaagagtacatgttgggttagaaacccctattttcaacccattattgaagaagaggaaagtcaagagtcacattgcagattttatcacttggggccaccttaatgttaatctgcttaaaaaagcaaaatatctaaaaggtgtcttgttcctgggctctgttagtagctagagtcagttcccttaacttgcatcgctgaaagttctgaagagccrttagagcccatagggagctgggaggtgtgtgttgtatgtgtacatgtgtgtgtatatatatgtggtggggagtgggggattrgtgccttatgcatgccattgtataaaggtaaggttggatgggacagctaggttttcagccacccccttcctccatttttccctctcttttattctttctatttgcctttaaagaccctattttttctactctaaagtacttccccggacaatcaaataaaatcataaaatcggtaaaggctcttgaaactttagtccaaagtcaatgtgtcctgataaacagaaagtacaggatttaaaaaggagtcattacatgtgaaatattcaatagaagaaatagcaaaaaagatacttgtttaagggtccrtgcctattcacatggacaaagtatcaaaataaaggaatctgagaggtcatttaaataaatgaaatgatgcagattcaagggaaagatagattgaacctgaggcagtatctatgtttaccaaatccagcttcgtggcgagtgagctgaaggggaatgtcttacacacctttgcaytgcaggatcctgcaaatggagattttttgtaacgcgttctctggagttagactgaatgggtgcagctctataatcaatgtctgcctgttaactgcataaaagggaacttgttctacttgaggttgaggccctaggcagaatttaaatctcactccaaagcccttaaatattttcctagaacctcagccatgtgaaggtccccagcaaagggaggcaacygggcagtgtgattgtatagtgaaaagatggaggttgccagtagagtgtggataacttctgagacactgggaggccaccaaaggtaaatacagtggtattttctcaatttccccccctcccctagtctcagatgatttgagagctggattggcaaagcaggctcaggcaaggctcaggaagagtggcttattgggccaagtcagacaggtagtgagtatgaagctaaaggcttgtcagcattgtcagaccaggccttttgacacatggttaaccacctgaagtgaaggttggaagaagttacattgcattttaggaggcactttataaagtgctttcccacataaagcagtcaaacaggtctagtatctgaggccagcctgcaatcaactgctgctaatacactctctactgatctaagcgatctttttcctcttaggcgagaccactctgctccttctagactttcaagaatggtgtcatgacccaatctacaaaaatgtcagaacccaaacaatttggagcagtaatgaattacaagctatcaaacaaaataatgaggtatcaaattataagctatgaaacaaaataaaatttatgagcccgtaataataataaagagttagtaattaggggaaaagagatgatccttttttacattagaattcagacagccagttggaaatgttagagggagagatacttggaaaattgtcgttttgcttccgtagtagtaaagatgggatgagaaaagaatcaccaatggatgctaaatccagggactaattttattgtggggcatgatacatgtatagtcataaagtgactttccaaggacttcctattagtttcaaggaagaacaaaaataatcattactgtggaaaaccagaaaatagttaattgcattttttaaattaacattatcagtgagggacagatgratattatgtacccccagatttgtttcccagataacaaaatcacctgtgtattatttttttgcctggaatgcataatttaaaactaatcatgaacgtcagacaaactgaaggtgaggaatattctgtgagagtggggagattgtattcttcaaaattatccatgacattaaagacaaagaaaggctctgatataattcaggttaaaaaaagctcaaaagaaataactaaatgcaacacctaattctagacttggtcccatactgaaggggtgaaaaggcaaacatttcaacaggcaacgttgatatgcagccatgtattatttaaaattatcatatcaatattaaatatgttgataattttaatgtggtaatataagatgaaagagttattctaggcaataaaaatacaaatatttaggagtaaaagaccatgatgtatgcaacttccctcaaatgattttggaaagagagtcaggggaggggctggagggacaaataaaaggattaaacaaatgattaaacaataacataaaatattcataagagcagaatctgaattttggttaaaagtagatgaatgttcctcattttttttaatttttgctactttgtggtaaatttaaaattatttccaaatgaagagtttattttaaaagttatccaataaatattgttgttaaaaacccacaaatgtagaacagtatattcattttgctcccagttgttcaaaaataaatagaaacacaaagacacacatgttcattaatttacattaaattatatagaaagatagattggatataaaaaagtgatagacatttgcctctggatcagggcatatatatctagagaggagagatacctgcttttcactgtgtaactcttttgcgatgtttgaataaaaacaaaatacacatatatatatatgatatatatcatatatatgtgtgtgtatgtgtgtgtgtgtgcttttgaaatgaaaaacaaagcacatttgatttaattcaatttcaaatatatttattaattgctytctgcacattagaataggcattagagatataattttattttattttattttattttttattttttttttttattatactctaagttttagggtacgtgtgcacattgtgcaggttagttacatatgtatacatgtgccatgctggtgcgctgcacccactaacgtgtcatctagcattaggtatatctcccaatgctatccctcccccctcccccgaccccaccacagtccccagagtgtgatattccccttttatgtctcctttcttccaggagcacrtgttccactgagaagagagggataagatcttttaatcaataaagaaaagtaaaagcattaaaaatgccattattagagtaaagtaaaagaaaaagaattataaaacctttgttgtatgtctggatctcccactgacttaattgttatagcttacctaaaatcctttatactttatttttcaaactttataaaaggatgaataacatttctcttcctactttccacataagaatgctccaaggattaatgggattgttttatgaagatttttgaacttcacttggaaaagatatctgaaaggatatgaaatgaatacatattaattttaattgatattaattttaattgtaaagcatgcttctttgaaacacatttatgcgtcagctgaagtagacagagagagagagagagayggctgtggcttcttaaattaatttaaggctttcttaaatttaatttaaaccttaaattaaatttctgtgtaatttggcattttacagcaaaagtagtcatgttccttcctccacgagctttcctaaataaaaattttcatgttatcaaagccagattcattgagacatccaaaagtgatgactttgggacaattacttgcagttactccactgagattgaatccaagtgtgtcatggtctctgacaacctttttggaatatacctagttttaataatgcagttgctattacacatttcctaaaagtaaaagacaagaacactcgccgaatgccactataaaaaaaaagttaaaatattttttgcagaacggatcttaagggtcaccctttaatatcayaaaaggagaaaattccaagtttgatgttaaaacatgagtcttagattttcatatggtaccaaatattactgtttttatagaatactttttaatgtgattctgatagacagccaaaaaacccatgaggtctactagaaatgaacactttaggcttttaatattaatactatgagtttgcataatactttatctttcttcaaaggctttcacattcattgtctcatttgagagccttagctgcttattcaatggccttttcattaaatcacatcacctctccagtaactttttcattctcttgtgactgaaaaagtacatcttaattataaccataaataattctatattttattattgtgctggatgaaatattgattattgagtaaaaaggctcaacaatttgaagatggcatacaatacaaatttagatctactatgaagctatatctgtgttgtccaagttttccagtacattagagcttccccttcagctaacagctttgtaactgctaaccctgaaaccatgtaagctgaattcaaataaaccttatgactgataatgcatgtgcctacatttgtactgtaatgatttttttatgattttgtaaacttgatgattgtattagaaaacatcagatagtataagaaaattatgaaaatgattaaaataaaatatggtaacatgcaagacaagtaaattatttttatcatggattattctttgcaaagagctcaaagcatcttccacgtgttcagtcttttgtattacttgactaygcaatgtactgacagaagatgagctttgtctactctaacatgaaggatttacataccccttaatagtgactccactggagaacaaaagccactaatgcattttttttgacttcctaattttattttaggttcacacasgttatcaaaaagtaaagggaaatgactaaacaaactcactyattatacttattgatggctatgtattgacttcacagtaaatgataactaaagtctatccaaatttttcaaaaataatgccatgtatttcaaatgactctacaaccccagtgtggatattttatgcttatttgtgcaagaggccaagaccacagattatgaacgaagaaaatttgggtagactttagttattattttccttcaagatcgcaagataaaattatctatgaattaactgttacagttaattacactgtgtcactttttcatgttttcttgttggtctcttgttttctatcgtccctaatgtcgtatctgtgattcacattttcagaaaactttattgcaagtagactgtgagcttcaaagaacttacagcaacacaaatttatctcctaatattcatctgtatgacattatctctctgcttaatttccatagagatatgaataaaggaaagaaattgaacctatagaagcaatggttttggtctgctctttgagcctgattaaataaaagattttaatagacaattttaaaaagttttatgaataagatcttgcttataattttattatggctgtattgtatgtctaatattgtaaataataatttttattttattatagctaatattcaagtgatgtttaaagcatgmtcggtactgtgttgaacacttacacattttcccctttaattgcccaacaatcctaaattgcaaactatcacaattttattgataagaaaacgtaggattatttaggaaagtcacactgctagtgaataatagagctaggaaacaacttataagtaggttatctatatccrgaacttttattcacactgttttattaagtagatagattgccattttgttcatttgtatgtgtgtgtttgtgtgtatgtgtggtgtgtgtgtgttttctatatccttattatgtttatattaaactgtatatccacattcttgcttctctctctctcccccacctttcctcactaaatatatgtaattagagatggaatacacatatatatatataaatattaacatatatttatatatcatatattaaaggctgagctaacgggacatacgatacatttttcttgttcaagataaagcctttaccaggtatacaaatttggctaatgttttttgaaatcatctttaggacctgtttaccaagataatcacattagataactctgctttttagtctcatggctgcagaatattttgctcatattaaattatttctgttacctctagaatcaacttttgtgttttttctagttgaacttgagatggtcctttaattatttagtaactatatctgcttgcaattatactattttaactgaccatgtaagaactacctgttcactgtttccatccatgatattcacatatgggcttaataaagaagcattctatgtgttggcattggattcagaccctaaatagtggcaactttttggcacttggttttgtattagcaatgatgtttaacttcttgtcatccatttatacttctccctttattaatttaggacaatagttataagcccatcttccttgctagaaataaaactgagacctgatttttgcttataatgtataggcagaaacctgctgggataagggtggaaatgatgaaaattctttttcctaaaataaagacacagaaatgcaatatcttttgcggagctgctacaaatatcttaccaactgtaagtagccagagaaccaagataattagtatgggagggctgagtgctgaaaagaatccaggcctctgatagttttgtacagacgctacatcaaccaaccctgaaaacgctctacctttaaattgttayattagactgtacctttccttattttcttgtactttcattgaaaacatatgtactttcagtgacacatgaaccatgtatttctgtgatgtcagtaggatatctgtgctcacattttaaatggccataaattagacctttcagtctgctgcaaagaaaaaaatacagatttttgtatacagctgtgacataatgctatgttaatccaagagtatatcttaaaatatgctgaccttctgttatgtagacttgcttcttaggtttttggagtagttggtagtagtggttttgaaatcacaccatagatatttatttaacaccaactttattccaatcactatgctaaactctaaggacaataacaataagtaagactcagtactggccttccagaatcacgctttaatgaaggaagcaagtatctactcaggagctaggtattatgagattcacaggaaaggtgcttaaactagtcttcagtgtgtggagaaaatactccaagaagagtactttctgagaatagatctaaaacaatgaacagaattagccaagtacaatgatatggcatttcagacagcatatacaaacactcagagatagagagaacaatttatattccatatcaacctgaaaaaagtcagtatgacaatagcattgagttaagtgacagaggctgaaacaagggggtggagggaaggagaggaactattacaaaataaatcttgtaacgccttagtatgtagtttatgttgtaatctgtttgaaggaggaagtcactggagagttttagctttattagaatagtgacatgaatacatttatattttataaaaaatcccttttgattattgatggactgaagctagataatcttaaaacagatatatcagtgaagtgtatgttaaaattcattgaggaaagagatgatgtgacctaaacagaggtgatagcatggggaagaagaagagtagatgaatctgagcaagtggagtcaaaagaatattcattatgctgccgaatctatagacccggagttcatgggaaaaagctgccctgggagccatacaaatataaataaacctatgaagatgtatgaactaacccagcaatggaataagagaggttttgtttgttttataagtaaaagaaaaaaataaaaggctaagcacaggtcttttaaaaatatcaacatttaagaagagacagaatgaagcaagasagcccaagtaaggagacaaaacactaaaagagacgtaataagaatttaaacatttatttcaggaagatggaaggaggcagtggtgtcagatgaagtaccagttcatgtgtgggaaaaaaacaaaaacaaaaactgagaaatgttgattggttttagcaaaaaggaggtcattggtgaccttgggaatagcagttgcagtggggtagtgtgagaagaatacaaattagaaaggttttaggaatgaattagagtaaattaggggagacaaaactcaagcaactaatgtgaagggaaaaaagagaggttattaagtagagaggacaaccagtgtcggccaagagctttgcactgatgtatgagttgtcaagatttctgactacgtacccaagaactgtcagtgcaaaccaggacttatgcttgcatacactgtttaccagacacagattggtacctattttgcatttagaatgatactcaaaccacagcagcatgctgactcagcacagagattcatacttgatggagagtttctctcaagtgtgcatacaaagtgcaatgttaggcatacagtcattcttcaataaatatccacatgacataaaggactgagtatattaatcttcagttacctatcattttataaaaatcaattcaaatcctttgttttctttacttgtaattttttccccaaatgctggctctacattagtctaagataatgttctatcactatttcaaataattcaatttaaatatcttattatcagatgttctctggaattcatctttagggaaacacatacatgttttttacaaaaaactaaaccagatggctttttcaatctgaactgtgtgtactaaataagaaatgttcatcctggcccattttcatgcctttttattgttattactattgctactatgatagcatacattatttgaaaaacataaaataaattaatatcaaatatcacttgagaataaaatatccagttctatataagaacatttaattaatccattacataatacatattataagcttgtatatartagaaaataaatcmcaaacttttcaagtcataatagaataaaacaaacagagctgagctgtctttaactgattttgataagaagaaatgctgtaaaatgaatgtatacatatacttactgcaattttatttcacaaggaaacatagaggataattcagctcaaaaaatagttattttcatgagtttttctttaaattatgaaattttttaaatgctcatatcatacctatttagaaagggaattcctaatcaaattcaaaagaaaaaaaaccataagtgaaattgtgttcctctgctttgctattaacaagcatgcttaattcaccccactttgtagttgtagcagaaagaaattgtcctggaattcaccaacaaaatatcaagtccaacctgctacaactgtgaaacctagtaactcagaggaatcaaagtttctactccttgaaacccagcaaggctgtcacctatcaaaggctgcaccttcggagtccttgtaataaagatctgaagaataatgtaatgtgtcattagcatcaaagtgtctgctagcctataatattggttttgatttaaatgtgttaagtactggccccttggcttgcttccaaattcctagttgcttactgagtaagcaccaatacttcatcatatgaatttacctctttgaaaacagacttgcatataagctgcttatgaagaaaactgtttcctgcaaaataccactttcctttctaaaacccatttaattcacattgcaccacaagggcagtagtcatgcaaaattcgtaacactacatatgatacaacagaataaatctaagttaaaaaaatctaaaacagaataacctagagactgcctcagcgattacctgcctcattgaatcttttcaccactgctggcaaattacagctgttgattctacaaattattaaaattttacctataatgttataggaaatgccatttactgactgctgtatgggatcagggagtgtttttctctccacgtaacatcaaagagcatttcacagactccagatataggtgttctgtgttagcaagtggtgacattcccagtcaaatcctcaccttcaaacttgtgaaatttattttctcctcttatccagctgccaattatttgtttttctccttgacacacacattaacatgtacacacatactcattgattcaataccagagtggctgagggcaactctttatttggcattccttgttgatgcattaataaacaaataggcaatgtgtaggtgggacacttgtattcggctcccttctcaatctgttcatgttttatttcattcaaccacagcataaccctccgagttaggttcattttccccatatttatctgaaaaattactgaaggtgagagagaataaatagtctaaggacagagagtgaatgaccaagttagggtttaaaccaaaacacactggcatcagatcttgcrttctcaagtactctgttacactgtttttccttccaaatctgaccacatttgaagtagttggtaatatattttatgtcaatgtatttgagaaaaaaaatttcttgaactcttttgtgaatgttatcttagccaatcaccaaagtaagaatagataacaagctaatatttatttgttaaataagtgttggatttttaactttaaaatttttccatacacataaataatcaaaatgggaccatcttgctgaaactggaaatctttagtaagttacttaaccccccaacccgcccccctccttttttttttcttttttggaagagagtctcgctctgtcgcccaggctggagtacggtggcgctacctcggctcactcggcctcccgggttcaagtgattttcttgcctcagccttctgagtagctgggattccaggcgcttgccaccatgcccagataattttttttgtatctttagtagaaatggggttttgccattttggccaggctgatctcaaactcctgacctcaagtgatcaccccgccttggcctcccaaagtgctggaattacaagcatgagccacacttcacccctttaagctttgattttataatgtctaatgacatttgtctttgttagaaggctgttacttggtattaaataatataattatgagcatattcattgtcaacaataaatttctatacaaatgcatcatactattattatattaccaaaatgaatgttagaattctatactctatattaactgggtacatctaagataattttaaatgaaagaggaataaataccctgtatatcacttatatgttcagaggaattcaaatacataggttctgaggttcctcagttctacttagtaatataaagacattatttattaacatttagattgtgatgattgttgtacatacttgatttccagaattagattatttgattaattaaaccctctgccttacaataagccaatcctttgtttatgttacgtgggtagttagataggcagatgattagaaaggcagaaggtaacccactggttaggtacacaaatataataagtaggggttttgctctaccccaagtatattgagaattcataaaaagaatcaaaataattttaatggatcttgcctaaggataagttatctcttttagcttaaaaattgctttgctccagaaaagttctcttttcaaatatgtgcaaaatatcatctctgccacttcttaagaaaataatttgctaaagggaatgttttagaaagtttctattagtcagaaaaatctgatttataatctccacagatttctaacacattatgtctgattaccagaccatcgatgatattaaaactcgaggcataaatttttcgtcagggttttatttcaatttgactcggcttttctaccacctcaactatagtaggcatccattactgctgatgattgtgttgaccctgagaaaatgcagtgagggaggggatgaactgttcataatataatggaaattacttttcccgtttggcacrtaaattaggaaaaaagtaaaaaaaaaaaaaagggagtgtttgaagtagtcatctgttaaaggtcaaatttccagagtcatccttgctacaaatctggggaaacacattattcaaaatgttttgttttaccctgcaagtggcagaggtgaaattccttttgtgttgctcagagattttctctttggagtttttcctttcccatataaacayatgaaagtgcaatttatttctgtgttttgtgttccttttcctgatcagactggcaaacgatatgttggcatcatcaccttctcctttgtgacaaattctgattttctacttcataattagatcaacttacactggacacattttgtttcctccggaagatgactagttgaactgaaatttgtttacacaaacactgtaatttaagtgctaataatgcctttgagttaaaggatggatgtaattgaaaaggtcaaaacctatttgacttcctttaaatggttgatagcttgttcacttatattgatgttatctgaaatgccaagacattttcccttttcatatagagtgtagggctgttcattamtattttttctggcatccattcattctaaaacattaaacagtgcccagaataactatgtgtttctaatagttagtgagaggtagttcctatcttcaaaaaacacacattctgatagaggaaaacaactacttwgtaacaagtgataaccaccatttttagtgcttttttattcattcagcacacatttgtaaagtacctattatatactagacactatcataggatgtagacacatacataaagccaactgaatccttgccttttgtgtaccttgcattctactggggagcaatcgcagtatttcagattctgattagttagattgacattgtctctttccatgggaatttgcaaggtcagcagaatttgagggtggtggaagaacagaagcattttctcctccctgcaataaagacattatttcatgttgctcatactgaaaggacatctacatatccatattgtgttttttaacactgtgctttgctgaaagttatatataagcttatataagtaatataatgtttcctaccatataatccaagttcttcgtcatcacattcaccatgaagcttttcctaactgtccctgacagaagtttattccattttaagatgctcatcttgtttttcacatgtatataattatgtacttccttataccattactagattgtaagctacttatggccaagaaactatgttgtaatcattactctattatgtatagaacttaacacagggcatggcttatactgaatgaatattaagttgaaatataaccaatgtaaactaagaattagaacaacaatatacacatgcacacacaatattcttcattctttgtctccaatttccaatttgaattttagcataattttggatcacatgcctttgtccacataaatatcttatactttctatattctcccaatatagtagacacacaactacagtttctgatttctgtaactgaacattttttcatgagaacaaagaaaagacattggattgaaatatgctatttattgtattaataatatatttaagcattattcttgcaattcaatgttttaagacattaagcatttctaaatttacttagattgctgtatttttgtgaatgcaattacctatatcattgagagagaacagctatagtaaaattaattattaattattttaactttgttatttatttgtcttctaatttatttgaacttccttatgatcattaatattcagattgatcattaatttataccttataatagttatagtatctgaagccaaatcttagaaaaagcatcaaactaattattttctctttccaaatctgcacacatttcatgatccctccagacataagaagccacaagttcacattttcttgacaatggctttgataatcccagataacatttaccagctagtagatatttgttccctgaagagttagtcagttgacaggctgtatttgtttagtttcactttgctgatcttaacaagaattaattctcctagctgtagttaatatctaagtactgtaatgacatacatctaactgttccttgctgactaaatgttttttcttttagttttaaattagagtcttacatacataaagagaaaacaggatttatcagcataagaaattttttttttcacaaatgcaaatccttatttctcttacatagaaaatactgggggactaatacagtgttcattctattagagtgcagaaaaattctgtaaatgtgagaattctcttgattcctgcttctccccaaaagaggttcccctgattcattgaaagctgcacaaactctctttgtgtttgaagggtgttttcttatttcaaaccaaatatatttattccactggcttagataaatattgctacaaaaatatttattgtgtgcattttagatttatttatcaaatatatagatataaggcatattgaattaaaattatctatagataaaatagaggtgcactcaggtaaaattttagactgctaatcttccctgaggaataytgattccctttggttttatcctctctttctattagatattaatttttactctctctctcttttattttctttttttggtctacagaaaagccaatagatagaagtgatgaatgtggacatgtagtttccaagtaaaactgtagccatgtggctcagagcagcaacaatgtcttatgtatcctttgtacccctgacatctgatatggtacttgatgcataatgtagttcaataaatattgaagtgaataagctatacaaggaggtcataagcaagatataatgaaacaatatgctattatacttgaaaaaagaggtacatgaggaatattaaaaagccatgattcagaaacttggaacaggaaactctagcctgatattaaaatggggaaagaatctggtttatatttctagctgtactactacatcatttaattccattaggaaatactggtgtcaaaatatttattatattcttctcttctgccatcatagacacaaaatgatgtttctacatcaggatagagaatccttggtatcagatacttctatttttgcactgtatcctctcaaatacatttatggaaatattaaaattttgaaattacattcaaatgtggactcatgacagatactaatgatgtaatgttaagtaaaggcaattagggcaatatattatgagaataactatatttagcaagaacctaaatatgaaaatgtrttttatacgtgtgctgaagtatgttaaatgaagatatctctaacagggtggcttttgaaagaagtgacatccaaacacccaggtaagaatattttaggcacagagaacaaatgctttgaagtgctgaactgaaggaggccattggatatgtagtgaaaccaatacagagagaaatagtaagtcagatgagagatgatggtggcttaactgggaccttagcaacagagctaatggaaagtgcttgaattctacatgtagtatgtagmcagtgattctaatttaggattcgatgctgggccactgcattatttggaagttttaaaaatgaggaaaagtaaaaaagtagactaaaactagcatttattgagaaagaagaaaaaaaaatgacatctttgatgccaagtaaagaaaacagaaagcatgtagtgatgaaatgtgtcaaaagctgaggagatgatttagataaagtctggaaaaaatttttaaakacccctggatatgtcagcctggatgcaagtaatggctttgacaggaaaatttgcaatgaagtttaaagttcactgaaaggagtttaaagagtggataaagacaaagtgaagtgataaatataaactacaagttagaggagtgtgcatttgttactataaagaggagcacagaaagagagcactagtaggagtgggtwgcagggtccaaagaagttctttttcgagaaacattatataatactatattctgatatggacattatagtagagaggagagaatttaaaaacttttgacaacgctgaaaagaaaggaggagtccaactgtaaaagaggtgtctgggagtgtgtataagcagatgaaatcagatcataaagtaggagaactggttttaggaacatgattcctctacttcatgacaaaatatatagctgactatgaatgtaggttagtagatttcatcatttgggttgcggtgagggcagtaatctgaaagtccttatctaatttatcctattttctcagtaaaacaaagaacaaaagtatcagataagacagagagtagagaggggaaatgttggaagtttaagaagatgaagatataagttttaccagtggggggttatttctaggtgttaagaaggaagggaaatgagaaatgagttgacacagattttcttaccagtaaatacagattcccaggtactcaatttcatacactgtattccagccatattgattttttcatactttttaaatatacctcacattttaagactttgcaaattctatggttctgataggggagctatgtaacttttaatcattcttcctacctcaatttaaattccaagaaggcttccctgtgcaaaccccaaaatcaccactgtcctatcacttattatattatagcgcatatacttcttttctttatatcagcaactgcacatgtttttttttttcatgttgatatgacatgtccagtagctatgggtaaaatattgcatattataaaattatatagatctgttattacatgcaagcgccttgttttttgcttcctcccagtgaagagatacaattgacttcttcttttccaatttggatgctttttatttctttgtcttgcctgattgctttggctaggacttccactactatgtttaatacaagtgctgaaaatagcatccttgtcttgttctaattttcagaggaaatgctttcaacttttccccattcaatacgatgttagctgtgggtgtgtcatatttggcctttattatttagaggtatgttccttcaatgcctagtttgttgaggagttttatcataaaaagatattaaattttatcaaatgatttttctgcatctactgagataattatataatttttgtccttcaatctatcgatgtgctgtatcacatcgattggttttcatgttgaaccacccttgtatctgtgaaatatatcacactttatcatggtgcattgtctttttcatgtgctgatggatttggtgtggtaatgttttgtggaggagttttgcatctatgttcatcagggatatcatcctgcagttttctttttgtgttatgtccttgtctaatggttagtattggggtgatgttggcctcatagaacgagtagggaagaattccttctctttcaattttttgaaatagtttcaggaagattgatattagtttctctttgtttgactcgtctaatttcactgtgaattcatccagtcctgggcttttctttgtttggagacttttttattactgattaaatttccatgcttgctgtgaatctgttcaggttttccatcacttcctgattcaatcttgaaagttgtatgtttttaataatttacccattttctctaggttttccagtttgttagcatataacagttgytcctaatactctctgatgatcttttatcagttataaaatctctttttgtcagttataaaatctctttttttcatttctgattttattttcttttggatcttcctttcttggttagtctagctagtaatttatcaattttatctttttgaagaaacaacttttcatttttatgatcttttgtattattttttaattctctattttggtttctttatgctctgatctttactatttccttccttctgctagttttgagcttactttgttcctgctttgtgagttccttaatgtacaaagttagattgttatttgatatatttctacatttttgatgtaggaatatattgctatacactttcctcttaacactgcctttgttgtatcccacaggttttggtatgtatcatcggtttcaagcatttttaaattttctgcttaatttctttattaacccagtgattgttcaagagcatgatgcttagtttccacatatttgtatactttccaaagtatttcctgttgttgatttcagttttactccactgtggtctgagaaggtatttgacttaattttgatttctttaagtttatttagacttgttttatggtgtaacatatggtttactctgaataatgctacacgtgctgattaatgactgtatattctgcagttttgggatagaatgttttctaaatgtcaattacatccatttggtctagagcctagtttaaatcccttttttttcattgattttcctgcctagatgatctatctaaagcaggcagtggggtgttgaagtcccctactgttattttatggagtctatctttttatttagatctagtaatatttgctttataaatctgggtactccagtgtatttagaattgatatatccctttgactgattgatctctttatcattatrtatagtgaccttctttgtctttttttcagttttcgacttataatctgttgggatgccagatgggcagtcttcagacccccctggtggcagaggtgggatgagcgtacctgtcttgggatccgtagtgttagtgggtggctttgttggccatagtgttagtaggtacacacgggccaattcttggacctccagttgtcttgcttaaatgctggtagtagtggcagttgttggccaggttttgggcagattctcagcaccctgggcatctggtgtgatgtggtcaatggctgtggtagtggtggagcaactcactggaacacaagtggtagtgctagtgatagtagtgactgcaacagggtgggtaggccaaggccccatttcactggtgttgtgtgcagatcagtgcaagctatggtagtctgggcaagttgggtttgccggacctcagaccttagaaggagtgttagaaggagtgttcaggcaccaacagggctagaatgggctggacaacttctaggcccctggatggtgaaaacatcattacaaagtgaacaggactaggccacagtcttgtcctcaggcccccagtagtgaattcagggactggctatcttaggcaggggcagggtggttctcaggctgctgggtgagtaatcaggtgtgggtacaccgcgggcctgcctctagggagggtaaggcactcacaatggaagcaggctagcgaggtagctgtgggtcatgtggtttcttggtgccttggtatcacagtagcctgcagtagctgtggtagaatttgctcttgaagtgtgaaagtgcctggcctcccctacccttttttgtccttgggtagcagtggcagcatctgcactagccccagggcaggacatagacttttggaaactgggctcagaatggagctgcctgtggacttgccactagggaggatggcaatcctttcagctggagcagcaccggcaggtagctgtgggaatgcagtttggtcatgtcttggttcctcaacaaccctcggcagcaatgctgggatttgttcatggaagttcccagtttctcctctatctttttggcccagccacagcagcactggcttcctttggggacttggatctcagaatagtagcaaggtgcacctgctcagggttcggatgcctgtgggactccatatgttttccctctctcgaacaatgcctctgtgcactctctaggcagctccctctgttagccttgaagcccacagaagtcgaggagttctcccatagttagggttgtaaaatggtatagcaggagtgtggagttgtgggtgtctttcttttgccattacctcacatccggaagcttcttccagctcccagacaattcctgccaatcgacttgcttctcttctctctcttgcttatttaatcttgacattaaccttctctacaaagaagagtacaagttaaaatagccagatcaaaagtaaaatctctctgtgatatgtatagattttagaaaagaaacaactaggaggttaaaaaggaataatattataatagagtttcaaaatcttaaacgttcattttgaatttgatcatttctaaagagattaaaattaagaatagttcatctttgagctagctgagattcgttttttatggtgttccataattaactcaaacatgttattcaaactttgacttccttgcaaatataaaggtataatttaggtggatagaaagagttttcagtaaaacaatatgccaataagagacttttttcttatttcgttcaatgtcaggaaaatataatagaaaaaatctgtcacttttgatggagtgcagagtataattaaatttagtctttcttgagacctttgtttgaatttgattttcagttaactaaagctcattgtttagttcgaaagcctgtaaatttggtttcctatctgcacaaagagacacattaaagcaccataccagatttttaaatgcactttcaattctttgtgatctgtattgtagctttcctttatttagagctgattctgatttgaaagaaaaatgtgcattttgacctcatacttttctttctcagagagagagcaagagcttatattttcagtttttatactgtggattatgtctgtatgatatgtactagaacagagtttctttgaaaatgtctatttctgattttacattatcacaacaccactacagtcaacaattatttaagatcctgaataattctctaatgaacatagttcatcataaatactgttcttatatgtgtgtatgtttgtatatgtgcatgtatatagtgttgttaaagaaaacaaagccttagacaaattaaatttagcagagtttatttgaacaaagaacaagacatgaatcctgcagcccttagaaccagaagagattcagacagcttcacatggcaatgtgggcaggtagtatttgtagatagaaaaaggaagtgacatacagaaacagcttgagtggttacagctaggtatttgttttatatggacatggtctgatcagtgacagcctgtaattggctgaagcttggctgctatgattggctgagactcagctacttgttacaagaatatacccttaagtcaggttgctgcttgtttatatatactaacttagattgcaggtcactatgtacagaggcagctttaggacataactaatttaacaattcccttcttttggtcagcctctcagttttgagagattgaccaaatccttgggcatgatgctactctccatcactataatgagcttgtttagtcctcagtatggaattcacaattgatgacataaagaatgattctttatattatctcctttttttgtgtcatttaaccagagtgaggccacttgatgtacaagaggtagccacatacaagtatttaagactcttaagaggatatggcacaccaggaaaactattacgatagttatcagggggataaaataccaagagactgaaatatactccttaacagaagcccccacgagtaaacagaattaaatttaacaacaaagagccagaagaggaagctacttgttttaaccaagtagcttctctgttgattccgttcaactgagtttctcctataccagatttatttatccaagtctagcacgaggtgttaactagcacacacattcccccggttcagtcaacaggtagtccaaagcaatcctgttacctaaaacaattttagcaagagaatttaaataggtttgttgggcatctgtagcctttgtagtagagtcagctatagtagctaatatttgagacggatttctaatcataacttcatttacattatgctaagccagggaagaagcatcctacaagcagagttatttattacctgctggcaaattcctctttattctatactgcatgttaagaggtgtagaccaatgttcagtttccaattggttatggagtgataatgctactgtcagaatatttagtccacagtagccccttattttccacttattgagacatggagttgcccacacatagggttggttgttaaatcctacatagataaaaacatatactagagaggcaaaacagatggtaggatgctttatgcattaggaatcacagtagggaagcactagtgatatttgtctaaggctctattgttgaatcattgcatggttgaaggctacttacaattaagggattagggtggtaaattcatttacaaaccactgaattatctttcttcttattaaatttctggaataatttaactgtaaaactctcattataagttttacctgctgttagtaacatgccatatgtaacattcagttaagttctctccaaaagctattgatcatgaaatcttaattgtcatattatcttgccatgtatacgtgaaaacacacaggagaaaaaggaaaggggacaatgatttcatggtggaggagataattcctgttccatgatcttgggaaagctgcccacatctaggatgtcatcttcttctgaggagaaacatccttggttaattataccttgaggtccccaatgagtgtacagtcccaaggttctggagttaaggttctcttcagttaagacaatgtgaagccaatccttgaggctctgatgtataggtggtaagaacttgctacagtcccttttaattaaattatagggcagtctttctctggtgctaattccaaaaacccaatctctgggttctcaatcatgaaaggtctgattgtcatcagttggcaggacatgaagggcttattttatcttgcaaaaacatacattagcatattggattaaagtctcaaaatattgagccatgtcagagttcataagagcataagtcacatgaagttcttatgattagggggataggccttccagtaactatttcataagtggtcaatttatgttttccggcaggagtgaatctgacttccattaattggtaatacctttgaccaaagaaatctaattgattcagtttgcttcaccaaatgccattgtgtttgtaatactttaactgactgttttacaacttgtccagtgaaatgatgacctctatcactggatatttttccaggaatgccctataaggggatactaataagsttttagctactatttataatattggccttcctgcaagagaaatcttccatacaaacagaaaacatgcattgaaggtggcaactgaatgaaatgtttctgtaagtgttcaaatgatccaacaggtgcaagaaatgtaccatctgacgtttttattgtcttctcaggattatgggtttaacaaatcagacataggttatgaacaattttagcaattttagaacagtcacctcatcattttttcataacatattattttatctcttttatgatgcatcatataatgcagagctttgaagaatagaatctttaaatactcaggaaggattaggcagccattaaggttctccatgagtccacactcaacactgaatttgcatactttttcttttttctttttttctttttttgagatggagtctcactctgtcatcaggctggagtgcagtggtgcaatctcggctcactgcaacctccacctcctgggttcaagtgattctcctgcctcagcctccggagtagctgggactacaggtgcctgccaccacgcccagctaatttttttattttttagtagagacggggttttaccatcttaaccaggatggtctcgatctcttgacttcgtgatccatttgtcttggcctcccaaaatgctgagattacaagcataagccaccacgcctggcctgaatttacatacttttaaataccagttttgtttctctaattcaagtgtatagcactgtttattaaatagtttaacatagatcattttgacttggatcagtcttatagagttcatttcaattgtacatcttaacaatttcagcctagtctgccttagaatgaaaacctgccacagcagttccatagtaatcaaataattcttgttctgcttgaaattgggttagcatgaaaacattcagttgttttattagagttctgggaattcttactcagttaaatggtatgataagatttctacgaatatcatacaatttctcaaacacataataataacactccatacaaatagaactcaaaaaaggtttagcattacttattatttcacagtgtttttcttataatttaatatatcaaataagctcaattagtttaatactcatctttatctaaggagagagagccttttgaggtgtctcaaggacccatttggaaaatctcaaagttaatttgacaacaataaaaaatattttagaatttgattttgggaagtttgtcaaaaatatcaagggttcatcaaaatagtattacaggtcactgtgaaaaaatagtaaatcatttaaccagagtgataaagacttcaaaggaaatacagaaagttacatggtagtggaaaaaccttagctcttctattaggatttaactttcttgagtgatgcagaaactaataatacaaagcatagaaagttatctcggtaaaatgcaaaatctttttttttccaatgacctaaaaggtaaagaaaaccttttacaatttcctgtaaaaagccgactaatgctccaaaaaaaaagttctcgttttagcagagaggtcacattctagttttgactgtataattttgatattaatactaaattttagaaaaaatttatagataatctgcttataatcttagccagcttgattacattttaaattcctttcacaagattcttctcccaccaaacttctacaaccttcttatatcacttcaattattttatctgtattattttttattttgaaacaatagtcattcttctttgggactaaaaatactttctttttcgttaactaaaacaaaatctcttcatacktgatagctttttcttaccaaaagcacattttaccttccttacatatttgcatatagagttgttttctcattattttttaaaaattaagcaacatctataaattaaaattcttaactctagtaaccttcatttccagtgaacagtgggaagcaagcagttgtaaactgtcacagagcaatatgtagattggcaaatttatgaatcatgatgtctagaagcatgtgctttctcatagtacaatttatcaatgtggcacaaaacatgtttacaaacagtcacagacatctttagcctctctttgtgataagaaactgtagaggggacactttgggaggtcgaggcgggtggatcatttgaggtcaggagttcaagaccagcctggccaacatggtgaaaccacgtctgtactaacaatacaaaaattacccgggcagtagtggcatgtgcctgtaatcccaactactcaggaggctgaggcaggagactcgcttgagcctgggaggctgaagttgcagtgagctgagattgtgccactgcactccagtctaggtgacagagtgagaccctgtctcaaaaataaataaataaataaataaataagaaactggagaggggaaacattttgatcactgtcctttggtttctttgctaggcttgagaattaaattacttgtaaagatttttctcagccataattttcaatttttggtgataagaatgttaaaaccttgtgctatagggaggaaatctttcacataggaattttatcttatagttatttaacttacttatatttagctattgagcttggattgcttataaagacgagacaaagcagctagtcatcatcttaagttatttttcttcctgaaaaaaaatttgtaatacaaagataacatgagcttatttcaccagtaaaccaagatagttgtatgtctgcaatatatttaatgctgacaacttcgaagatatgccagatttaatcaacacaaaatatttttttaccaaggattagccaagtcatgtaaacttgaaaagtattcrggttagtttttctaacagaatacctgatttatataagcacttattttgaagatgattagatagagctcttttacattttaatttggcaatattataaaaagatagaaaaatattacacacattcatcatacatagtgacatacataaatatataaacctaaatagctcttatcattttaattaaaaaatgttagttatgtgccaaggacaatactacataacccactaatttcttaaaaaacttctagatccaaattgttttactggccaatggaacaagagtttctgcccagatggctacatcgtttgaataatatttgtcaagaaacttaagattttcttcatttgccttctgtagggaagcttttgatgtggtaatcttttattctttaatcttttagatggctctgtgtaacaattaaataatgcatcctattactttcttggtgtttctgattctatcttttctaaggcacctcacctcacaagccaacacatttaagttaaaacttccccgcactagttaccataattctgtgttttcattagtaaggttaacccatttctccaaaaatatactaattctgggctcataatttttgtacataaagttagccagtatcccagaaaatggagtcctagtctcctggagtctcagactccttggatttaaaaatctcatgtttattaaggtatctgagacctctttctggattcgatccagttatttatgggatccaattcaatccgagatcccagttcagtaaaaattgctcaaataaatttgaagaacaaaaagcaaatctgtggagctcaaatctgagggagaactcacccttgaccccagttactgcaagataacaaggagcataatgggcctgacaggtacctttgcttgatctctcggtgctcctgggagtcactagtggactactttggaccccacttttgacacaaaactgttaaaagaaaacactagacaaattaaatttagcagagtttatccgaggaaagaacaagtcatgagttgctaaaaacgtcagaactagaaggagttcagagagctccccacagcaacgtgaacaggcagtgtttgcagacagaaaaaaaggaagaaatatgcagaaacagcttgattggttacagctcatcattggctttatttgaacatggtatggtcagttggcagcctgccattggctaaaacttggctattatcattggctgaaattctgctacttattaaaagagtatactcttaatttagattgcagttcctttacatactaaattaagttscagtttgctatgtgtgggggcagctttaagccaaataaaatttaacactttaaaacaacatgaaaattgcaaagataccccatttgttattagagggtcttgctttggattatggacgcagccatggaaatgtgcaagaaattaattttttttaaaccctagaaattaagtcacacaaacttacatatacaaaatgtacaacctatggaaaaagagatgatgaggtggctccatatgtctatggattggttttaatttaaaatatatttatactctagcttgctccagaaagcattgtaagagggtcttgttaattacagcatccttatggaaataatcactactccataactcaaaatctagtgtggggtttttccaggattgagaaatagagataagtcaagaagaccctgtgaaggtcatagaaaaatagaatctcaaaatagaataagttggaaaattgaatctacaagaaactgmtatgatgcaatgtaactttagtatcagatcattggtaccaaatgaaagttacttacatttatcattcaacgaatgtccattgcgtatgtttgttatgtttcaagtattgctgtggacaatgagaataaagaggtgaataagacttacatggactaaatatttttgtcttctaaaatttatatgtggaagtcttaatcctcaatgtgatggtatttggaggtgtgctctttaggaagttatcaggcaatgatggtgaaattagtaagaatgaaattagtgtgctcataggaagaggcagaatagaaaggatctctctttctaccatgtgaggacacagcaagaggctggccacctgcaaaccaagaggagggatctcaccaagcaaataagctagcaccttgatcttttcagcatccagaactgtgagaaattaacatttattgttatgccaccctgtctatggcattttgttatagtagcctacatggaatcagacaaagacagacaaaatctctattctcataaaaccttcaagaggtatttatagtctataggtaaaaatcagataatgacaaatattctgaagaaaatgaaattgggtaatgggatagagactgattagcataggtgacctaattgtcactaggggaaagtatctctgatgctttgayctgagcagagaatgacccacatagtccagaagaaaaggggtctatgcagaggatacaagacgtacaaagacacagaaatgagggcaagcctggagaagtacagaaacacagagaaattcaatttacagcatttggattgcagagtgtaattggaagtgtagtcccagctaatatcacagaattggactcaagaaaagatgatatagagcctgggagtccatagaagagtggtatactttaaagaatgcaatgataacttaaagagtgatgcaacaagacctgttgtatgtttacaaagatcactcagacccccttgtggggaataagtcttatgggcatacaatagatgcaggaagcagtttaaagtaaaggtgtgatgggatttgatttcaggcagtcacataaagatacagaaaattggaacttgctctagaaattttctttctctgtgtccacataaccatacactgatttcaaacttctactatgggtctatccccttttaacttcggttttgacaggcaaacatctttgttagcatatgctatgcagtccaatatgtgtatagaatatgtaaatattcttgaatataagttttatataaaaatggctagcatgctgatgcattttcagattgatatactgttttttttaaataattggtgttaaggaaccattaaacataaacaattatgattgtggttgctatttttaaatgtggagaataaaaaaatagctattacatatattagtgaataaatatgatattatacattatttttattcaccatgaggtttaaaactattttattcaatgcctaaagaggtatttatttccttgacttaccatatggtaccaccatgactttgtccctgtgcaatcattttgctctgtatctgtgaaccgatcaatctattacagtgattctcagtaggggtggcctggaatagaaagagcagcagcagttcttgggaaacagcattaggtctcagattcacttttggaaacaacttgacaatgcatgtttctatcccaaattgatctgtcaatttagatcactgatgccaaaagccagaaaagcaaagttatcaggaaatctcaagtaaattagaaccatatcctccagccataaattctcttatccctcagcagacaaagctaatgttccaggagtgtagctattgagttggtaaaggaaacgtcacttcctgaattccattgggaaatatggcaagctgaatctacaaaacacacaatttagagcttacttttaaagacactgttcatggaagtaactttggctgccatttataaaaacaataatctcactaacagttaatgagtgttttttttttttttttttttttttttttttttttgagacggagtctcgctctgtcgcccaggctggagtgcagtkgcgggatctcggctcactgcaagctccgcctcccgggttcacgccattctcctgcctcagcctcccaagtagctgggactacaggcgcccgccactacgcccggctaatttttttttttttttttttagtagagacggggtttcaccgttttagccgggatggtctcgatctcctgacctcgtgatccgcccgcctyggcctcccaaagtgctgggattacaggcgtgagccaccgcgcccggccatgagtgttctttatacctttgtttttctttttgggtaactatttaaagctttcatataactgactccaataagaatggatattgaagtatcaattacgtgatgataatataacccaataaacaaaaacaattattaaaatttctgctgcctccatttttaaaaacatttgggttctggcatacttttgtgacattcctatattttcctcctcttcatggaaaattactatacttattttaaatgataatgtattttaaagatatatattctctacgtccaaaacctgtgataaaaatattttataagaagttcaatgtaataccctctgcctttgggtggagtagattagaatgttagtagggttgcttcataggtaatttggcgggatgctatttggttagagaaaaacctatactgatttgaaaagaatggattagtggatatgcaaacgagatgggtattctttcctttgtctttcttatctccacaccagccataaagtaatgatgattctagggctatactctttgaatttagaaagtcagttagtgtctgtctttgatagaaacgttaggaggtagcataaratatttttcttttctgagaagatcaaatctctaaaaaggcacctggaatatcaactcctaagctgtccagcagctccaaaattaaaggactaaacatggtgcaaaagataatatctgaaatgattctatcttggtagacaaagaaaatggcagagatcacattagcagggcttactttccaacagctgcaaagagagaacaaagtcatgtaggaaaaaaaaaacaaaacaacaaaaaccagcaacaaaaaaacaactccagtatggatcagcttctctggaggaagggtactaatagcaagggaaatggttagaacttgaaaagcattggcagagacaaccaacttaagacagtgttgagattggaaatagctgtaatctatgtaagcttttattttgtttattggttgtgtttgtttgtttgtttgttttgagagggagtctccctctgtcacccagcccgcagcacagtggagcaatctcagctcactgcaagctccgcctytcggtttccagccattytcccgcctcagcctcccgagtagctgggactacaggcgaccgccaccacgcccggctaattttttttttttttttttttttttttttttttgtatttgtagtagagacagggtttcactgtgttagccaggatggtcttgatctcttgacctcatgatccgcccatctcrgcctcccagagtgctaggattacaggtgtgagccacctcgcctggctgtaagctttggttttaacaggcaaaagcccttgttaggatatgccatgcagtccaatatgcatatattccaatatgtgcatattggactgcatggtatatgctaacaagggcttttgctcgtcaaaatcaaagttaaaagggaaagacccacagaagcagtttgaagctatttttccttgaaaggcaaatggaagcaaacaggtatatactaccatgtgttactttcagtttctgcatgttctgagttagatgtctatcctctatgtttgattagcactgtgctaatatacttatcactgtctatcatagttgttggtttacctccctctccaatcagattagaaacaaactgatagcaaggtgaagtctattatttctttatccccagtgcctagcaaagatctgaaatctgttatcaactatctgtcaaataaatgagccaggtttaacactattwtcctgagagagacaaagtaatcaactaaacatcctaaaccaaaataatatgtgtcactcttgagtaaaacctgaggtaatatggaagttcatggagttgatattaattccaattaaatgcaaaaaagtttggcactttaattagctacagatcaatgaagccttaaaggtaaatgtaagtgatgattgtgtatgaggtatttttaaatattgaaactctttcataagtgcttctagataactttactgatttctaattggaagccattgacctagaactcaagaaatcattgaggaccaaggtctggagtgtttctgactctggactaaagctgagcttatgagtgaatatcagatgataccaatcacaggatataaaaactgtcaacaatgaaaaacaaggcaagggcttacatctcatatcacagtttttttatagtgaaataatgtgttatgcacacttttgtttacttcatttctagacattattgtctgaaacaaaaatttgctgaacattgcacctgcaagccagtgactgccccaaggtgaatccacttattttaaatggctttatttataattaaagtagtgattaacaccacaacttgattatggaatatccgttgaaaaaaactactatatgtatcttaagcrtatttatctgtgtgtaaaaagaccacgattcaaaaagcatgttctgaaattgataggtcatggtgatcaattggccaggtagataaattggagagcaaaagtggtttcaagaaacaggtaaatgaaacagttcagcctaaatttgcagcccttatctttgagagaataatggaaacataatctgtataattattaagaggcaaaaatgaaaggcaattgagtgagggaattataatttctatttttaaagcatagaaatggtattccaaagcttttacctaaggggttgtttttgtttacagaataataattaaaactctttctatcttctttttggataattgtagaatagagaactgagaactctaggaagcatatggtacagtgaagaagaaaaaaattaccttcttttcatttgtgccaagctagatctttgatgctcttgcttcatccacttcctctttaatgactaggcctgcctttgaatcttctgtcccctgatgaatagaaaatacagaatcttttattaaaatcatgttgagaaatgtagattgatctgcttgtttagtttgattaaatatgaagatgaaaagaatttcatgtgtcccaaaagctgatgctaagaatattaagaattttggaaattgctaaacatattgtagcttggacaacatgattgacaatataagaatcatattgaaagataactgtgtcaaaagttgtgactttttatattcatattttccttaatagaaaataattccttagactaacaaatactgataagattatggctttgaaggtattacttatgagaactcaaaaaatagaattatctttgttttattttagagattttttttcagaagggtagtatccaactttaacacaatgtaattctttaattatataattcttgcaaataccattaagtgctatctaccttcagagaaaaataatggaaaagctcttaatattgtataatattggtggatatgaaatgtgagttcttctaaaaattatatgcaaagaatatcatccatttttgttaagccatattttttcaattgtagacaggatctaaggaaaatctattaatgcagggttcttatgcatactgatactaatgttattgttggagaaatgtgtcatatttgaatgcgatatttagatcaaaaaagtccatacaaatgaaaaattgagaatcatttttgaaactaagacataaagttattagagaagtaagtagcgaatgtataggtcctttttgagtttattttgtacttacatggcttcttattagttacttaagtaaatctaaattgagagtaatcaatctattatttaagaacattatatacactgttagaatttggaatttggggattatgttgaatccagatatttactcttcaaaatgctactgtcctcagagtttggaggattgtaattatatcaaagcaaaaattggactgtgcaaagttaaacagggcaaaaattaaaaaaaaataaaaaactctactgcaatagagaaaagagatcagaaagcagtatcaacccagccctgctgagtttttccaaaggagatctcccaggttcttggtaaagacattcctgctttgtacacctggcaagaagctttttaaaaaaattacatcttaaagggacaaagaaaggatttacacgttttgttgttgttgttgttgagacagtctcattctgtcacccaggctagggtgcagtggtgccatctcagctcactgcaaccttcatcatgtgggttcaagcgattctcctgactcagccgcctgagtagctgggattacaggcgcatgccaccataccctgataactgttttgtattatagtaaagatggggttttgccatgttgcccaggctggtcttgaactcctgatctcaagtgatctgcccgcctcggcctcccaaagtgctgggatcacaggcataagccactgcgcccagcttgaatttacaggttttctaaagtaaaggctctaagagaggaaagagacctctgtgattaggccatctggattctataagggttgggatgasagggaggtcagagacctagaggcaggaagaagcttatctaaagtttagtcaagcttaggaaaacattaaggctgtcttgatcaattatgagatttgtaaaaaatccaaaatggacttcatcattgatctgatcttaggtagtttactatttttgaaagtatcaattaagaccataatactttattaacttgaataatatgattcttactatttttatatcccatatagatattattttaaaatattttctagtgatttggatgaattgcaaatgttcattaattcttcattttcaggaaaacaaggatcaaagttcttagcattgcttttttaaaaaattagacataatctatttttgccaccttgaatcctacatattacctacataagttattgcaggactgggagaattaaattatttgctgtatttatagtactcataatcgaatatagtatrtgctatataagtgtcagcaaatcttttttttattcttgttcatgctgtttttttcctttctccttcttcattagagtgttattgtatttttgtacctgacaaacttgtattcattcttcaaaatgcatagtgtagaacacatggacacagggaggagaacatcacacacaaggcctgtcggggggtcgagggaaaggggagggagagcattaggacaaatacctaatgcatgcagggcttaaaacctaaatkacaggttgataggtgcaatgaaccaccatggcacatgtatacctatgtaacaagcctgcacgttcagcacatgtaacccaggacttgaagtaaaatttaaaaaaaagaaaaagcagagtgtaaggaaatagtctttggcatttgatgcatgcgaaatgtcactgtaaagataattaatctatatgagcctctctttcttcacttctaaaatgaagataatagtaactatttcattaagttgcaaagattaagcgagctaaaaaaaaaaarraaaaaaaagggtccaacataggttctgtttaatgktttcttctttccctctttttttctataactgtaaagattttttagattttacattactatttaaccctcctactaaatacccaaaattcaatttgtaattctctttacattcagcaccatggaaaagtacctggcatatggcagttatttggcaaatgtttattaaaaaggaagaaaaagaaactgaggtgaagtgatcrtcttgtttattcttcagtttgtgctttgaccatatattttaggagtgtgctgccagaggctgagtatgaatatgggatatgccgatatgaaactgaaaatatggtcttcaactgtgaatacctcatacctttcacataatatatcttcaataaaggtttctgaaagggatgtggtaaaggagaaagagggacgaaggaattgtgggaagaagagtgtgtgagagagagggtgagagagcaagagtggagaaataaaaggaaaagagcaaaaaagctcaaagaggattgaaagaaataagagtgacagacagaaaagtgaaaggaatacaggagaacaaaaaaaatcagtaggtttccactgaaataccgtctatcctattatactttacattctgcaaagacttctgcccccaaaacctaataccaccttctcagcccagcctgtcttagcttacttrtagttgtcattaattacatgtgtatagatatttctgacaaactttggttcaaaaatgtctcaaggtattttaaagtgttttataatccaagcacaattttatgaatctcttaaccacactgtgcttttccacttccttttacattctctgtccttattatttcaaaaaggataacaggtattgaaaatataagtgtttcataaaaattgttgtaattataatggttgatgccagtgtgttgagtctactggaatttacattaattaattcagatcccatctctcaatactgccacattggggattaagtttcaacatgagtttcacaggggtcaaacattcattccatagcacattggcttcctgtttatgtttgagatgaaatataccttctgtactacccccacagacctgcccacataatctaaatggaagaaagccataattgcttaatttttttttttggtggaagcatgctgaatagaacacatgtaagaaaatggactaactttaaaaatattgrtacacaaatgtcagaaactgaaataactaaaaacacgaagttcacaaagtaccattgtagggagtttcaaattaatttaggtcaaagtaartaattycctgattcttatggaagtctgaattaaaattctggaaatatagagtcaagaaagaaaatgtacttaatatgccatawttattataaattaggtaaagtacacatttatcaatctgcattaaaggcttctagtagttgaagggtttaagaaccagttttataggaaatttcaaacattagaaatatttaagttatatatactaatagctataatatttaaaaatctgttagcattatgaatatctaatttctggttacaataaaaatattgcttttataggattaaaatacatgtagatactaaactaatgttgaaaattatatatgttttacaactgattataagaaaaattatttgttactcttcaaactccatattcaaatatttcactttaataaagcaatttttcaagggggaattttaaatgtgacaaaatcactgaaaaaataaataatttaaaactataattttcaagaatcaaacttagaaaaaggtataatttttcaatgcatatatgaatatgaatattggttaaatttaaaatagtttaatcatacttcatttctactayctcaagatttcataatgttacatttctgtttcattaaaaatgtttcatgagttataaaactgctgagttttctaactttctgctctgagcattaatatttttgctccagtaaatatctagaatccaaatttttacatttttatttttatatacatgtagaatagagttactgtactgataatatgtacaaggatcaacatttttctctgtgccattatgcaatttttttcaattattttatattgtatgtgattcttaacatataacttactttacaaatgtaacaactatttttaaaaagtctgtgctctgaattatcattgttttctttgaaaaactgtktatctgtatgtttttgggttttcaataatgtttttacttaaaagttttcacatatggcatttatttattttgttgacactttacatatgttgacatatcttgcaattccaaagcaaatggtagaaacatttacacayctttcctgtagggacccaccatcatcctgggtcttaaatgtttatacaaataaaatcataaggaaaatgatcagcctaaggttaaagtaactcagaatatagaaaataagatactttgaacagaaaatagcagaaattacagccaaaatagtccacaggaaactcctatctatttgaaagttgtatgctgtttccaatggttttgatgctactctagtcattgaaatatatttgcttaattttataatatgtctatcaatgtttttcctcctcttacatgatctaagatctttgaacattttaacatcatttatctctataagcttctttgcagcagttatttttatcttaattctactttgcttttattctttctcttgaactcttgaactccaaaatatacaacgagaattattttatatcatcaatatttatttaaattcactcacatactataaccttttgttgttcttttccatttttttcttatatctcaacaatttcatcaagaaaaatttttcttgtgatcaaatatcccatcttcaaagttttttagaatgagaggtctccttgtggaagaatttctcaatttttggttacctgaacactttatctgactctgtttcttgtaatatatttttgtgaagaagtttgctaccatctgttggctctttgaagtaaatttatctttatctttctgcttctaatttctttatcattgtttactctagaagttagctataaggcatatatatatatatatatttctttttttttttttttgagacgaagtttcgctctcgttgcccaggctggagtgcaatggcgcgatctccgctcactgcaacctctgcctcccgggttcaagtgattctcgtgcctcagcctcctgagtagctgggattacaggcctgcaccaccacgcccagctaattttgtattggtagtagagacggggtttcaccacgttggtcagtctggtctcaaactcctgacctcaggtgatccgcccgcctcaacctcccaaagtgctgggattacaagcgtgagccaccacgcccggctatgtatatttcttgaaatatccttgaaagaaggaaaatacatacagacgagctccacattcaatctggcattttgtctggtaacatattgtctggtgcacattgatatggagaaaaaaattagtttggagctaccaaaacacctagaatttgatcagagagagagaagatacataattctgcaaaagaaggattccaaaattcttcctggaaatgtttgagagtacttacctaataactgagcttcatatgttcatgctgagcactttgcttgttaccttgtagacaatagctcctgttcagctcagatccgactggaaamtataagaggtcatacagtactggagccattagagttctagcctacccttggaaatttacgtaagaacccagaaagttttatagggataaggacaccacctttgaatcagaatataaccsttgaattaagaagwtaacaaaaataaagacatcmtaactaaagctaaacaaaatacagaagatctgttagggttttattatcagaacaaaccagtaccatataaagaaagaaattatctctccttttaagataacattgaccatgtgcagaatttcaaaaaatgtactagctatgtaaaaacacacacacacacacacacacacacacacaggaaaatgtgacatatacttagcagcaaaagcagtcagtaaaaatggattaccagatgagatcgattttgagttaacaaaaaggatttaatacagttgttaaaatatatttaaggaaagtaaataaaaatttggacatatgaaagaataattttgaaattgcaaaagaatgaaatctataaaaagaaaatggaaatactagaaaagtacaataaatgaaagaaaattcactgaatgggttaaacagcttattagacagtaaagaaaaaagaataagtgaaatcaatgacaggtcaatagacatgatctaaagtgaagcttccaaaataataaaataattaaatgaagatctagtaatatataggaaaatatcaagtaatatagcaatgagtgtggttctaggagaagagagaaaaatattaaaagtaacaatggcttaaaacttgtcaaactggtgaaaaatwtcaacctatacatctagaaattcagtgaaacacacaaagataaaaatattttaaagaaaatatttgcaaattgcgtccaataataagtataaattataatccattactatgtggaacgttatctattgaatgcaggattggtttaacttttgaagagcaattaatccaaaatgagactctaataaaagagaaatattatgggtacatcattaaacaatctttaatatctagtcatgttaatagctcagagtaaaatgagaataaatgaaaatttcctctatctgatgaagtatttttctgaaaaacctagaactaacatcatatgtaatggcagaatattgatrctttcttactaagatttgaactaaggcaagaatgtgagttctcattgctttatttaacattatattagaggtcttgccagtgctatccagcaaaatcgtgactgaaaagaaactaagcctctctttactcatacatgaaatgattggattcgtgaaaaatcctgagaaatatattttataaatgtaataattttttttcaaattcactggatacatggtcaatatataaaagaacaattgtatgtaacagcaacaaacaagtgaaaattttaattgaagcacaataccatttgcygtggcataaaaacaataaaatcatagcaatgaatttagtggacaacatgcaatatatctgcactaaacattaaaaccatttctgggagaaatggtaaagaaggtctatggcaagacaaatagttttcatggattggaagattayatattgttagaatgtttgttatccaattattctatagattcaaagaaaccccaataaaaaatcccaacaaccartttgttacaaatggactaaccaattattctggaaattcaaaggacctagaatagtcaaaacaacactaaaagcaaccataaatttggaggacatacattgcctgatttcttataataagaattatatatttatgtatttaatatataactacataaaatataaattttaaatttaatataaaagtatgataaaacgtaaatattttatattatgtaaatatgaaatgtttatatatgtaaatataattttaaaatataaaaataaaatattataaggcttataatatagcttcattaatcaagatggtgttattgacataataataaacaagtagaacaatggatcagagtaggaagtctacacttagtagtctatagtagatgcacagtctaagtggctttcaacaaagttgctgtgatcgtttaatggcaaaatctcacatcatataaaaaatattttckcatgggtcatgcatacatgcagagtgcttaaaataatagtttctagaagaaaaaataggggaaataacttcacacccttgaaagcataagccacagcctaaaagaaaagtatttgctaaaaatctgtattagtctactagggctttcataataaaatatcacagggtgggtatttcaaacaacagaaatttattttcttgtagttctggaggttagaagtcaaacwtcaaagtgccaccacaattggtttctggttaagcctctcttcctggcttgtagacggctgccttctcaccatgtcctcacatggcctctcctctgtgcctgttcagaaagagaaagaaatctctggtgtgtcttctttttatgaggaaacaagttttattagattaagactttcatgacctgatttaacgtttattacgtccttatacacctttctaaatacagtcacattggggattttaggtctcaacatatggatattgggggacacagttcagcccgtaacaccatctctctgacaaattgtatgcaaaatacataaaaaagtcaaacctggtgaaaaatgagcaaaatctacacaaatgtcccgtaagaacataaaaaggtgcttatttgatcagtcatcaaggaaacaaatattgaaactacaatgagctatgactatggccttttatctactagaaggcctaaaattgaaacaactgatgacaactaaagttgtggaggaagtgcagcaacataaactcttaatatactggtagtgtataagattttcaaccattttggaaaagtatctggtagtttcctacaaagcaccataatgcagctaggtatttactaaagagtgaaaatacatgtttacaaaactacttgtacaaggatatttagaaagctttataggtaagagtcaaagactagaaactaccaagtgttcattaatagaataattgatttaaaaattatagtatattcataaaaygcaatgcaataatacattcagtaataaaatcaacaatgatcaagactctatytcaaaaaaaaacaaaagccagaccaaaaaaaaacaaaagccagatcaaaaaaaaaaaaaaaaaaaacaaatacatactatttgtgccattgtgatgaagttacagaacaagctagatttatttatgggaatagaaatataaatatagagggcttgagtagagaagagcttgacaggaaggggtcatgaggaaattctctggggatggaaatgttctatattctgatttggttattacttgtactgtgcattcatgtgtcaaaaytcatcttaatatacacttaagagctttgcatttcattatacataaatattaacattaatttataaacattgtataaaatattcattggcaagttttaraaratgatttatgtatttgagtttttagctctttgatatggcattagtgatacacattttccaaaaataacaatgttacatttatttagagattaatatttacattatgtacttcactaagcattttacattcattgtattaataattatgacaatatatatgcttgttctatagtatatgatttcatagaccagaatgccaccttcaattaggaagaaattyttaaaatattttgttaatttacactatatctccaatatctacaacagacccagggcatgaaatacacataaaaaacacacacattaaatattaatatatgcttattattgtattatgaatgaggaaataaaatataacttggaatttttttaaaacttaaaaaaatacaatggactgagcactgaaatcagaatatgcagcttatttagaacaaaattctacctttttcccctaaactgtcccttaacattgtcatctctcctgctaatcctgcattaccctggatycttcctttttgtctctgcctccactcactgctgcctctgccataagccttcatactccagctgctacacactgctgcttctatccctgaggattccacgagcatccttattcttctgtcactgatatggttcctattggcatatcaaaagttatagccatatgaagaaaaatctagggatgcagcagcagcagcagcagtagcagtagcagcaacagtctatcaagatgttttaatctggaataaatttcagaatagatcaattcagcattatcattaaggtaaccattatgagtaacgctattaaatcctttaatagtgtgttattttcacatagatggcatttgttctttgaaagtcccagtgatgttaaaatgaacaaattctggcacagatttgagcatttgctccacacagctatctgagtctagtgtgagccatatgtgatgcccaagcttgcaaaaatgcaacagttttagtgacatactctttagtagacccttggtgccttgggaagaggaattttcaaccggtaaatgaagatgtattggcattttgagcattacagggaaaaaaagagatggaattaaagttaacagagacatgctctcaaatcaacaactgtcagaaaagcatcattctatagtgaaccatcattcctagttaaagtgtaaattttacccacaagagtgtcacaatttataaaaataaaagtttatgaacaactactcaaactgacttaaaaataccccagtaaaatgagaagatctgatggaataggaagcaatttctatgcatgcgaacaatgaaaatgcgagaaaaacatatcataaggtttattaaaataatttttattatgaattcatctaaaaagcaatgttttataactgtagaggttactaaaaaatgcaaatgtaatgtcagaaagtcaaacagattagtcaaaaaaattagattgtggaaaaaatattctttttgggttttgcaatagtgctaatatcccaggggaaaaacaaatgactgaatggccttcagactctactgataaaatgaagtgatttcggttttaggactttgtaatgggttatgtatatgtacatctacttagactgtgtattcaagttaaatactcctggttgtttttgtatgtttcatagtgacaacatttttgagactgcatatttaaatatattactaaactttattccattagccagtgttctgaataygcatgatttaaaatgaagtattccaaaaattctgatcttacttaaatgaaacttagggagccatgctctgagctttacaattcccatttcctgagttgtttattgtaacaatattttcattgacatatttttttaatttctggtcaagtataaattagtgtaaatctctcttaagctataaattatgcttactatttaccagatattacaattacccctacagagatattcttgctgaagttagactatacatttgaattgatagaggcagatgtcttgcctgtgtaagaataattctactaagaatgcatcttttacttttttgagttaaaaagatgatgatgtttccagttaaaaatgtgctatcatctctctatatatctacgtatctatctgtctgtctatcttagtttgagctgctataacaacgtttcatagagtaaggtggcttataaaaaacagaaatttattttctcacagttctggagcctggaagtctgggataactgtgccaacatggtcaggttttgatgagtgctctctgcggactgccattttcttgtaccttcacatggcagaaagagggcaagagaactatgagttccttttataagggtgctaagttcaatcatgagggctccaccctgtgacctaattgcctcccaaagatcccatctaatatgtcagactgaaggttagaatttttgtgtgtgtttatgtgtataaatgtatacatatatgtatatgtgtatatgtatatatgtatacacacatacatatatacagataaataagaagatctttagagaaaatgtctcatcttagagaatacttatattatcctaaacagaatattggtagatacatgaacaaaggtgcttctggtgaggtctcaaggtgagaaatatgttattggaaattggaggaaaggcagtcttgccataaagtggcaaagaatttcactgaattgtgttctagtctcttgtggaaggtaaaatatgagtgatgtccttggatatttggcagaagagatgtagaagcacagtgttgaaggtgaggctggatttttccttattgcttagagtaaaatgtgagagaagatatacaaattgaagaaatttttaagcaagatggaaccaggatttgaagttttggaaaattatcagactaactatgttgcaaaaagtggaaagcatgttctagagagacaaagtgtgtggctggaaatttgaagttttggaaaattatcagactaactatgttgcaaaaagtggaaagcatgttctagagagacaaagtgtgtggctggaaatttgctccttaaagagattacctatggatttaatcagccatctctgctgaggacaggaacggagatggaattacatcagcagaagcactgacagctggaataaacaaaacagagagaattggatgtaataaaggaaggctgtcagacttctgggactctgcagaacaagacaatagaattaactggcttcaaacatgcattatccttcaagaaataggaagaacagccctgaaagtgattcagagagcagcacrgttgctactcccatcacatacccaacaaggcaaaggtgttttctctttggtctcagaggaagagggccacctcctgggtttcagcagggcagaatgccactgcccagtacctcaggggcagggctgcccaggccacagggatggggcttctgtgcagagtaggggaggtgacgctattaccccagtggacccaaaaggcagcgcatcagaccaaagaggattatgcgtgagccttaatatctaaggaaatttgccttgttaggcaaacagggctggtgtcctttttagttggtaaagagacaagagctctctcttacagagaatgatcatgtgaggatacagcaataaggtgctttctacaaaccaaggagagagagagaggcctcaccagaaaccaaccttgctggcaccttaatcttggacttccaaactccagagctgtgagaaactaaatttctgttgtttaagctacacagtctgtgatgttttgttatagcagcttcaggcagactaacacacatacataaatatgcagactgatacatrtgtatgtttatatatttctatatacatgtctatatagaaatatttacatataatatgggaataatatgggaaacaggcagactggggaaaagatttgcatctaggtagagtaaatacatagttcaaaaatgaatgcagattcagatatatttttctactatatataattgtttactctcatatattttgtgagtcaccttatgattcagttaatctgataatctcctggacctcaaaaaattaattttactacaccatttgaaatttctgtaacctgagagatacatatatgatatgcattataattctctaatatattatcaactctgagaatattaggtatgatctataggaagataaatacctatatctgtgtgtgatagaatcagtgctgtcttttcaggggatagaacaaataaatctttatattttagtcttttcattttcaagcatgtgttatcatattttacaataattattatgcaaagaattgaaagcttgtatccaaagactttaatcaagaaagagtttatttcatattttatagagtgattcaatgtctcctttaaaaaataccttgtttacttactgatagcctaataaaatcactataatccaataagaaagactggcctatagaagacaaaacagatcacgaagaacaattataaaaactttaaaaatggttttaattattataaaatattaaagaactacttcagcaaccagcccttgagaaaccaagaacttgcagagaagaattataccaagcagtgccaaatttctgtgccacctttcccttgcttatttatgtaaagggtccagatactgagaagtcaatcagagctttgggcagtatcttgggataagaaaagtgaaaataaggattgatgtttaccaatgcagccagaacttgaggcaccaagatcccagaaagcaagaggagtgctgagaggggagcctaacacttggcacttttctacacatttgctgatattttaattttagccaaaatgctaagaagctgartggaggtttgccagtttcatgggtagcagagacaaacatttagttcaagacctgccaaagaagatgggcttcggtaaacacttcaggctttcaactggcattagagcaaacccaaataagcccatttgcaaaggcagaaatccaactttgaatcaatcttatcacaggctgataaaaattgatttgctccagctgggcgcagtggttcatgcctgtaatcccagcactttgggaagctgaggcggatggatcatctgaggtcaggagttcaagaccatcacggccaacatggtgaaaccccatgtctactaaaaatacaaaaaaaaaaaaaattagttgggcatggtgccaggcacctgtaatcccagctactagggaggctgagacaggagaatcgcttaaacctgggaggtggaggtagcactgagccaagatcgcaccattgcactccagcctgggcgacaagagtgaaactctgtctcaaaaaaaaaaaaaaattgatttgctcctactctcctgcctcctaaaaacaaaagagaatcccttatggctgaaaatacctacattaaaaaatctcagattacctttctaacttttcatacactgtattcaacattttctcaaaaactagcagatttaaaaggatgcagggctatgtcactgaaacccagtgataaaaaaaaacaagggttattggactttttagatgtttttaaataactatgattaatgtatacaacaaggtatacgatactgtcagcagacttcttgcattgatagtatgaatcacatggtaattctagaaataacattaagaacatagagtaagagttagtgaacaggaagatgagtcatcagaaaatagagtagataacagaaaaaaatacattacaaagcatacaagatttattagacatgatcaaaaggtttagcatctcttctaaatacccccaaataaaaggaaagagagaaataagagaaagtgaggttaggtaagatgatatgatgtgaggtaagagaagaaggaaacaaaagcgttaagtgaaaacagtggctagaaattttcccaaaataatgagacaagaaagctcaaagttaaaasgaactatgtacctaaagcagaatatatacaaatgaaacctcaatttactgaaagtcaaatacatagggaatattttgatttaaacaaaaggcacattatctttgaaacagcaacaatgtcatctatagctgactttataacataagcaatggaaactagaagataatatgatgctgttactagagagctaaaaaataaaactgccaaactagaatgctgtacctaaaagaaaacatcctccaaataaaaagaaaataaaaatttatatcaaaaaaattgagagaatttgttgtcagcagcttcaagtaaagtgagtttttttcctgcaaaggaaaataattgcaactgaaaacacagaaatacagggaggaataaaaaccaatgatactggtagataaatataaaattaaaatgcatgacaatataacactgaagctaggaacttaggaaaaaataaaaataaattaatagtggggcaagtgaggagagaagttctatggtccttatgttgtttaaagtgaaaaatgtactaatttatataaatatattaaaacaaggaagcatgctgtaatttttaggctaaaagtaaaggcaaaatattgtaaaaataagctaataaagtggaaaataaaaaaggatttcattctaagaaagataatcaaaggaacaaaagaaatagaaacaatgaaaaaataaagtgttaaatttaaagtcaaatatatctgattttattaaatctgaatatattaagcactccatataaaagttgaagtttaaaataatagaaaaaaacctgatttatgctgcttacaggagatacaactgaaaataaatatatacaaaagtaagaagtgaaacagtaatagaagataagctgcacaaccccaagaaagatttgatagagcaataatatcagatgatgacacatttcataatgctacaataacttatccaaggaaaagcttagaatgctaartttgaacataccaacatatctataaaatacctaaagaaaatttgatataactaaaaatgaaaatagacaaacttaccatcataatgggagattttaacacatatcatttacttgttgatagaaaaacgacaaaaaaccataaggatgtagaagatacctcaatatcaacaacaacaaaaatcacccaaaatattaagcaataaacacattcctcaaatttctctgtatgagttagaaaaaatcatgtggttcttttggartatagtgcaactcttcatgggccacactttgcacttcacctttttggctcatctaggatttgagtctaattagaggtctacaagcaaggtgggtgatgggggtggattctgagtagaattagtaaagtcttgcaaggcrtctcaaagttcatttaatttcctcagggaaggcagctgtaatgtcctcaaacaggtgtggaagggctgttgctaaagatgactgcagaattttggaattcagtgtcctcagcttcatcaaaattgctgatcaaaatatgtcccactctaattttgaggattccatttcttcctaatcagtgccctaatgttaaagcagacactctttgattttggacattatatacttttttctattatactttaggttctagggtacatgtgcacaacatgcaggtttgttacatatgtatacatgtgccatgttggtgtgctgcacccattaacttgtcatttacattaggtatatctcctaatgctatccctcccccctccccccaccccacaacaggccctggtatgtgatgttccccttcctgtgtccaagtgttgtcttgttcacttcccacctatgagtgagaacatgcggtgtttggttttttgtccctgggatagtttgctgagaatgatggtttccagcttcatccatgtccctacaaaagacatgaactcacccttttttatggctgcatagtattggatggtgtatatgtgccatattttcttaatccaatctatcattgatggacatttgggttggttccaagtcattgctattgtgaaagtttctatatctatcctgaaaacaccacacacacacacacacacacacacacacacacacacacacacacacctttatctcctgtagcaaacttaacccataagtagtcttatcctgtaagtagctgaattttgctacaggagataagggtgtgtgtgtgtgtgtgtgtgtgtgtgtgtgtgtgtgttttgttttttgtttttcaggatagatatagaaactttcagatcatgtatgttgtacttgagctgggaatttgaaaccatgagctcatccttttctgtacccactttgtccagaacaattaggagcaatcagctaatctcattttacttgttagtttgacagaatgtcctaaaatatcaaatacatgatcatccagaacctttcctcttgtatttgattaggagatattttcaatgtattttgaatatttccattgcattcaatggagacatttcrcgyagttttcttgccacgtcacaccacaaaacatcagtgctctctttactactagaaatagagccattggtacctttatatctaaccagattagagcaccaattctagaaaatcccagaatcaattcagaaaatttattttgaagagtctgtccttctagaaccattcccagcaccaaaatttgtatcactcagcattctttagagaaacagaccctataggggtgtgtgtgtgtgtgtgtgtgtgtgtgtgtgtgtgtgtgtgtgkgcagagagagagagtgattttaagaaattggttcctgattgtagtgcctggaaagttcaacatttgtgaggcgggccagcaggctggaaactcagctaagagttgacatttagcacagactggcagtctggaaactgggaaatgatttctaagttacagtcttgaggcagaattccttcttctctggaaaacctcggtttttgcttttaaaacatttgactgactagatgaggcaaattaaggattatctctttgctttaaatcaacttaaaataaatgttaaggtagagttgtttaaagtagatattagtcctatctacaaaatatcttcacatctagtgtgtgaccaaaaaaagacacgttatttgtcttaatctagccaaattgatgtgtaatattcatcatcacagagtatttacttagaagtaaaattgtgagctcaaaaaatgaccatatattcaaataggtgtcacatgtgctattgcaaattcaagccaaaattctcatagaaacactatatttgccatgaggaaagcaattttgagggcagcaatggtcagcaaagactgataacaactccagagatggttaaaggaatgatgtatgatctgatgaaattataccattcataaatgtgaaaatttgttcattaatggttattattgttacttgaatattgcaattaacagsagaaacacactttaattatgccaatttgattatcaaagaaaacctggaaaagttgaattatcctctttacttttgatcataattattgaatgacataatctttctaattgattttttaaactgtaatagcaaataaagacttagaaaaatgtgaaaagtgcattgcctttcagtaatccctggtgtaataaaaaaggtgctatcaaccctataatattgttaggacttttccatttccttaatgttttcttattttggcatttattccccaaatttattgagagctaagtggaaattcccactgataagctgcaatttagacatgaaaagaaaaggtgtcatcaaatgtccttcacaaccaaaattccaatcaaatgaaatcttattaaaatgaaatatttagccttcattttgagatatattaggcatttaaagtactagttaattgcataaatatgaacaagggggtgctgagatccttttgagaattatcacattataccatcaaaaggaacatgatttgctgcctgaatgtattttctatctgaaaccacaaataatgactttggagggaatacaaaaggacttagagagtgaactacaagactacccatgtttttccacaacttcagtactctctttggtttttagtttttgttttgctttcaaagaaaataattggatttgtcatttaaaatgtggggtttataagtttgcatatgaagatgttttcaaaggtaaagagcttttaagaaataaaagattttccagttttcaggtgctcttagactgtttcccttatttgctaataggaaatcagtagctttaatttcaacttttactaagaagcactacaatagaaaaattttttaaaaatacartgttcttcagtgtcattcaatttcctgattttcctagtgctccttgtttttgctgtcacaatgctaatttcgttttgtatttttttcagcttattgtgattttttttacaagttgaggctgctactgtactatgaagggctataggttagacataaatatattacatcttgagaatccagttaccttaacaaataatttacattaaaatgttttaggtgacatttcaccagcaacaaaatgtaaaaataattttatgagaaatttaaggtgttttgggcagaattctcctctaaaatgggttgagacgttgaaaagcgatgcaggaagtctagtgttctctttggagtgttagttttcaaaaggaaaagacagtaaaaatcaacgctatttctagaaataaagcaatattttatgagtcttaaccataaagggaaaaaattaaaataatcgcttgacttaactttacagagaaagtcatcaatttctaaaatacactcctctatctccacataaaacatagcaaaacctgtctagttaccctaaccactcttattttaaagcatatgctttatgattgacttaaaggcattrtttataaacttatttatattatttatttaaaatgtagcatttactaaatttatatcaataacttatcataggttattcaatattcattaagtaattttattatcatggatttttagtgacttttttcccttccaataaactcagatgaatcgaaagttcacagtgtcccttgctctttatcagcagttagggagttaacaaaatcacactagttaatgaattttccttaaggtcataaatataaagtaaaatgcacaaatcaattgttcaaacttccaaaatatcacatctaatacaacttgtatagagttatatggaggctacataatttcttatttcttttgaactttaaagttctagggatattcctctaacgcatatgtttctgtattctaaatctatttccagcttgtctagagtgggaatagtgcctaagaatctaaagaccaaactgggaccacagagagggaaagaacatgtccctcctgtttgtcagttttctctcatattgcatgtatgtcccatatgttacactctgctgcccacaggcaaggaagaaataatgtttatactcctgagggaattttaaatgctgtttcaaagaatttcttttgtatcctgccaccaaactatcacaacatatgcagttccagttctatttttcccactagaaaaccatcactatgctggagtggataatataaactctattcccttaaaatcactagaattcttaatcatttctcatcatcattctggctagttgttttatactcctatttgaaaaatacttttctagtataacttgagcagaaaaatcatagcagaaaagagaaagtcaatctctactaaaaggaatttactttaagacaggcaaaggcccatcaggttcttatctcagcaggacacatatctcatcctcagtctcagtacactttggatgtgaatgctttggtcacctcatctaggaaccatcagataaaatggccttttggtgaacatttgatttgtcgagagaatttcctcctaattcaagaatatctttgaaaatcttgagataactaattattkatttgtatgaaatatttttagtgaagcgcaccttagataaacaaccaatctttaatacgttcaagcctagagccctgaaaaatgacattttttttttttgcagttggaaggcaggaagacacaatgcctaacagccaagtagtagcattgtgtctgattagaacattttttttctgcttatttgcccgttataggcccttttttagtaacaatgaactagtcactatagaaaggaaagatttattattatgtgacattctagaaaaggcaaatctaaaaggaaagatttattattatgtgacattctagaaaaggcaaatctaaaaactattataccaatagttgccacattcttggagtaatgtaggaaaaaagtaatgcaaagggtaatgaagaccctgtttcggacaatggaaatatttctcatttttattttggtggtggttacattattgtataagttcattaagattcagtaaattgtacactttaaaaggactgaattttacrttatatattactaaataaacaaaaagggaagatttgcaaaacttcaaacttataataatggagggctccagctgtgtggaattaaaatagagaaatattagactagattgggtgcattcagggtggtagggctatagtagagatttgatctttatgatttgtgatacatatsacctaataaaatggttgatagaatgtcaggaatcacatcctgtgttttaaaaatttagtgtaaaagcctcgtatagagcatgaaaaaaaatgtgcagaatgtgtgcatgcctatacactttgaattatctccttagatgtgtctggattttggtttgccttcttagcccattgtgctcactccagtaatacaatatatagattattcatggctgccaagctggcctgctaacactatagatttaagcaggtttgctgagcttcccttttgtcttcttattcacatgaagacccactgcactcctgttcattaatttgagggaagaacaacagcaggctgtttcttattcttcccttcagttagatgtaactggtcttacgaacacaggaaaggcctattgcagactctactcatgataagcttgaaactacagattgtgcagtcaagttgttgacccaaagaatgtggaatatggttttaggcaagacctaggcatgtatgcttctcctgtgcaactaggggtcgtggttgagcattgaatctcccatgattaaagatgagtgctcctcactcaaatgtttttagattttagagctcaaggggaataatttgtctgttaggggtaatgagcaatttgttttgcagcttggtaaattggcatgcttggttcttcaattagtatgtaaagttttgtatttgcagcatttacatttaatgtttagcccataggtttctgaatctgaaagggtcacaacaattctctgaaagccacggacaccatgtgaatgatttaaactcagtgagtgacctcagcatgtcagttattaattgatatgaacacatttgccttttggggatgtgactttgggattggtgctagcttgaacttgggttcattgtttataatacctgcatttgtgctttaaaaaaggatctagaaatttcacatatggtgacatgtcaaatatgtcacagtaggtatggtattggtaccctatggttggaaggcactagtgtsaggctgattagtctatccaacaggtacctcttctttgagacctttctgtatccttctctctcctataagcctgagtcctttggccatagctaaatgatttcattcttttcaaatcatctaggttgagccaatcaggctttgtcttactaattttatatgttgaaaatagatatcaagactgagtgattatctgctaagtctccttaatgccatttttttttctggggtggggaggggaaattgtatattgtatttaaaataccacctgttaaattttcctgagcgactctcwtctctttgcctaagaaatgtgtttgctgatttggttctgcattttgtaaaatactcgtgttcttacaataaaagttgtttgatggagaaagataaaataaaatagagaaatattagagagaatctttaagataatttaattatgtaaattaagttggcatatggattcaaatttttcaatctgcagttaattgctgatttcaagtcaaagtaaagatgtcacatatatgtttaagtgatatttggtcatcagtgactatccacaattagaatggggcagaattagatcatgtttgaaactatgctcttttttgtttgttatcattgtttgtttttaaagaacatatgcttatgtgtatatctacagagaacctgaaagactgtgctcccaagacttgctaaatgctgattactcacaaaagtctcattcagaataatgagagaattttaaaatacaagtactaaactgttctcaataaactttgggaattgcctacaatgtatcagacatattttgtgtataccatatatattatccctatttttaaaaattatgaaaaggttaaattacttaccaaaatgaagatagtaaatataagaagtaaagctgtactacctacacagagtaaagacaagcaagtaaggaaataacaatgaatatagtcacacaaaaggaggaaaggagtgtcaaaagacaaaattataacaaattttgtttaaaaatctaattggcttttatttgttattccagagtcgggcaacaccacattctataaattagaatgagtgttccaatgagctgagcaggggaagctggctttatgggcagaaaagggctgaagagacagaaacaggaaacgaaaagtagattggtaatttcaaagtgactttccttacagcgttaagacagagtgggaactatttctgttatgttgacgtaggctgacgggaatatccagatttttttytkaaaactggcccattttaaagttcagcttgattatatatacttagcacaaattactgcattctgtttggtctggtcttcaggagcctagtgcaggaggctggtccaaaacaatgtcctcccatagtttttttttttttttttttttttttaacaggagaaaaagaaataaggcaggaacagtgtaggaaagaagaaaacaaaagtaaaaraamccamcaaagagagaaaggaaaggagaatggaaggaagaggaaaaaaaaagaaaatgtgataatttattcaacaaactaagtaatgtatatccagttgacttcaaaactaataaccctttccacccctytytgtagcctcacagcaagaggtgacccaagaatgatacacagaaattattaaaatttcgagaaaagaagacaaaggagtataaaaactgtaaaagttaattgttacatgtaaaaattcttagaataatgtcctggcacatagtaaataaaagtaaaagcttttttttttttttaaacggagtctcacttagtcacccaggctggagtgcagtgcgyaatctcagctcactgcaacttctgcctcccaggttcaagtgattctcctgcctcagcctccctagtacctggaattataggcagccgccaccatgcccagctaatttttgtatttttagtagagaccaaaaacttgttttaattgattagtaattatagtaagaaaaagaaatggaatatcattttctaaatgtcaaaaaaatcaatgctacaacaaaatacctaataaaaattgattagtgattagtgaatggtgaaaagaggagaattcacatttgtgtgtctgaaagtgtgatctgtatatgaatatacacatggaatacacacagacgaccaaatcgttgttctcttcaakatttttaaatggcttgatggagtgatttgataactgatatatgtggaattttgtccccccaaataatatgttgaagcccaaactctcaatgtgattttattagaagacaaagctcttagcagataattaggtttgaatgaggtcatagaggggatcttaagttgatagaatttagggctttataagaagaacgagagagagagatttatctctcttttygcatgcatacagcatggtaaggtcaagccagtatgtaagtcagaaggccaccctctacaagccaggaaaagagacttcaccaggaaccaaattggccagtcccttgattttggaattcccagcctctagaactgggggaagtaaatttctgttgtttacaccactcaatttatgatgttcttgttatggtagcctgagctgattaaaacaatgrcaaattgatcaaactaattgctatttctattaagttctgtatctgtatcagatagtttgctggatactggaaataaactatgtattttaattatcataaaaatatatgagattggtattatttttatccttttctcggattaagaaactgaagcataggagagattaaataactagctcaagttacagggctaatatgtagcagagccagtcctcagttcttgcattttgagatctgtatttttttctaaatagtttcttctgaagatggaaacagatgctgagtccattgaaagatacagatcctttccagaacaaacaaaatatcaaaaacaaacacaataatatgaaaaatataggagagaaatgcaaagtgtataaagaaaatatatgtgaaaacataaagcatgagttccacagaatgaaaatcaggaatctacttttaccaagtagtgtagcctggcaaaactgaacatgatgaagaaaaatggtaacagtgcttaagagtacagttttttatagtactgtctaatcagaatacaccccagagataaccctagcacaaatctaaactaccccatttgaaaagctgttccattctaatgtatagatatatagtgctgggtctggaagttgcagagataattttctaggagatctatgtatccctaactcagataaaatcagtaactgtytacatgatggtgaggatttagataatcctgtagctctcactggtatatatcatgaccatactaacttccttcttcatattttataaaaatgcactgtttgatatactctattgctgtttatggctgctttatgtcaatctaagctatcattgacttttgtcaacagagtggtcatgcagaaagaaaggaagaacaaaatggaggaaataaaggagaaaactaaataggaagagagaataggaagaaaatgaataaagagagagaagaaagaagaaaggaagggaggaagagagaggaaagcaagtaggaagggagagggaagaagacaaatggatagggatataacaggcaagacagaatgggaaaggtgggatttaccattagcacatgtgaacaagcttcagggaattttagttaaaaacaaatgtaaacttattaccatgaatctaataagaattcagttgcatttgttgaaatacagagttcaaattaagaaagttgttaatcacaatatatttaattttgtgcataacctgctttatttgaaaacagccccgacacaaggtagactatgatgatgagagtcaaaagcgagaagagaaaaaatgagaatgattagcccagtgaaataaagatagaagagaaaaatgaaagctatcttcaaacatttaaggaatataaaatgttgatattcacagtaatcattttattcaatgtccaagaggatggggaagacaaatttcaacttagaaaattagatattagaaaatcaacttagaaaatcaatattagaaaagtattttaatatataattgttatgcaaaatgtagtacaatgcagtagatagagtgttattagcatttaaaaaatattctaacagtggtttattaaactatagaggaaatgatctaactcaattatgagaatataactgatataaaataatattaaagtattattggaaagttcagaagggtttaaaaatatgtattttaacagaaaaataatccataacacatcaataaaaatcaattgaaaaattgaatgctgaaaagaaaagagacctattgcttttatttgctgaaacgaaaaacatgagcaaaattttaaacatttggtttggttgaaaaattttattccacaatcgatttctttgtctgtaaaatttagatgactctgatattcatactaaaagtgatgtttttcataatggaagttcatgatagatagatgtagaattgcttacataagttgttaaaatttgcattgtatagattgatatacttaggatccttgagcattcatcatttcaaagattccctagaaaagttgtttgtaatattgattactataatgaatagttttatatactatatagtttaatatgctaattgactgcttatctgttgaattttttccaagtacttccacttcttaccccaaagtataccataattctatgtctacttcagattttatattgacrtcagtatcaactctgggctaaatgttaagttaccatcaaaatatactttaatctagaaacaggttgtattagttttttttcatgctgctaaaaaagacataaccaaaactgagaacaaaaagaggtttaattggacttatagttccacatggctggggaggcctcagaatcatggcaggaggcaaaaggcaattcttacatggccgcggcaagagaaaagtgaggaagaagaaaacgtggaaacacctgattaactgatacgatctcctgagacttatttactgtcatgagaatagcatgggaaaaactggcccccatgattcaattacctccccctgggtccctcttgcaacacgtgggaattctgagagaaaaaattcaagttgagacttgggtggggacacagccaaaccatatcattccatcccaacccctccaaatctcatgtcctyacatttgaaaatcaatcatgccttctcaacagtcccccaaaggtttaactcatttcaacattaacccaaaagtccacagtccaaagtttcatctgagacaaggcaagtcccttctgcctatgagcctgaatatcaaaagcaagctagttatttcctagatacaatgggggwacaggtattgagtacatatagccattccaaataggagaaattggccaaagcaaaggggtaagagggcccatgctagtctgaaatccagcagggcagtcaaatcttagagctccaaaatgatctcctttgactccaggtctcacatccaggtcatgctgawgcaagaggtgggttcccatagtcttgggcagctctgcccctgtgtctttacaaggtacagcctccctcctggctgctttcatgggctggcattgagtgtctgaggcttttccacgtgcacggtgcaagctgtctgtgtatctaccactctagggtctgaaggatagtggcatcttcttcttacagctccattaggcagtgccccagaaaggactctatgtggggatccgaccccgtatttcccttctgcactgccctagcagaggttctccatgagggccccaccactgcagaaaacttttgcctgggcatccaagcatttccatacatcttctgaaatctaggcagaggttctcaaacctcaattcttgacttctgtgtacccacaggctcaacatcatgtgaaagctgccaaggcttggggcttccaccctctaaacccagagcccaagctctacattggcccctttcagccatggctggagtggcaggaacacagggcaccaagtcccaagggtgcacacagcacagggagcctggcctggcccacaaaactgttttttcctcctgggcctctgggcctgtgatgggagcggctgccatgaaggttgctgacatggcctggagacattttccccatgctgttggggattaacattagtatctttgctacttatgcaaatttctgcagccagcttgaaattctcctcaaaaaatggatttttcttttctactgcattgccaggctgcaaattttctgaaattttatgctctgtttcccttttaaaatggaatgcttttaacagcacccaagtcacttttgaaggctttgctccttagaaatttcatctgccagataccctaaakcatccctgtcaagttcaaagttccacaaatctctagggcaggggctaaatgctgccagtctctttgctaaaacataacaagagtcacttaacaagagtcacctctgctccagttcccaacaagttcctcatckacatctgagaccatctcagcctagaattgttcatatcactatttttgtcaaagccattcaacaagtctctaggaagttccaaactttcccacattgtcctgtcttcttctgacccctccaaactgttccaacctctgcctattacccagttccaaagttgcttccacattttcagttatcttttcagcaacatcccactactggtaccaacttactgtattagtttgttttcacactgctgataaagacatacccaaaactgggaaccaaaagaagttkaattggacttacagttccacatggctggggaggcctcagaatcacagtgggaggcgaaaggcacttcttacatggcaatggcatgagaaaaatgaggaagaagcaaaagcagaaacccctgataaacccatcagatctcatgagatgtattcagtatcactagaatagcacaagaaagaccagccaccatgatttaattacctcctcctaggtccctcccacaacatgtgggaattttggaagatacaattcaagttgacatttggctggagacacagccaaaccatattcaggtrtaatctgaaaatgtgaatagtatcgtattgaaaaaagcaaatagcaggcaaataggttgaatctaaagattcaggagaaaatcagaaaacagaatcttataaaggtgaaatcataaagatcacagcagagttgaggggcattggtcaagaagttagggatctatgagtcaaataagctaggcattattgagaaacatactggccaaaaaattaaaaagctgaggacatgactgataatgaaatgacaagctaatttttatattaatatgagtatcttaagattaatttaatggtttcataacaagagttttaaatgtgtttctccctgcacccaaatctaaaggcaagcagtcattagcttaactaatcaccacaatgggatcagcaggaatctctgattaagggagaacagtttgggaggaagatttctgcagacttacttaactacaaataaaactagtaacaataaaaatgtgatgaataaacaaaatgtgttagggcaagaaatgccattttaatctgagaatagcaaaagcagggaggagaaaaaagtcaacattctgcttacaattaaattctcagcataaatgtgaacatccatgccctcggtcaaggaacatagagattacaaatgctgcacccagccaatatgctctatgcaaattatcaacttaatcttctatcaatgtatttactataatttcattttattttcatattctcacatcatcataaaaaatgtgaaattatttttcaataataagtaaaatcagccaggcgcagtagctcatgcctgtaatcccagcactttgggaggccaaggcgggcggatcacaaggtcaggagatcaagaccatcctggctaacacggtgaaaccctgtctctaccaaaaatacaaaaaattagccgggcatggtggtgggcacctgtagtcccagctactcgggaggctgaggcacgagaatggtgtgaacccaggaggcggagcttgcagtgagccaatatcgcgccactgcactccagcctgggtgacagagtgagactctgtctcaaaaaaaagtaaaatcaacttctacattattagtagtaagtgaatatatatttgaatgcctatccctaataggctagaatttttatttaattttaaattataaatcccatcttgtgggctaatcacaatataagtatctgtccttataatcatgaaatgtaaagctaaggttcatatggaaatgattagtagaaagggatataatcgaaaatatattatattagacactgtaatcacaggatttgttttcacaaatcccttttcagcatagtaattattttatgagtaatactttactttttctccataaatccttttagcatatgtattatattaaatatagggtgttggtgacatagagaataaatcactcattttatgatttctatatgtataaaaagtttatgccccacctctatttcttagatattgggtgaaatctaataattattaagatatttctgttctactttgcaagcttacttgaaaaaatttctgtgaatgttttgagttcattttcaaaattttttgtttatgtacacattgaaaattgttcttgttattctattaaatgttttctacatcacttatggttaaagatagtgaaaacacatcatacatctttagaaatatcatagattagtatgagaatatcctagggaaggtaatgccatcagaatatctattttcatactgagtatcatcattactttctcaattagactgcccaattgcttttcatttcacttgcatcctcttctctgttgctgagaatttcccagtagctgtaatcttctgctaagagctacacttagcataaatgtttcttgagagagttgcaggtcaatttcatttattagtaagctggtattctgacacaaattttaccaaccaaagcacatagggagaagaacagatagtgaaatggcaatgggtcagatatactgacctgcttcttcactgtttactkttatctctttgagtttggggaaattacataactttaaatggtgcttgctacatagtaagcttttgatacatattccttaatttagtaaattaatgaactgtcacttaatacataagaaatatgatctcttcttaccacttcagtacatactagataagaaaaataaaacagcaaatataatttggcctcaccctaaaaaaggattatatagaacacactatataatatcatcaatattttaatgtcattgctaaaattcacaacatataagaaattattcttatttataaaaaatcagaatatccttaaactattaaaggaggaaacacacaagcatgccattaatgtaatggatatatttttatttattatttttaatattccttccagtgattgacatgtacatattttactttatgataaatatctatagagtcaaattgccagatacgtttctgaatatatagggatatataagatgaggagctcacaaaaattgtatgcaaaacagaaaaaatagctaattacattttggtaagtattgggacatatgtatgcacagggactcccttacatatgcgaaagttacacaaaataagagtttgggaaggtgtacaagactatgtttgtgctgaatcctgaattggattatcagtaacccaggtaaacaaagttgcaaagcaatggagtagtgaaataaaggatgttccagaaagaacatacgatcctgtatggaaatgtacaagagctcacactatttaggcctatgtgaaatgtgaataagtttgagaaagtgatgagagattaggtttgagaaacaagctagagaagtcatggagaatgtgttaggttagattaaagcaatgattctcaaagtttggttccaggatcagctatattggcatcactaggaaacttgctagaattgcaccttgccggggttcacccaaaactactgcataagagactctggaaaataatcccagaaaattatttgtttttctttgtttgttttgagacggagtctccctctgtcaccaggctggagtgcagtggcgygatatcggctcactgcaagctctgcctccagggttcacgccattctcctttytcagcctcccgagtagctggaactactggcgtccgccaccacgccaggctaattttttttttttttttttttttttgtatttttagtagagacggggtttcaccatgttagccaggatggtctcaatctcctaacctcgtgatycgcccgcctcggcctcccaaagtgctgggattacaggcatgaaccaccgcacccagccaaaattatttaggtgatcctgatacctattaaagtttgagaactaccacactaaaatgtttggtatacgtttgacattacaaagccacgtacttacaaatctgagagagaatcctgaatatgtaaactctaraataatcctttggcagattcaccagaagaagacataaataaaaacaaaagaatggatttaataatatttcattggtccatgtgagaactgatgaggttctgaaataatgtactaaatacatttagatagaggattgagtggatttaagagaaatttaggatgtaaaagcaatgtttgaacaggcagacagaaggataaggtaaaggaaggaattttaattgatttctagtgttctaaccttgcaaactaagtagaccagtcatattattaaggcaattatttaatatatatactctcaagtactatttgcatatatcatcaatttacatattcttttttacaaagacttcaaaaacttgattatatcgtacatttctatacattctttgatttaaggcaaatgtatctacaataatttaggtgacaactgagtttctcatttatagaaatttatgctatacatggcaattctatttatcagcagatatattgaaatcatttctgtggacattctcatatagaaatttatgctatacatggcaattctatttatcagcagatatatcttgaaatcatttttggtgacaaatgaaagtgattattaatttttatattcattaattccaaataccaagcaggctaaatgctaaattaacattctttcaaagtcactgaactaatgtgagttctaagcttaccgaagaaaatataaatacgagtgagtaccaaataatgcattttcttctttatcttttgtttctaaaataacaaatttatttttacctctcaaacttttaaaatcagtgataccactttaatcctaagatgaagttttataaagcttgttttaatatcacttcattaagaatgttttgatattggaattactgatgttttgacaatgagtggagctacatactaaagccataaaaatagaagagagcaataaatggtagaaccttaaataatgcttggatttcaacaataggaagaggggcacaagtcaatgataacacatgtattagtgatgttcaccaagtgctaaaaatgccatatgcattatcacatttaacctttcagtaagccattaattagggggcaatatttattatctaaattttgcacataacacaacaaaattaaggcttccatcacttgcgcaattcacacaactgttaagattaaaacaactggagtttgtatacaaatgtttctgcttctgagtccttaacaaccatttgttattgtcttgcaaaaaaataggaaaaagaagtgactagggaagtacatacagactaaggtaaattccgtgcaataataaaatcaaggaaaatagaaatatcaaaaatgaagatgcatttaattcagttttttattctgtgtgtgtgtgtgtgtgtgtgtgtgtgtgtgtgtgkatgtgtgtgtgtgtcttttttggtaagaataacctacttttaatttcactgtaaaargcacagatcatggcatttggggcatttactaaatactgtgctactggctattttcctttctctatgtgaatgtgacaacattgcattagctggacacagaatgacagtattaaatgttaaagacaacacagtgatatcacaggacaagcaagcttggacataaaaaagagagaaagaaggaaaaacccaatacaattctagagatcataaaactatgtagctctcaaaaatgaaatgtaaagtcatgaatgcgaaaaagacacatattagaaatataagtgaaatccccatccctttttttcagtccaaaactatatttacaaaaaatttatcccagcgtaacacatcccacacatacatttatgtaaaattttgttaaactatatatttccctatcaaatgaataacaaagtgttccactgtttgaaaacaacactggggaaagtcaaataaaatattggattactatttttgatcaaaagtatatttttggaaatgcaaataaatgtgatatatttataattgtggaaaatattgtggctcattgcgaccaattcctgctgatctgttgcatatcatttttaaaataaacaatattttgaataaaaataaagtagttaattgaaatatccttaaatagttgttctattatgggcattcctgcttgaggtatgatgataattacaacattcaaatcagcatttctaaaaatatatatctcttcatgtagtaactggcaagagagtcattgttttagcaatctgcagaatatataaatgttcaattataataaatatagttgcccaatatgaaaattgctgatacagagttaaattaagtgttcttagtaatgaaaatcacttttaggtgagggataacaggaagctcttctaagaaatatatgaatcccagttaggttattcggtctcttgccaagtgatttagcactgtgatcacaatttagcccagcctgaactggaagtctcttgcagaacgttaatgcttgcattaatgtagattttgctagctaacatttatccctgtgacagtttcatattcaaaattgtatctgcatggccctctatgcatataattttatgattgtattttaaaatgtaatgactctataattttatacctggaaaagtcatcaatggctctaataactttaataaagttaatcattaatattcattattaaaaggatttatagaatacactgactcagaatacttgggtttgggactctgtcagcaacattagaagtgatctcatttttgttttaccatcactaatctaaaaaaattaagtgctaatcattaaaaaacataatatctgtaaagtggtctctttgctctgagttgaaactctaatttatacccttagcaaacttataggatgtacagacaactgaataaacaccataattcaaaagttaaatgaatgataaattatatgtggcatattttagctctaagtgttctggctgagtatagattcagtatatgtaatttatttgtgaaaataatttatttctgtattatgtctgtatcccccattaaaataaaagaaaaaaatgagttttacctgttttaaaagctgttctatccccagtgactaccagaagacctggtatacagtatttacacaatatttgttaaaatgaaataaaaatatagaaattttattggacaattatatcgggttaacactgaacaagtgttttcagtatattagtttgactattatccaattatgtagatgaagaaatttagcttggtgaaaataatatttcccagataaaacaagtggctgaacctatgttaatttttttggtttctgagtaaaataataattattatgtccatgataatagtagctgagatatatattactaagtgccagatcctgttctcagatgtgtactcatattacttcattcaattcatataacaacctcctgagatacatagaatattactctaattgtaccagaggagatattgaggaaaggttcaaaagaaatgttatggtaagtaacctcctcatactcaccacaggcagagagctgaagagctggattataaagccagtctcgctcaagggtttttagccactcaactttacagcttttcaagatgttcatttctgtttatgaataaggtgattgctttgtgggtctctaaattgttactgattgtggataaaataaattctaagggtgagactatctggaaatgtggattcattcatccaaaaaacatttatgaagtttcagaagtatgatgtgactggggttgcaaatcacaaaggttgctggaattcatgagccaaagggaaatttctataatgtaattatgacttggtaatgtgtatttgaagccacaccgtaaagtaaaatgaacatcagcctataaggaaaatgtctggattttaaacccygctgcaatatcaatagctattgaacatcattagtttatctgaacctcagtttcttgatctattaaatggaaattataaactcctgttatgcttgttttaatgagccattagaatggtcaattcacttactatttgtgaaggggttgtgtacaccaaagtgctatgcaaattttcagtgatatcttagctatttatctgcatgttgtatccccatgtaagatagtaaacatctttctatttatttatttatttttttgagatggaatttcactcttgttgcccaggctggagtgcaatggtacaatctcagctcaccgcaacctctgcctcctgggttcaagcgattctcctgcctcagcctcccaagtagctgggattactggccagtgccaccacacccagcttattttgtatttttagtatagacasggtttctctatgttggtcaggctagtctcgaactcctgacctcgtgatccacccacttcggcctcccaaagtgctgggattacagggatgagccaccgcgcccagccataagatagtaaacatcttaagcacagtgcatcatggatattgaaaagtctcagagtatccagcaagatgcttcatacttagaatgtacctcagagaacagaatgtccgggtattcaagttcagatatcttatgattaaaatatataaccattatcctttttctttcttctctttcttttctttctttctttctcactctgtcgcccagcctgggctcaagcaatcctccgacctcagcctctctagtagctcggactccaggcgcacactaacatgcccagctattttttccattttttgtagagatgggkttttgccttgttgcccaggctggtttcaacctcctgagcacaagcaatccacctgcctcggcctcccaaagtgctgggattacaggtgtgagccactgtgcccaacctatataaccattattaaacataggaataattattcatcaggtctgttatctttggaaaattaatttatttaactttgcattgctcatgtcaaaaataatattagtgactacttcattagccttttacatgacatgaaacaatgtttgcaaaccagttagcacacagtactaatgcataacattatacatagataatttaaacagtaaatagtcgctaaaagaattaacattaacaatgtgttaatgacatcaaaacataggatttccaaggaaatctgccctttaacatagaacaggaagtctgacaagactatctgaaagtatcaagtttcaaatgacatgatcctaggaggtgagaggaacatttttgagcttttatgaaaaacacttagaatttcctaagtccagctgttttcatgaggattctcatagcatgacaaattacccttttcttgctcaagactgtcccagtctcagcactaaaagtgggtcacgaatgttcaaaaactctgttcatataagaaacctttagcccaacaactaatcatactgtctcttctgctttctgccacacatctgggagtaaaaagttcccaatcaattcttccattctaaatcatatactgrttgttggaagaactaaatttacatgggaatgcctctggcctggtaataaatcgcacatgcttttttgtttgtttgttttgctgtctacatttcctttgctaacctttgatatgggaaatatttgtaaartgaggataccattaaatatgcaacacctttttaatatacttttcattccataaacttttttaaacattctgatttctccatatcttttctctttctgggctttggtagtttttgagagtgaaatatactccagttttcccctcaaaggtaaaaggaaactctatcagaagagrttgatctgaattattgatgtgtattttatctctatgtgttctgtgcctctccgcctgattttttcagtcacctgtgaagcatctgctatatgcttggctctctgttaggttgtagggagtagagagatgaattaataatgaaactacaccaatggagtacccaaaggtaaacaaaatatagaataaattgttggatatgtatctgcttgtgcaagaaaaataaaacaaaatgattaaatggagatgaagtttgaacttgagttgcaaaatgaataactgtccttcaattaaaatagatttgaagagtataaatgattatttctagtgagagataactagatggtggctataggacattctgatggttcagacaaatgcaagtgacttaggacagatatagcataggagaagaagaaaggtaagactcaacaagaaattgagctagaagtctggcaagggcaaacttatgaagacccaagacatgaagaaacccttgcatggttttttgccttcatctttactrtgcttgtctcctcattctttcatggtgtcaagacttaatagttcaagagtggaaaccgcagaagaaagtgatgcattctctctgctaacatcactatttattaatgagtaagatactcagataataagagattgagaaaacttctggcgcctgaatttatcaagagactttgacatgttttgggggcagttttcccccacatttttttacaatcttatctccaacatgaaactcattttaaaaagtacacaaagcgatacaaacaatcaagaacatagttattgatgctacttagatttcataagattgtactcagccaagaaggaaaagaagctgtaatggtacgggacctggactacagcaaaagaaaagactcttttsttttctgaagcaawtataaaaatattacctcagacactgcatgtcaggtcatctgtatttactaaattctcacatggtttcatccactctttttgtctaggcatcaggaacagtggaaaacacataatcacagtacaacaaaattaacacctttacaacatgataatctaatctacagattttattaatttctccatttgtctcaataacgtcctttactgaacaggaaaattcagaattatgcattgcagtcagttatcctattttaatttctttcagtctcacatacttcctgaatctttctggttttttgtttgtttgttttttgttttctatctttggcactgacatttttgaagagtwcatagcagctttatacaatatctctcaatatgaatttgggtaattttatgtcataataattttctaattatggtaactgaaaaaaatgctgaataagtgatgctgtacatcatattggaaggcacatgtcttgatttgtttcattactggtgataatttctcaagaagtaattcagtaatttaacatgataactttgtagttgggagtttaagtgtcccagttgagactaaactagagttaatttgacttgtgctatatgcgcacatgaaaagagacaatttatacagatttgtacttgaacaaaagggatttataactataaaacagtgctattttgaatatttcttgaataaattctaaatttatcacaaatgatatttgataaagagaacactgacttttgaatatttaaatccaattagttttaccattaaaaggcattagttggtctaccttcttatgaaaacttttatcataacacttaacatacttgagctaggttgtgtgctcactggcagaagacagcataccttattcactatttgactcaagaggtagctcatagattttttgaaataaatgttttggtagaacttagttacgcttttaagaagatagtcttaaattgaaaatgttcactgctgtggtttgaatgggtcctccaaagttcatgtgttgaaatttaaccttcaatgcatcagtgttgataggagggacctttaagaggtgattgggtcatgaggactctgcctttatgaatcgattaatattgttatctcaggaatgggctccagagagtggacttgttataaaagtgagtttgcccctctctttcttgtatgtaactgtgcttgctctctttactttaaaccttctgctatgggatggtcctcaccagatgcagcctcttaatcaatcatggacttctcagcctcaagaactgtgagccaaataaatttctgttcattataaattgtccagtttgtggtattctgttatagcagcacaaaacagactaagatattcactgattcagattaagctttctctatttagtttaaactaatgaggtttcattgtgttgcctaattcaataaacaattattaaccaccatctacatcagtgcttctcaaaacatttgtaataaatactgtgaactgaaaaagaagaaataatttctgacctcaacaaatgtacaattttgtatgactataactatcatgattattgagttattgtctcatttgtaaacatttcttagtggaaatgtgtttttcaacaccaaacttgccatagagtaattattgagtaaatgagctttgttgatagaataagaaacctagttttaggtcttgtatttgtgtctttctagaagtgtcactttaagcacttcacataaactcaatagtcttcatttcttcataagcagggttgttgagagaactaaagtatatgagataatttaccaaaatrtaaggtatataattttaattcaaagtcagcaaatgaagttaaatatattatttcataattatgcatacttgccaaatataagtttaatatttcaagttggctgtcttttactttatcgtgttaatatgaatattggtcatcattttcatgagttattctttttacatgtttgagttattttgctttatttaattttttatgtacgttatataatgtgctgcagtgatacttatagaaggataggaaggtaaggattatttagattttcacgtattgttacaccatatatgttaagaaatgtctaaccatagttatttaatagactttttttttgagaccttctcactgtctcccaggctagagtgtggtgacacgatcccatctcactgcaacctctgactcctggtttcaaatgattctcatgcctcagcctcccgagtagctgagattacaagcctgcgccaccacagccaactaatttttgtaattttagtagagatggggtttcgccatactggccaggctggtctcaaattcctggcatcaagcaatctgcccgccttggcctcccaagctgctgagattaaaggcgtgagccaccgcacccacccggcttagtagtcaaattttattctagtacatagttgttgttgttgtttgtttgtttgtttttccctttcagaagtaaaattcaaccttggaaattctacatcatgtatggaatcagtaatagtttagaatttaagatgcattttattatcttaataattttgtaaatggttttcaacctgtcaaaatattttaaatttattacagttgactatacttctatatatgtggtctacttgttcctcaattttcaatacatgtagataattttagatatgactcaaagataataaaagtaacaagttgcagacagcaaagtagcatgcagattcttaaagcacatttattttcttgcatacatagtacactttcaaaattaagagcgtgatttagacactgcttaaattttaaatttggtgatttttacatatgcaataatctacaagcatttagctgtttcaaatgttgacattgatgaagccaggatcagctctactatgtccactaaaattctttctgtatcacaattttatgcacttagaaaaacaaatgaagctaccygttttattaattaaataataaatatgagttgtctaccattacattttctaattatagtgtttttcatgtcaaaataagtttgagaaatagaatattgtataaaaatatcaaatatctctcatytatatcatcgttttaaattgatttcagttaaaattccattggcaattttagtagcacttgacaataaaattctcaaagtgatttaaataatagaccagcctatgaaagcaaaaggtaatttgagaataatgaagaaagaattgtcctaccacatacttgaatatattgtgaagcttcacctaaacagtttcctttgtgaacatatgaacaaatggaaatactttggaagaaacaaaatgtttagctcatagacagactttgatattcataagaatatactgtaggataatgtgttaacaaaatacatgtaaaacaataaactgttctaaaattatgcttagattacatgtgatattaaaaaagagaacccataatttatgtgtgkgtggaatgtttaatttttaaagagtatattaactacatatatttgtgatgttgtcaacaaatgcattatttatatctacattaattattttatatatgtatttagttgtcttaatgaatcagcccataatcaatctaattatcctagcttaaaacctagttgttatcattgaaatcccctttttttctaacttccaatagccaatatgtgactaaggtttattctaaacatcctttaaatctgcctcattgttcctatctaccaaattatcatattcaaaatttaatatcattttaaacctgaatggactactcattttaacaaccatatgtcccagatattcaatattcccttcctacattttagcctaaatgaattttttagttcaatgtcaacattttattaaaatccttcaattactagcagaaattgagggattttaataaatcctcaccaccagtggtcttttcacgtccaatctcattaaaatggcctaaattgccctgctaagtgggctcctgccttcctctctagcaacataacttgtctcaccctcacactctgcaacagtagcatttttttcaaatccccaagggtaccgtgctctgtggcccatcaaacaaatgcacatgctccttcttctgcccataattatctctgccctaatctttttattcagaactgaactcaaagtcacttattcagagaaaccatccctaacatgtgctcataaaacatcatacactcttccatagaaaaattaccagttagaatagtttgactatttagtgactagttgattaatgtctatctgtcccattagactttaaatcttatgtacgtgttattgctcaactttgcacccccattgcttggcagagtgcacagcatagactcagtatgcagtaaacagttattgattaaatatgtatgattaaatagtaaaatacatgcgtttcagttttgcaaagtatttcattttcaattttaaagatattggacatcacctaattcacatcaatttgctggcaacttacctttaccaaaatcatcaaggaaacacagagcccatagattaaacttcagatctttcagcctggtagacataagtctcttaaaacacagctaccttttaaaagctgtcctttaaaacttatttcacactttaactctytataaaccttctgtttttgtcaatttgatttactctcaaaggcatctgacattcttatatttcactcaccatgtctataaaacccttcttccctctttgcttatttaattctaactatcatttaaaaccaactcaggtatgctaactgccctctactgcacatatgtaaatatataaaactacaaatttgctatctactatcttgcatactttcatatctttatgtgcatatatgtcttttacaatwagattttaaagtatcatatgagaaagggttatgatgaattaagtttcctaataaggatttgcaaaatataaattgattgatagatgaaaattatggaattgtgaaacacaaccttggtacaaataagggttcagtggttcatgtgatgtcttattccatgtagttcaaaaatgtttcacgttatccagttagaatttcataaagttgtattttttattaagcattcttatgtagagaatgatctgtttaaagcagtaattttatttaaaagactgatctagtgataacatggatttattcaatacttcaacaaaaaaaaatctgttatgttctagtcaaaggatcattgttaatgatataaaagtttgtgaaatggagaaggtctggttttctaagaaattttgattattgtccaggcacagtggctcrctcctatcatcccagcagttttggaggctgaggtgggaacattgcttcaggacagtcgttcaagacctgcctgtgtaacatagcaagacctgtctctacaaaaagtttttaaaattggcctaacatggtggtgtgcgcctgtggtcctagctactcgagaggcagaaggattgcttgaacccaggaattggagcctgcagtaggtttgatcmctgcactccagtcttggtggcagagtgagaccctgtctcaaaaagamaaaaaagggggggaggatgatttctaattgttgttctataatgtcaatatcatgagaaaagtgtgtgcagaagctttctggtaaaggcagaatttaggtactgactgtagcgattttactcacagaaggctctgcagagtactggaatcagattttcatgagatttgaaatgcagatttctagggcccatcccagacttactgatatcagaggctctatgtgggtataacagacatgcattaatttaatatagctatacaacttttatcctaagaactaagcatatagtatttggaaataaggtttggtttctacatttgtggaaaatctgagtagaatgtcccacaaagtattggtgataggagaaacttccaattatttttggatgtagataaaaccattaaaactaacaagttatttagcttctatgcaaatttaatttattttaatgaatatttgctttcctagttaacaacatttgctaatgatatatttgctgtcaatagctgtttgttgacctgacatattaaaggctttataatctattattattattataatttttacttcaaccttcattttagatacagggagtacatgtatagatttgttacatgggaatgttgtatgatgctgaggtttggattatgaatcccatcatccaaataatgagcatagtacccaataggtagtttttttaactcactccccctccaccctctagttgtcactactctctattattccaatatttatgtccatgtgtatccaatgtttagctcccactcgtaagtaaggatatgtggtatttggatttctcttccttcattaatttgcttaagattgtggcctccagctccatccatgatgctgcaaagacatgatttcattctgtattatggctgcatagtgttccatggtgtacacataccacattttctttatccagtctattattgatgggtacctgggttgatttcatgtctttgctattttgaatagtacagcaataagcatgtgagtgcatgtgtctttttggtagaatgatttatttcccattgagtatacacccagtaataggattgctcagttaaaaggtagctctgttttaagttatttgtgaaatctccagactgctttccagtggcaggaccaatttgcattactataaacagtgtgtaagtattccctttactctgcagcctcaccagcatctcttgttttttacttcttaataatagctgttctgactggtgtgagatggtatctcattgtagttttgatttacgtttttctgatgatagtgatgctgagcattttttcatgcrtttgttggcagcttgtatgtcttcttttgcaaaatgtctgttcatgtcctttgcccattttttaatgaggttattctttgcttgttgatttaagtcccctatagattctgagtattaggcctttgtcgaatgcctagtttgcaaatatcttctcccattcagtaagttgtctgtttgctctgttgatagtttattttgctatgcagaagctctttagtttaattaggtcccacttgtctatttgtttttattgcaattgattttgtgaacttagccaaaaattatttaccaaggccagtgtcaagaagagtatgtcttttgttgtcttccaggatttttatagtttcaggttttaacatttaaatcgttaatccattttgagttaatttttgtatatggtgaaaggtagggtccagcttcaatcttctgcatatggctagccagttatcccagcaccatttattgcatagagattccttttcttattgcctttttttgtcagccttgtcraagaatggttgtaggtgtgtggctttctttctgagtttttaaaattctgatctgttggtctatgtgtctgtgtttggtagcagtaccaatctgttaggattgctgtggctttatagtacagtttgaagtcaagtactgtgatagctgaagttttgttctttttcttaggattgctttggctatttgggctcttttttggtgacatgtgaattttggaatcaytttttctaattccgtgaataattatgttggtagtttgaaagaaagagcattgtatctgtcaattgctttgggcagcatggccatttttacaataatgattcttccaatccatgagcatggaatgttttcccatttatttgtcttgactctgccatctgttgtattcaagaaactcatctcacatgtaatgacacccacaggctaaaagttagagtagattaagatatacatgcatatagaaaacacacaaaaaagcaggagttggtaatgttatattagatgaatcagacttcaaaccagtaaaaattaagaaggacaatgaagaacattgcttgatgataaagggtacaattcagtaagaagccttaagtatcctaaatatatatgcatccaacattggagcacccagatttataaaacaacttcttcttggcctataaagacttagaaaaccacacaataattgtaggagactttagcactccactgacagtgttaaatagatcattgagacagaaaactaacaaggaaactctagacttcaacttgacacttgaccaattagacctaagaaacatctacaaaacacaccacccaatgaccacagaatactcattcttctcatctgcacacagaacatattctaagattgatcacatgctcgctcataaagcaagcatcaatacattcaaagcaaattgaaatcataccaagtacactcttagaccacggtgcaatgaaaatagaaatcaatacctattgatttcttaatactacacaatattcccaatactacacaaatctcccaatactacacaaatacatggaaattaaacagcttgctcctaaataactgctgagcaaacattgaaattaaggcagaaataaaaaagtctttgaaatatatgaaaacaggggaaaaatctcaccaaaatctcttggatgcagcaaaagcagtgttaagaggaaagtttgtagtcctaactgcctttgtcaagacagaaagatctcaaattagcaatgtaactttgtacctaaaggaactagaaaaaaagagcaaataaactccaaagctagcagaagaaaataaataactaaaattagaaaagaacttaatgaaattgagacgtaaaaatctataaaaagatcaacgtaaccaagaattggtttttcaaataaataaataagattgatatgcctcctagctatatgaacaaagagaaagaaagagaagacccaagtaaagcccgatcagaaatgacaaaggtgatattataactgaccccacaaatacatcctcagaacccaaatatactcagagatgactgtggacaactatgcacataaattagaatatctagaggaaatgggtaaattcctggaagcacacaatctcccaagattgaatgaggaagagattgaaaccctgaatagaccagtatcaacttctgaaactgaatcagtaataaagaacctgctaaccataacgaaagccctggttcaggtgaatttacagccaaattctaccagatgtataaaaagaaaaaaaatataccaattctactaaaatcattccaaaaagttgaggaggaggggctcctctctaatcctttctatgaaggcagcatcagcctgatactaaaatctggcagagacacaatgaaaaaagaaagctaccgactaaaatccctcatgaacatagacacaaaaatcctcaaaaaaaaaaagtagcaaattgaatccagcagcacatcaaaatgttaatacagcatgatcaactggactttattcctgagatgtgaggcgggttcaacataggcaaatcaataaatgtgattcactgcataaaaaaatcaaacaatataatcgtctcaatactcggaaaatgatgtgataaaatccagcatcccatcatgataaaaactctctagaaactaggcatcaaaggaacatacctcaaaatgataacagctatgcatgacacacccacggactacatcatactggatgagtaaaagctcaaaccatttcccttgagaactggaaaaagacaaggatgcctactctcaccacttctattctacatagtactggaagtcctagccagagcagtcaggcaagaaaaataaataaaatccaccaaaataggaaaataagtcaaactatctctctttgctgaggatatgatcctatacctagaaaatcctgtattctgcctaaagactcctagaattgataaacaattttagttaagctttaggatacaaaataggggtacaaaattcagtaacatttccacacactaacaccgtctaggctgagagtgaaatcaagaaaagaatcccacttacaatagccacaaagcagatcagatatctaggaatatagctaaccaaggaggtataatctaattataacttgtgaataattacagtaaactttagatatttaattttctctaatggtgtaacttacatatgaccttcattgtttttataaaattccctagtttgaatttttcacattatatgcaatagtttacagttcacctaaatgggaataaagcattatagaccttcagcatctggttctgtgttgttgattcttttaaaataaagacatgaaataagaagaagaaataaagttacagtttttaaatttttgcttatttattgtattgaacatttacatattccatacctttaacaattatatttcaatattttatgcctagtttagagcagccaaattccaaccttgatttgctttattttaataatgcataatggttaaaaaataattagtaaacatctctaaaaggtaaaaaatggtcaaaatttgaattttattctgtaatgttatatttttagagttctagtaagatttaggctatggatttatgatatgtaggacatagactacattaatgtatttgtatgagagtctccctatgtgctctggaaactcacagatgagtatcattatgatccttgcctgccctcaaagggttgtgatttattagaaggagatatatatatgtaaagtaatgatccaacatctagctaaatgtatcgttttcaatataattggtattatattttaaaactttcatttgggcaatatgatttattattttcaatcactttcaatcattgctgcttcttgaataaagtatatttttcagttgtttaatattctttattactgaattgtataagtcatagaggggtgatatggttggctctgtgtcctcacccaaatctcatctggaattataatccccacatgtcrgaggaggagcctgatgggaagttataggattatgggggccgtttcccccacgctgttctcatgatagtaagttctcaggatatctggttgtttaaaagtgtggcacgtccttcttcgcccactctctctctcctgccaccatgtaagatgtgtctttcttttccttcaccttcctccatgattgtaagtttcctgaggcctccaaaaccatgtggaattgtacawcaattaaatctcttttctttttttttcttttctttataaataacccaatctcaggtagttgttgataacagtgtaaaaactgactaataacaggggatttattatttttctatgctcyttaaaatgatttttatctacctgcataacaagaacatgcatattaaaaatgtggtgaataatagggtaataatgacacatttaatttgmattacataatatgttctttaagcattgcctttaatctcattttgaattatttcacttaaagaagtaatactttaaarttattatgttttaaattccatatggatgtaattgattatacttttagattcaggatcgaccgatggtcrttatgcatttacttataattacaaaatggaaagtcctaagttaaaaagaggaaaatgtaatcatctacttagttcatgaatgcactttccgttaaaaaaaattataaatgtatatattaaaaatattgcaatatgtgtaaactgtttttttttcatattttgcctaaagcaaaatgccttatatcatgatagtacttgcatttctgacatgatctatacttaccaattttgaagtggctctttagggtgagattatacaggttaagaaatatttctgcagtatccagggcctaaattatagcaatcacacacaccaggagggggatgggaataaagagaaggkaaattgccaaaattgcccattagctttatttaaaaaaaattaagctattttcttctggagaattatcttgctcttgtggaaaaaataaatttttgagttaaactgaccagggctgcatttgctttctaacattttttagatgcaaagccctgagccaagttttctgagccataatttactcagtagaaaaatgaaaaatgaacataacaaaaccttatagagtttttctaaacaaatagtgaaatgatatttatgttccttatactctggaaccaaaactattctcacatgtttttctgtacttttaaaaaatgtaatcttagctggacgcggtggctcacacctgtattcccagcactttgggaggccaaggtgggcagctcacctgagatcgggagtttgagaccagcctgaccaacacagagaaaccccatctctactaaaaatacaaaattagccaggcgtggtggtgcatgccttaataccagctactcgggaggctgaggcaggagaatcgcttgaacctgggacacggaggttgcggtgagccgagattgtgtcattgcactccagcctggacaacaagagcagaactccgcctcaaagaaaaataaaatgtaatctcatcagtttcatagctatcatccacatgtcagtgactctcagattaatatgttaaccttcatatctatttaattataattttcaaaaagataaacacaataatctctggcaaatatgaaatgaacacatgccaaagattctgtttaactcattaattaatagcaagatattgaaactgacccaaagagcatatgagaaaataactgtatatatatgtgtgtttatatatgtgtacatgtatgcatgtattaatataatatgcaatttaataaagaaattttaagatttccaggttggagacaaaactggttaatattttacagggcaatatgctgtaactttttttatttcactagactaaaatgatattcatatttacacaatagcaacagcaaatgtgtaagttagcctccatccctacagagttggaaaatggcctasttaatagaaagtcaaggccagcactggattaaaagaacaccaagtgtctcttttccccatttccaactttagaatattttttcttacctttttttcaccataatttgtgtgtatatgtacatacacacataagtttagagacatacacaaatacaaaattatatagaatatataaataattgttttcacctatttgatatttccagttggcaatctagcagtgtcatctgttgtaacatttctgaaacacacaaatgcactccacctgctccttcatacctttgcatatcagtaaataatgccaccatctctccatgtactgaagccccaaatctaagatcatctttkatcctttaattatttattttcctttaaacccacagactaccataatcatgtcctgtttagagcacctaaaccacattacgaatgtatctattttgtattttttctattactatgccttctattccatggtgccatcatctcttactcatattactgctgcaccatagcttccaaacttcatttcttcccatccattttccacacacatgtctaaaccatctaatggctattcattatactttgatacaaaattatttccgttgcctacaaagttctatgaactggctctgaactaacttgcsaagttcatcttwtatgatttctgctacatattcactgtactacagccacattgatatttttggtttctaaattctcctagctcttccctacctgaaaaatagttaattccctcttcccgtaattctcacatccaggatcatcttctatttgtacctttgtttaaatatcamctcttaatagaggccatccctgaccacttaatttaaattatcactctctcattactctctatcatgccatcccactttattttcttcagaacacacacatttatagcttactttttaatttgttggtcttatttccaccgtaatatgagctccatggacatagctgtcttatctgtctgattcggcacagtctcctcagtatctggaacaggatcaggcacgtgggaagctctcaacacgtaattgtagataaaatgaaaaattgatacagatgaagtactagatattgctaagctctgcataaaagtaaggttcttgatgcagaaaatggttggtgtgccaaaaacgaaattcacttatttatcttttttttgatctagatgtggctaaaattgcaattaaagtataatgtgagaaccaataggtccatttccgttgggcagattcactgtgcacaggttaccaactgatctcagcctggtgagagagaacatccacacacaaaagaagttacaagaagcaagtttattttttacagataggcagtgagggacaacagaagcataggattcaccaaggctcaaaaaagctgaccacagtgaatggtattttgcctgcacttgcctgacttacaccrgagctgagggaccctgaaaggcagcccactcccaattatatacctaagggacaatgcctcaccgtcagaggctacagcattaacgaacatctcatttccagggtagactgaaacaaagcccgggctgttctggccaattcccccttacctcaggatgttgaattcccagcctatttcatacttattcttgagaactataagcaagaaatggtggggggagaactgggtcagtccaaggccacccagagaactgccttccactttctcaaatacaattcatgrtaatgaactttggaatgtactcaaaaagtactcaataccaagcaagttctactttgtgatggtaaatgtgttttgtcccaatatgaatccctataactttccttttctcttttcagcgtcttttgattgataatgttctacatccctgaaatgtttttatctataacatcataatctattttttggtataaagttaattttcagagaaagaaaaaaatgctcacaataagaatggagcatggggagtgtattagtctattttcacactgctgtaaagaaatatccaaactgggaaatttacaaaggaatgaggtttaattgactcacagttccacatggctgaggaggcctcaggaaacttacaatcatggcagaaggcaaagggagaagcaagcactttcttcacaaggcagcaggaaagagaagtgagagcacaggaaaaagtgttatttataaaaccatcagatctcatgagaattcactcattatcacaagaacagcatggggtaaacctccctacaatccagtcacttccctcccttgacacatgcaggttacaggtccctacctggatgcatggtgattacaatgagagataagatttgggtgggaacacacagccaaaccatatcatggacccatttgattatttaacaatattttagaggtaactgttttcgtaacttataactgaacacatgagatggactgtaaattgagtcttcaaaggattcaatgctatgtctattttggggtttttagggttatactttcatgatttacctcaaacaatttattaaatattttactttgttgtgtatttctattgtgtgctgatatattcatttgagggtaggttttttctccttagtggcctaaatgtaagtgcagtcaagagatttcctccaggagtaggagaattagaggccatgtacttgttgggtttacagctgtttgaattgagagagggcaactcactgctttattcttgtttttagtgtgagagaggctgtgaccctttggtactctccaccacatctacagtcattcaggaacaaagaatatttgtttcataatcagtggtgcagattgggatctgtgaagtggaaaatgtaacagtttgtactatcaggatcagggtgtaatattattggtaggactgaaaagtgatctgaactggattggaagcattattaaagcacagatagacccayggatgactgaaaggaaaaaaaamgcaagagaggatactttggaagtcatttctatattctgacccttttttgtttattaagggaaagacttggactttatctttgggtttgtgtgtttcacaaaaatgcatatgtgttaacaaggacattacttggctagaactacatactctcatatttcctaatagaacagtacctggtatgtaatggccacttgctaaatcactaaatacttgttgaatgcatgtcatgtgaataaaagatagatttctctatgaatagagtagccctgtgtgatayacgatgggaaaagagaaatccatgtgaggacatggaagcagtgtgggtgctgtggcttgaatgtgctccccaaaattgaaatgttgaaactgaatcaccagtacaatagtattaagatgtgagatctttagaaggtgattaagtcatgagggcagaatcctcagggatggaattatggcccttatagaaaggctagagggagtgcctttgctttcctccactgttctgctatgtgagacacagcatttgcccctctagtggacacacaacgaggcaccatcttggaagcagaggtcaggttctcaccagacactgaacctgccagcgccttgatcttggacttctagcctccagaattgtgagaagtaaatttctggttttataaactattcagtctcagatgttttgttatagcagcacaaacagactaagacaataagcttacttaccatgatagggtaaagcctgaggaaaaattacagggatttggaaggagccccatctgtcaagtgacacagcggggatggaggtgttagagtgagagtggcagctcaggaaggcactctcagggagttccagcaacaagtcgttgtaccaacaggattgctgaacttgatagatgtaagcatggtgtcaggtgtgggaccaggaagacagactggatcacataagttagtataccaagctgggacatctggcccacagccttaaattgtcatacaggaatttgaagaaaacaaggttatagaatagccttagtgataggaacaacgttaaggctctgccttaggagccagggcattaaagcataaaccagggcataagccatgactatgagccatgctcaattttgaaagagccacctggattactgaaattgttcagttagtcagaaaagtaattaaaacatgatatttttaaagattacaattaggtaacaagattttatttaaataaaacatatggatgtgttcattcacttattctctaatctttacacatagtgtccatttttttttttctttttgagacagagtctcgctctgttgcccaggctggagtgcaatggtgcaagctccgcctccgggttcacgccgttctcctgcctcagcctcccaagtagctgggactacaggtgcctgccaacatgcccggctaatttttttgtatttttagtagagacggggtttcaccgtgttagccaggatggtcttgatctcctgacgtcgtgatccacccgcctcggcctaccaaagtgctgggattacagkcgtgagccaccgcgcccggccagtgtcaacatttttttttttccgctgtgtgttctggggcactgatttcacttccattttgtaatttcaggcagaaaaaggttaactcagcagtcttggttgctcacaaactgcacattccaaagaagggtctgtctttggtattggcttttgactgaatcttaggaaataatctctgagaacttgaaatatactactgataagaatatttttgtatacctggggccttgggacatgctttaccagtctgagcagtaaaggttatgctaagaatgtgatttatggtgaatgcctgtttttgctctgagggaggggagagtctgagtagctgagttcaattgcactggcattgcatgcttgcattactgacccccaataaaaaccctggatgccaaagcttgagtgagcttctctggttagcagcacttatcatgcattgttacacatcattgctgaaaggattacatacatcaccatgagactccactgggagaggacccctggggtgacttctgttggtttctcttggacttccttccttgcaccttgcaccttttccctttgttgcttttaatctctattttctctgtgataaaccataaacctaggagatttctgaatcctgtgagtttttcaagcaaattattgagcttgaagttatcttgaagacctccaacacaatttcctgtataaaccaccacatactgcaccatccactatttccaggttttgtttctttgaagaaggaactcttaatagaacttggaatctgactgcagattctttccaaattttataatttttgaattaaaggaaaagttcagcttgcaaaaagcatgtatgcaaactaacacaagtgatttttggtgggcataagagtactaaagggagtggaagtgcagggacagttattgagtaataactaaaacttattgaaygtgtattatttgccaggcagtattgtatgcccttatatgtttcaacccatttaatactcagttatgtcatttagatcaggagtccctaacccctggtccacggactggtaccctggcctgttaggaatgaggccacacagacagaggtgagtggagggtgaatgagctttactgtctgttcatgtcttgtaagatcagcgggggcgttagattctcacaggagcaagaacactattgtgaactgctcatgagagggatttaggttgtgtacttcttatgagaatctaactaatgcctgatgatctgaggtggaacagtttcatcctgaaaccatcttccacccatccaccacccagttcatgaaaacattgtctcccatgaaaccggtccctggtgccaaaaagttggggaccactgacttagatgtctgcacaaatacagtgaaatgaatatctaatagtaaactaggataattcaagaaagaaatttgagtttttaatttaccattttatctacttttcctaaaatactctctttaatttatgaatgccttaaattttctctttattgagaaccatggtagttcttcataatgttgtatttgaagataaattttcatactgatatttcaaataactgtaagtcatgttttggatgactataatatgagacccctgttgaagaattatgttctaagatatcaacccacaaggagtatctactttagataatttctttacagctttctttgtcagttaagatttttagtgaaaatttagattttgtgctttttactctttcatagctatggcatgctaaatgttactaggcgctgtataaaatgtgagagaagagggcaatatcctgccctgagatgcttggaatttgtcttaagtgaacactgtaaaaatgaactcacctcaaaaagaagtgacacaagaaaacttactttggaattaaacttttaaatgtaaactttggttacataagttaaaatgaagtacatawtttttctattttgactgatcttgaaatgacatagccatgtcacatttatctcctttaatattataattttaaaatgaggatttagagggaatagctttttttgcagatggaaacccaactaaatatatgaataccactcattttaacattaaatacaggcatgttgttattgaggagtatgaaaaaaatttaaaagtaaacatttttatgaaaaaatttaaaaaataaacagtttctatattaatgtaaaagctttaaaatatttctcacattgtatttagcatcaataattcattcttcaattattaacctataagaaattttacattcaacaccagaaataagaacttaaaatgtcatgttttgtagaccctcccactgatatatcatgtcagggctaaacttttattttcttttcaataattgttcataaaatgaataggggggcacagcagtgcttgaggagagatataaaaatcaaacattaattttattcagatgagatgatttgtatgcaagctgatcaggctacaagcttatctcattacaagctcaaggctcttagagtttcatcattcctcagatgccattaagtttaataatatgactgcctgtattgtgtattaaaaatgtgtgtctattctgcaattccatataatggtaaagtgtttatgaatatttattactttgtctttagtgctgtctactttagactaaatagcaaagttaattgcctatactgctctaattgcattgtttagagaatgttctctcctctttctgttcagttgcaaagatattggtaggatgcagattttttgaagtgcaataattggcatgagaaaatttgcacagacatagaattgcacaccaaattaaaacacagtaggtacatttggtctctggcaaggtcaattagctctatacccttctctctgagaatgcaagtggccaatcagggtaattttaacagatgcagaggcacagttttgcatatrcaatttgtttcaagaaattatgataagcacacaatgttttttaactgttattttaagttcaggggtacaagtgcaggcttgttacacaggtaaacctgcatcatggaggcttgtygtacagattgtttcatcacgcaggtatttcattatggtactaggcttaatgattcctggttctctcctttcactctctaaggagcacaaattttaagtgacagcaaaaagagtgtttgcaagaagtcttttaaaaatgcgccatttaattagacattcactttattattcttttcaaaattagtagttctttatgaaatgcttcaatatagatgttgtagtttttgttaacattattttgttttggtttttcaaatttttctctcttcttcgttttactctcaatggaagccagtaaatattttgttctgaaatcaagaggctttaaatttagccttagatttgtctctcaaatattgtcttagagagaccactttatatttctgtatgtgcttctatgctgtccaaataatggatcccttacctatatatcataatttacagtgtctcctctataagttactaatattagtgtaaacataagtaattatactactgatttattcccttaaatagaaaaactttcactcaatatgatttccattttttcctcctctctagtaatccatcacactatagcaatttgtccaactttaaaggagagccaacttttcttctgtaaatatctccaatgctccactcaaattaggattatacttcacccagacatgttatttaggaggaaaaactatcctaagtaatatttaaaaatgtactgttaaaacatttaataggccaggcacggtggctcacgcctgtaatcccagcactttgggaggccgaggcgggtggatcacgaggtcaggagatccagaccatcctggctaacacggtgaaaccccgtctctactaaaaatacaaaaaattagctgggcgtggtggcgggtgcctgtagtcccaggtacttgggaggctgaagcaggagaatgacgtgaacccgggaggtggagcttgcagtgagctgagatcgcggcactgcactccagcctgggcgacagagcgagactacgtctcaaaaaaaaaaaaatttaataaatttctgctatcttatttcttctctataccctcacctcatctagtcttagaaaactcaacccacctttctaagacatatatgggtccaacacatgcatgcccttctagttgaaaacaaataaataaaaatcataaacacacacaccagacacacacacacatttcataatgtaggtgttccacatctttttctagacattctaaagacaagaaagaatccatccaatgttgtttagatggtctgataatttagtctgtttgttgagtgttgtgcagtagaaatacttccaaactttacagagttggtgaagtttaatatatgtaggacattgccaggtgtggaaaatgcaaggatacaggtaaatggacatgaaagtacatgttataatctggaaaaaaaaaaggagagaattagaatgtataaagcaagtaccaaataaggtcgattgttgtccaattgtaaagggtttgaatctcaatgatggtaaactttacattttgctgattactattgagaagacactaaatttttaattaataaataaaataatattataaaattcatgggaagagaagctttcaagaaataggaaaatctcaaaaatatccagtgctgcagtgtctagaatgaagaccttgaagaggccattagatcggataacttcccagttcttagagagatttaaatagaataagagaacacggaaaagaaaccagtagataacattctattaaaaatacttttaaaattaacttccaattctcagtccaggggagtgaatggaagatgaaaaagcaggaggactaatgtaaaaaagaaaagaagaaaactgtatctcatcttcctcagagaatggtatgtgtatctcttaactaattgaataaacaaatatgtgttgaagtgaaaacacgatgggacatgtggattccctcaagaatgcaaaaatgttaattttacctgtgatcttagcacagaataacccgccagccataattagaatatacatgtaagaaaataagtggattttaccactactccctggtaggataactcttagaccttggtttcaggtcttcggatcatagaaaacaaagtaagaaaatgtttattttgctatgtaaatattgctatgctgttgtaaatgttgctttgctgttaaaatttgataatattattmtgtttctgatcaaaaggaatgtctgcaacatatttttagtgttccccaaaaatgtcttagactgttttcattcatagttataatataatgtttgatctgctaatttttttgtataaatacttttcatgtcgcatctagtagtaaaaacctgttatgcagactgtggctgtagctgtgttcccctagggtctaatattggaaaagatttctttgttatagtgaaggatacttggagaaactctatttttgcctgagcaaaatctttctgttctttctttttataatcctaaaataattttcattcttttttacatcagtattttcagaagtgatcaaattaaataggtaargtaaataaatgactaccaaattagcacaaatcccacctcactaacttttctgtgattattagataagcccaaatataaacatatttaatttcctgacatgagaatccataacaaaacacagtatctacagaaggcaccttcggaacacctgattatctcaggcacatggatgttttcacaacataaaaatataattaggtctagctttggccaaattcaggagaaaggtttgagaatctgctacttggtaattaacgtctaattgttggtaattatgttgcttagttttgtgcacaacccaatttatttttcttgcacaagggcccataccaattatactctggccacaactgttaaggctatcaacaaattaagtactgattgccagaactgcatgaaaatggtctcctaccaatttgcataaaggaggctcctaagccaaaaaaaaagaaagtctgtgttaatgttggatctcccatttcatttctaattatctactaatggttagtcaggccagaatttatctcagaagctagaggtggatagcgatataagttttagagatctatttcttattatgcttaaaatatttagacaccatttaaaagttgtataccctgacagaaaagttggcaaggttttgcatttaaacagctttttgtttctgcagttgcttttgatttactttagtgcagcagagttgagtctttaatattttttttgttttgttttgttttcctgcaaaataaccacttggtgcaagctgaagcaaaatgtgaaatgaagagcatgcattgaaaatgtttactcccttattgataaaatatttcttctcataaaagaccccctaaaaattgaaaataatttaaaatctccaaggactggttttatagtataacttatgagtattttttaarattcttcttgcagtgactacttaaataactttgaacataaaaattaaaacataaagtctcttgtaaaaccttactataatgataattatgctactttagcctataacgtacaataaagatatgtactgaaaatatgttacacattacagttgtgatgtataatactgagatcctgataaaatgaatctgcagagtgaaagtatttggggttgtaattcatggaaacaatagcttttagtgttctgcactatattaaaagaatgacaatgttgtgatgaaatgtaatgtataaaccccttggtcacacataccaattcttttctgacctgaagaataatgtgtctctattttaataatagtgtcatgattcttagcatcctatattaagtagagataagacctgtactcgagggtataactagcaatgtagtttcaattaggagaatctatcagcgttttcactgcatatagctttcctggtaaaaagaaatattttacttactaaaataaagaatatttattaacatggcctacagtgactgcatattaaagctgaaataaaaaatattaattttaaggcttgatatgggaccaggatatataaacgaactatatgtaggcttatgtaaaaaacgtaaagtacatgaaaggtcttttctgtcctctctgtttaaatttgtccgagtggtctctcctggatgcccagccacctagtggctccctcttcagcaaaccacgtacttgtgcgcatcatccctatgactggaatttatttaacacatattatgtgctaggcactgtgctaggggctgacatcacaaaggataaatcaacattattcccatcttggaaaagaatgccataaaagtgaggcacctaaatcacttactagcctatgttctttttatttctctaccctcaacatgttagtttctattgccttcatgtgctgggttcaacaatatctacaacctgctaaaatagtatgtttagtattcagggtttctgattaaaaacactttttacttctttcttttcttcttacttctaatttctgccactcaagttttcaagtatctgtgttttatcggaatatcctgcattggtttttcggttcttctctttaacatactaaggctgattaagtaagccaaaataaaaatctcataacagcaaagaaccttaagtacctgaagtcttgtttttcaggtgagaaagggtaaacttttcccaaaaataccctaagcgtaaatttttcctttatttccaatgagttagtctttctttctcccataacaagctatctacacctctattacattgtcatagactgttgtttatgagtttccctctttttctgcatgacaatctcctctaaagcagaaakccagacatacttctgggtagcaataaattaaatgtaaattggttttgtccagggaaaatttcacccttaagccatgctgtgaaagcaggtgtgtgctttttatgatagatctgtatctcattggagatgattctgaaactaagacaacttatgagttgctgtgtcatctggcttcactatgtagaaatttggaggatcccaggtaaatattgggccccctcaggcatgggattcactgctatataaaaataccataaactgggtggcttaaccaacacaaatttctttcttacagttctggaggctgaaaggccatgattaaggtgccaacaaatttagtttctggtaagggttctgtttctggctcatagacaatcgctgtttggcagtgttcttacacagctttcatttgtgggattttgaagacaataagtgggttctctggagcctcttcttataaggggacattaatccttttgaatgaggtccccacatttctgacctcatttaacttaattacctccttataagatctatcgccaaatacagttgcattggtggttagagcttcaacatatgaattttgagagggacacaactgaatccacagtaatatattttggttataaacaagaaaagcccaactgaagcctcgacaacccccaaccctccacaaaaaaaacaaaaaaaaaaaagaatggaccacaatgcctctctccatccctacctatgtagttattgtaaccaccaatatctaaatatgtaatataaatatataaacaatcccctactatatattcagctattcagctgtaaaggattagattttgcacagaactacagctatgaaaatgagagaaagcaggattggtatatactgagacatttcctagtagctgattgctgagattacagataatagattctgatgtaaaatacctcatttgatcatagctaagtttgacaggaaaatgagcaacccagagatcagagttcttacctcactttaattacatgaaaataaacatgggtacactgacctcttcacaagggagaaaatggaattgacagctgagaacctaggcaggaagctccatctttaacctgcacatgtgtgctatattggcttgattttcatctctctgtgtgtggcctcactttctctcttcacatccacatgaccaccttcctgtttacatcacctaaattctgggcataaaccatagatcaaattagctaaacctgaatttcaatgctcagttttcaagagagaatcagacttgcttaactgaagtcagaggtttgtccttagtaggactgactaaagccaggggagtcagtaataaagttgatgaggcttccttagaattactgtttcctcatattagtgttgtttggatcctaacataagaccactcccctgtaagaaaaggacastaactctcctaataaaggtagaaaatgctgacatcaagcttacactggcatgaagtgaaaggcttccttttgtcgggtctcttcttggcctataaggttagagatatttccagtcgctgaagccaccagaaatagtcttagcgggtatgaattgcacttgaattgtataatctacatgagttaaattataagcttttagttatgatatactcacttcctctgaaacttaaaaagcttttttttctttatgactaaaaagctaaacttgaacattaggtatagctggtaattggttaatagcattttatatttcagctctgaaaaataggggccattccaagaaaagattacaaaaccctttctgtacagctaatagaaagtgttcagtttaaagctggcccatacartagtaaggtatattgtcattcatagctgatgacagccatgatccttactgttttatgcctagacamatgaaaagatttatgtgataaaaggcttataatcagtttaaaatcaagcagttcttcactcaaattttccagtgtttaactttgtatttcattttcatctaagttattttgaaaaaatgaatttgagcagctatttatttatatttcaacttaaattgaattcactttattttattgataattccttgagaaacttgtctctgttaaacttgtgtccttctaagaattgtatcctttgtaaaaatttatctactctgtgtgttaactttttctgtctacaaataaccaccaaatctcagaggcattcaaaaagaagtatttatctctgaatttgttgatcagatggtatttggcttatctacacttgtctatgtgacacttatttttcagagaccagcaagctagctcaaccatgttcctctctcatggtgccagtggaaggaaataaggcacacctaaaagaatgagcacatttcacctttctgatttcatgacactctgcacatttcattggtcaaagaagatcatggcatcaatggcagggaaaagcataccactcacttggaagttgggggtattcaaagtaaaacaataacataactatgggttgaataaaaatgtatctcttctagaatgaaaattaatataaactatactgtgtatgtgttgaggagattagtcattctcattcagcatgtataatgaacattgactatttgtcaagtacattctagttgctctaaataaatttgtgaacaacacagaacaagaaactatgattgaacctattgaacgtgaaggttggtagggggcacatattattttattttattttatttttattatactttaagttctctgggacatgtgcagaaaatgcaggttacataggtatacatgtaccatggtggtttgctgcacccatcaacccgtcatctacattaggtatttctcctaatgctatccctcctctaacctcccaccccccgacaggccccggtgtgtgatgttctcctccctgtgtccacatgttcccattgttcaattctcacttataggagataatgtggtgagaacatgcggtgtttggttttctgttcctttgttggtttgctgagaatgatggtttccagcttcattcatgtccctgcaaaggacataggggcacattttaaaccacaattgtttcttcattatttttgagataaatgttatatttagaaaatgtgtaattacagcaatatgaggggagttaatcaattctgaagagtccagaaaagcttccttgctgtaatgacatttaatatatgactaaaggagaaaagttaatcagaggaacaggtagaattaaagagttccaggaagaagtttatcatatgaaggccttggggcagaaaaaagaaatttaaggccagtatagacatagaaggcaagaagaatgatataaaatactaaatgagggagaggtcagggcaaaaagaatccttcaacaatgttaaacttttagaatttattttaggatcrttgagaaaccattaaaggcttttaggcaaggtttgggtgacttaatcagatttgtatttgtaaaaggtcatagtaactgctggatgaggaatggatgactcttaatgcaaatgcagagcagctaaaattctcatgcactgcaggtaggattatgaatataaagttgatacaaatgctgtggaaaattatttggcattgtctagtaaagcttaagtcatatcctcaaagaaccgttttttttctattcttatttaaagaaactcttatatttgtatatcagaaagcatatatatacattttcattgaaatgcctttttataattgtaaattaattaatgattcatgttagttattaagttaatctttagaaattgaaaaactcccaaatacccatcaacattggaatgggtaaataagttatattttacttatataatgaaatattatacatccgtgaaaattttwaaaaaagattcatataacatatatgaagataaggaacataattttgagtgaaaaaagttgtcatagaagaatatatacagtattattttatagttaagtcttttaaacatataggaaaaataaacaatatattttagggatacagacataaatgataaaattttaaggaaatcaagggaatgactgatgaaactaaaagtcacaaaaatggtcatgcctgaggaaagagagaagcacccagggggtttcttaaactgctggataaattagtcatttggcatgttagtcttatcttttatagcctttaatgatttttataatttctaaatacttaataaaacactgtaaaacacatcatagaaggataagattagatgcaaagaaaatattttgaaaattatcagaaaaattcagtagaaatatagttaattactctagggtgaggcaaacaagatggagggaagtcatgaggacccaggaagatgatgttgggagagactctgaaggacacagcattttccattgtggcctttcacacgtgatcttccagctgttcctccccacatcctcttgcacaggatattattgtctaactgttcctctccacccctcttgatacaaggcaggctgtctgtggctgctaatttataaggaaagttcctctcttcctgacactagtccaaaagaactttctaccttcctcctccaagtctgaatgcccgcttaagccagcagttctcttgttaattttcctccatagtgtgagtacctaatatagagatgatttgtattttatatatatatggatatatatggaaatatatatatggaaatatatatgatatatatggaaatatatatatgatatatctatggaaatatatatatgatatatctatggaaatatatatatggaaatatatatatgatatatmtatggaaatatatayatgatatatctatggaaatatatacatgatatatctatggaaatatatayatgatatatmtatggaaatatatayatgatatatatatggaaatatatatatggatatatatggaaatatatatatatgttatatacaatgtttgttgagctagatcattgagatacattgagtttgagttgcctgatatccaagtgggaatcctgaggaggcagttaggtatattgtctaaccctgagaagaaaagtctagggtagtgaaaaaaaaaaartgattgtaacattagtcataggtatgggcaaaattgcctaaggagggggtatagagtgcaatgagaaatgagtctgagtttgagtgctgaggaactcaggaatttgtatgttggatgaagaaggaaaagctggtagcggaaagcaaggaagaggagccaagcaggataaaggaaacaggatagagtggagtatttaatcatgtcttcagaagcaggcctttcagaacgtgattcacattctggtgatttattagaaaagtatttctggagaaactggtaagggagtagggaagaggaagaaaccatgtaagtgtgtgattattgggaaaatcccaactgtagcctgcttccttaggcaagacctgaagggtaaaatgctcctcagaatttttcccaactccatgcaaatgagctgaacttttatactctcatagggtatttgccgaagtcagctccatgtggttattggctcccacgtactgtctgttctctgcaaaagggtcacagttgtctgtatgcagtccttaaaatttaactgcaaatgcaggaagttagaagcaagtttcataggaggggagtataggtatgcagatatgataaaagtaatcggaaggaatctggccatagcacctacaaatgtctgcaaaatatggcatcacagaatccaaagagagttcctagacatggtcgattttgttaaatacttttcttgagcgtataaggtgagtaaagaactgataagaatttattagatttaatcaaagggcttgtttaaacttaggactgattatataagaagtaatgttttataaggagcttggactttaggcaataacagtcactgaatggttttaagaaggagcctgacaaagtcatatatacaattatctcagtaaggtcagtagaaggacagatgaggatatttaattgaagcctaggaaaatatatgggaagctgttgcaaaagtgcaagtaatcaatgataaaggatgagggtagtcagaatgaacagaagcagcttttttatttatgaaatatttaagatgcaaaataaattgagtcttatgtttccatgaggaaaaagtagtcaagaatggctgtaggtttctatatgtggttacagagttaagaaaggaatatgaatgggatgctgaaaataattcatttcgacttggaaagaatgtatataaggtgactctgggacattctggtatcctgacagacactaaacagttgaagtctgaagtctgtaatggagctcaggacaccagataggatttcgcatataataatcttatcatatttttatagtcaaaaatatgagtgagccrggcgcgcggctcatgcctgtaatcccagcactttgggaggccgatgtgggcggatcacaaggttaggagttcgagaccagcctggccaacatggtgaaacctcgtctctactaaaaatacaaaaattagccaggcgtggtagtgtgtgcctgtaattccagctacttgggaggctgaggcaggaaatcacttgaacctgggaggcggaggttgcagtgagctgagatcacgctattgcatgccggaccggatgacaagagcaaaactccatctcaaaaaaagaaaaaacaaaaacaaaaaaacaaagatatgagtggataagagaatgtaggaaatgtttgcagggtaggaaaagaaataactgatgggatcttgagtaatataacacttaaagaataacgaaaccctatcagatgttaattgaccaactctttcacattgcataacgtcttcgtgatgtaactgcttgtctaatcttattgtcattcctattcaaaggacacacttatagatgcccttcctaaccactctatctaaaatatttgtcctccacgtcaccacccccacctccattattctccatctccatgctttcttttttcttcatagcacatgcaactagctggcattttattatatattcatgggtatatttatcttgtatatttccagtagaatgtragctacataaagacagagttttattttgtttcattttgtttttcccaccaaatagagcccctgtttttagaacacttcttagaacataaaagactcaataattcttaattgaattaatggatgactgatctatctaacagactaatagagtgattattttatggatatatttattgatgttttaaacaataatgtttgcaaaatcaaattccctttatgtatyactaatctatgagaaaatgaagcaaaactaattctccagtaataatataaattcttgagttgttctgaagaaaccaaaactacagttttagtccaaatgaacaaaattattttcttctcttatctttccatgtttaaactgtatccctaagccaagcgagtcacaatgaattaatcagtagttaacttgtatccagatttcacatgcatcgtaatttagcaataatgtgtttggaattagaggttattgatcaccttaatctgaaaaacatattttatcctgcagttataagttgttacacttctatacaacattaagatgctgctaaatcaaagatgatgctgacattctctaagggacagattctaatcagtgtcacaggaaagcatgtagtttaggacactatgtaaatggtcactataattttgtgtttgttgcggaaaaagaaaataaataggcctgagagatatccagaaggcaggtatagttcataactatccttttatcttcccagcgtttatcttgtctgcccccccttacttttttaagtaatacaacctcaatatttgcttgcgtaattacaccatccagcctttgcctgaaaccttacaaataagatcacgcacatactctcccctgatagtcatatggctgtctgtctttggaatttgaaatttgaactgaaaaacgtttaaaacaaaaatgttgggaggtgatttttactaatggcattaccctcatgagactgtccattagttcctcctaccatacttctagaaacgtctttgatcctgtcctccttgatcttcagactttcctaggatttcaaaagctactctatatccttctaataaactcatgttttatataaaccctgagttggttttcattgcttacagtcaaagaacaccaacaaatccagatgctctatttatgattcttttaactacccacaaattgagcaatatatatgtgatatggtatgataaaagaaataaaacaggtatagttcaatggcatttcataagacgcttactttctggatttgggggttgtgtgtgttcctgaaaaatattcatttaaacaaaggtatcctatagatttgttcctggtgatttgaaataccatgaataatacctcatatgtaagaaaagtttctttttctaagttcagctgaaatatcttattgtaggcaagcctgttattaaatcttcacatytgacaaacgactttctcttagccattctgtccctctccactgttcatcatcccagccttagagatcggcactcttctttgaatgcattagtcactcatgaataatgacataaaagcttagcartgctccagaaagagaggcttttattatgcttttctaacaaccattaatatctataacactcagcagttttctaattttcttttataaaaggacaagctgtaactacatgacaaaacggcatggggttcaggactattactggtttcattagtgagggtgacaaaggaaaaaaaatagaaaaatgggttatgctgctatcaggcacaagaaacccatgattaaattaaaaactggtggatgaagggtggtccttaaatttataaaccctacttacaacaaaaaccacaccatatcaaaaaaatatttctttttccaaacaaacctttttataatgggkttggggtgggagattctgcaagaaacaagaacttgaaatctatattagctaaaattttgaagtgaatatagatagtaagaaatgtatatagtcctataatattcttgacaaagttatgtccaagcaaaaatgaggactaaaaattactggttaatcaaataaaatattacattttggaacttgtggatcctgtttgtgaattatttagacaagactattagaaaacattatttgagtctaactaagtggctatcataactgaaaacaaaaatggtcacgatttatgagtaacatagaattgtaaaacacataactagaaataatgtgattaattatatgctgttttttcttcttgaattcaagaaaaataaaaaatgcaaacgtagcatttgaactttttagtatttttagttattgttatagtgacgtaaaattaggaataaaatctcctaagtttgaaataaaacctaaatttagcaactaaattgcatatttctaagttctccatggaatgagatgattactttgtttttgtttyatcttgtttttccctaattgaatatgtgtcatccaaaaggtctattgcaaagtcatgaataaattcttacagatatttttaccaaaattttaacacttttacttaactgaatgcttattaaaggagatttattaagcatcaaactgtttttcattgtaaattgcagctccttggatctttacatataaggattttgaatccatttattagaaaagaagttaccacaggtaataacctgcattataataagtgtaggaagttagtgcaataaatactgacttaattctgttattaatccagtgaagtaaccctgattgtatttagagcttttaaggaatcttcataaaagataagctgtccatcttttattgtacattttaaattagagaaaattatcaaactgatcttaaatttgcagtgctttatcaaaaaactcatttactctaaaatgcttccaaaagcttataaggcaagacaagtaacaaagtcgtcatttacaaataaggatactgacatttaagaagtgaagtgcttttgatgggtggcaggctactgcaatgcttaagtatttgtttcccactctctacgctctaaaccttcccagatacaattaaagagcaatctaatcaaatataaatgagcaaattacttaacatgtgctttctaagtacattttatctgcttatttttctaataggtagtaattggaaaagaaagtatacttctcttgaacaaaattatgcaaatataggtatgaaacaaagcaataacaaaggtacttcttctagacacaggaaaatacttaagtctcaaatacttagcagatgtttctcccaaggagagtaatataaagaacaagtcactttgtttctgaactgagaaaatatatagactcggtaaagaaactgaatccatcaatatgatgaaaaaatgaatgatgccatgtttagaagtaaatttgtactttgatttaatttgacatatcaatttgggatccttttgagaaataataacatttaaccctactgtcagtttttcttttttcttttttttttttttttttttgagacggagtctcgctctgtagcccaggctggagtgcagtggcgcgatctctgctcacagcaagctccgcctccagggttcacgccattctcctgcctcagcctcccgagtagctgggactacaggcatccgccaccatgcccagctaatttttgtatgtttagtagagacggggtttcatcgtgttagccaggatagtctcgatctcctgacctcatgatctgccctccttggcatcccaaagtgctgggattacaggcgtgagccaccrcgcccagccgtcagtttttcacttgtgttttaattacaagaaagtttctacaggtagtgtaattgttttataatttcataagattgtggaagaagtgatgaaaggaagaattattctaagtcataagctcaatagaaaaattcaggcaaaaaaaaagagaatcgtctaaacactgttgaattttagaatcaatttatattgaaaaaggaaagttcatattctccttggtatgtaactgctcattccattctgttataagtcacatattatatttgcttacaaataaagaaaatatttcaaatgtttcagacagataatcagaaagtatttattgagtactcattgaatacattcatgttaatttcaagacaaagagatttttgtttttaatttcagcatgagaataaatatgtacaaacttccccagactggtagatcctaaaaaagcttggtgttgaaagctgtccagagagagactaaattcttaccatcaaaaaaatttatggaatttttcattttaatcacttgtgtcatttataattttactgcctttagtgttatctattctcgttttaaaaatgtactagtcagtttgattcttacaattgaattaaatgggccacacaatagtttatatttgaggaagactattaattatggctgctataataatgtagccaagactttagttatataatatacagcctaagcagcttatttttacaaattaaatagaagattttcttaacggttgtattgtgcaggctgaaaaaaaaaaccagtttttataaatcacctccttactttgatactactatcttgattatcagtaaattatcataaaagaattaagggtctcgtaagataaacatcaaagtctgactaatgacataaagccagtaaaaattcattaaaatattttagcacatttttctcaagacaatgaaaaataatgtctattgaaataaaaaatttatacaaaataaaagaataaatgccaaattcagcataacttttaattattgcaaaatacccctttgtagatcatgtgtatcagctattattcagaaccttgtacttcaagaaatatgtaatggacctagagaatgtccaaatatgagtatatgaaattttgagagcaatagaaaactcaccctatgaagaacatcttaaaacaaggacagaaagataagggtcatttgcctggatcagaaatgaattagtatttattgatccccagaatattatatgtactatcagcttctagatccatgtattctatatacattattgtactatttttcaatagactaagagatagatattattatcacattttatggaggaattaactgaggttcagagagaataaattacttgtccaaagccgtatggctagtaattggcatgatctgtctatttcaaatgctgtgcttttcaacgttaaggtctggaaaacttgagagatgttttcactatagttctatcactgatgaactaacaaagtatgaattagttattatataataacagttttaatagtttcagcaaaggtagtcaacattatagtagaaatagtactagtaataataatgataatagagatatgatggtgatggtggtgagagtaaaaataattataatggttaggtagtattgtgcatcagcatatattcaaactaaatacaatatggttttagctcagtggtaagtttaattcaggtgaggaatattttgaccaggtttactgaaaatttataaatttaaaataaatattgaatccagataccaacataaatttttaagattatgtaatggatgtattattataagctcatacctatttcagaaaaaaaatcattgaaaacattacttctactggagtctaaattaatattttaatcttatatttactctttgtacatatgaatttgtatcagctttctcaataaagaagaaaagcaacactagagaattttcttattcagatatcatgttcaagtcagccatttgtattgagttaggaaagcattgccttatattatttactttttataaaatacagatattatttttcctagatatagttaccctaaaaaatcagaattccaaaacgtatgttgcttatccttctaaaattgtattgtgagccattttattacatttggcatggaaataatcattctcacatttcttatatttcatattcaatatggatttatgtggggtattttctttatttttgtgataacaatctttaatgtttattagtcagtactaaccaacattgtcaaagaaatgcatcttttataagactaaatttaaatgtttatatttttgatgaaaattatttgtttaaaaacccacaggctcatgtgtcagctatcctttgggctgtaaaaataaaacaaaatcatttatctgcttttcagggaacataattccatcagtataggcaatcatagatacttgtttaaaaacttcaacttaaatcctacataaccaactttcatcactcctcagagttaatgctctctatctcttagtaaaagtatcccaattccagagtgtctcaggcatttttcacacagtgcatgtgctttatgttgtaggggtagactgatttgctaaagttggaacaggaattaaaagaagttaaagattgtgtaagcaaaaactcagttgtatgtaagcaaacccagttccccgtgaggaakagaaaarggctggagtcctttaaaattaactctctgtttttctctctgtggctagtgagccttatttctccctttcccaggcattgtgaagactgtttctctagctgtgcagctgcaaggtcactagacagataatctcaagttgtaaaacatgttgttccttgaaaagtaakaaataatgtaatgcatgtcttaattgaataactgtctttgtttctcacttctgtaatatgcttccccctgcacagatctccccccaccccacgaaatgcttaaaaggtagcttgactctttgttcggggctcagtcctttggatgttaatccgactgggtcagtgcacctaaataattaaataattcctcctcaacccctcagtctctctgattccttaattattctgcaccaaagtcagtcagcatatcccattcacctcttgctcagaggtgaatgtaggcacatagaccaatggaacataatagagarcctagaagtaaacccaaatacttacagccgactgatcttcgacaaagcaaacaaaaagccaaagtggggaaaggacacccttttcaaaaatggtgttgagtaattggctagccacatgtaggagaatgaaactggttcctcatctctcacctatacaaaaatcaactcaagatggattaagggcttaaacctaagacctgaatctataaaaattctaaaaatataacattgaaaaaaacccataatactttattaaatgcagcagaagtactaawctctggctcatattttgaagaaaatattgtgttattttggtcttctgtagcttattgagctgcattttccttctttatcacttattctttgaacacagatccacgtattttgatatatatagtcatgcctattagtctgttttctcactggtgataaagacatacccgtgactgggaagaaaaagaggtttaatgggacttacagttccacatggctggggagwcctcagaatcatggcaggaggtgaaaggcacttcttgcttggtggcagccagagaaaatgaggaagatgcaaaagcagaaacccctgatgaacccatcagatctcgtgtgatttattcactaccatgagaacggtatggggaaaactgcccccatgattcaaattatttcccaccaggtccctcccacaacacataggaattatgggagtacaattcaaggtgaggtttgggtggggacacagagccaagccatattatcatgtgttgcataatatttcagtcaacaaaggacggcatgtatgaaagtgatcccataagattataatggaactcagaaattcctgtcgcctaatgaagtcttagctgtcagaacgacaagcattcctcatgtgttggctatgataatggtggaaacaaatatattgcactgcctgtcatttgaaaatatagcacagaattatgtacagtgcagaatacttgataatgctaaagaacgattgtgttactggtttatgtatttactatactatacttttaagcattattttagagtgtactacttatttttttaaaaagctaactgtgaaacagtctctggaatatccttcaggaggtattagaaaagaaaagaaggaattgttcccataggagatgaccgctccacttgtgttactgccccaaagaccttccaggggacaagatgtggagctggaaaacactgcgtagatgatcctgaccctgtttcatactaggctaatctgtgtgtctttgtcttagattttaacaaaatgtttacagagcaaaaatgttaaaaaattaaaaatataaaaaagcttatagaataagaatataaagaaaatatttttgtaaagctgcataatgtggttgtgttttcagctaagtgtcattataaaagagccaaaaaattaaaaacaattaaaatgtttataagataagttgaagtaattatctattattgaagaaagaatattattttttataaatatagcatagcctaagtgtatagcacttatgaagtctgcagtagtggacagtaatatcctaggccttcacatttactcactagtcactcagagcaacttccagtcctactaagttaatttatgataagtgcccaaacagctgagccatttttaatttttatatcatacttttattgtaccttttctgtgtttaggtatgtttgaatacacaaatacttaccactgtgttaaaactgtctacactatttagtacagtaacatactgtacaggtttgtagcctaggagcaataggctacaccatatagcctaggtatgtagtgggctataccaggggtccctaacccctgtgccgctgatctgtacccatcagtggcctgtttggaactgggtcacacagcaggtggtgagccgccagctagtaagcattactgctccacctcctgtcagaccagctgcagcattagattctcacaggagtgtgaaccctattgtgaactgcacatgtgagggatctaggttgtgtgttccatgtaagaatctacttaatgcctgataatctgaggtggaacagtttcatcctgaaaccatccccgctttatactgcaccactgcccacccctatccgtccattgaaaaattgtcttccccaaaaccggtcccaggtgccaaaaagtttggggacccctgggctatacatctagattcatgttagtacactccatggcattcacacaacgacaaaattgcctaacaatgcattttctcagaacatattcctgttgttaagctgcacatgactgtatatatctgctattatttttaactggtctgcatatcatagttttgagtttatctttaaatgaattatttaagatagtgatttttgatatacatttatcagtatttgaagtttttgtttgttaaaacttgtattatccagttttatcacaatgtcagaaactgagatatcttatttctatatttgacttggtgcaatagtttttggaaaatatgtttattcttggtgtgttccatgccaaatttagtacaacggttaaactggcttttttaattgtgtaattaagatagtctgtattctttgttgatgtcttaaggactaataagttatgcactggagtcttccactatacttatacttttgttaaattctctttttatttttaatattatctgctgtgctctaatggcttataattcattttatatacatatatattctttattagtaatatgagacactttatttttaaagtcatctttattcaatattaaatattaatactacagttacatatagcattttaagtaggctttgtttgaagttaatttttaaacaatttttattctgctttgtctttaataaatgacatatagttaattttgttttgcaatcaaatctggaaatccttgtcttttcataggtaattttaactgattcctgtatactaataactagtagattcaatcttgtgtgttayataatattttctgatttttracttgattttctcatttttttcttttatttttatgtggaagacattttcttttagtgaataaatgaaaaaaaattctgatttccaatagaaattttcagactcatataaaatgtcttttttagtttatgcagctgtcactcattgcttccttttggggttattatcattttaaaatttgatattactttttctgtctccattaaacctttcacatttcaagattttagtttatcacatacaacttgctctagatttcttggtattttgtcctctccaattatattttcaaaaaaattagacattttctaaaatgccctcctgtttattgtaataattctatttcattgaaaggaaactattctttttctataacgtagtctctttgttttcatatgtctagtagttttactgtttgccattcttatttgttgtttattttcatctttgttattgggtcatctgatgtcttgagatgatctgtaacattatatgagtcaagaagggaaaaaatgggaatggttattttacttggctgaaccacatcagttcagagatgcagtaatataaaaatgaatgagacccaaaggcaccataaacagtgagcatttactttttgctataccttttttccctgtgtgggatgtagcagcctggaactactataagtaaaatgctagttctctttgataggtacagtatatatgtctagtgtacatggagtaatccctgcttgatatgatctccaatagctgatgtgtgttccacaggtgttggtgagattcagatttataaccaaacacattgcttccacaactcttctctatacacacactggaacactgtcagatcccgccttcatccttccaaataagatagttattgaggtttagtcagaatctggccaactttcctgataagagcagttgtcagatacaaacaggtgagttacaggctgtgtgagctctktcttcattctggtcacatttccactcacttttgtagcgtcctatattccttcaagtatgtagaatgtggataccatcttttcctggtttttagaactgatacaaatattatcaatgrcaagagactggggacagacccagaaatatgccctcacctctacagggaaatttatttcagcattatgtcttctccatgcttggtaaaattatagcactaaaaggaatgcaccagatttactgtatgaccctgtctctgtgccaggtagaaactataagtctcccaaaactacatcctagtacctgaagcaacctcttccacctctctgaatagcctatctggtataagaccacagagacctctgaatgctgctattttctaagactgatgattatagtcattttcagccgaaattttatgagccacatctgctccactgatcattagcacttgctctacaaattaggatgttttgtgagctttaccaggatgggacttaccaaaccaaccaacaaacaaaacctcatactttacacttttcccaatatttccacttttatcaaaggttccttaaaattcttagaatgcgaaatgtatctttcactaacttacagtattgttatatctttccattattctgtgttttcttgttctgttctgcactcagcgtaacacttgacatgtttttaagtaatctatcctactagtaaattatcattaatatttttacagcttattataactttagttttaagtatacatgataggcaagtgagtttggagaatgcaaatctgtttttgagagaagcagatgctaatgacacaggtagtgtagtaagattgcatgtaattcagaggttgtatttttaaattaactcataattttgaagtgtatacagtccgtgttatctttgaaaaattcttaaatcactctcatatctccaggaactgtaaaaaggttcaccatctatttcttttggcttattttactttggttttgtcctatcggtggagtcgtagaatcatttggggaatgattaaaaatgaaatttaaggataacaatgggactatttttttcctacatctcatttcatagttgaattaaataagtaaaatgcacatacaagggactttctagtaatttcataatagaaactaaagcctatccttcgtccgtattttataaaataacctgattgaggcatttcaaaaaattcttaaatgcatcaaatatataacaagataatgagttgctggaataattgaatgaaaactgaaccaaggatgccacgtccaggactcaaatcgtttttactataaagacatttacagacaaagaaaaacttcacactggaatttcaaagaaatatgaacatccaattagataattcatgaaatgtcttaaaacagtagctagtacataccaagcactcagtaataaatgttagatattcttgtcattattattaattctaacaatcctccagtatagcaaatatagttgaagatttggtattacatgtgtaagataaaaaaggctgaagtcatagattctctgtgctcaaactacattcagatgattatgaatatatctgaagcccaaaaactaaggataatatttttttccatagttgagcctaccatcatgcatctgatacaatctcccatgaaaaacactcttaataacagtaatcatatactttttgtttcaaatcactcccagcacttacactgtcaaatctctcaggacactgcaatcatctctgactaaactttgacagttatttatggattctacaacttttctttttcagctgctatttttatgagctggctaaaggagaaataccattcacaaagaaatcttgagtggccactggaaagtaatttctgggagggtcggcactttgcattcagcacatacagcagagcctagcacagagtagaagttcattaaatatttgtagaatgaatgacttaatcatgactaatactggcttgtctagatacaaccaaaagcagtgatatcctactggccatctttccccaatatatattttaatgcmgctatcaatgcgttatgcctctccctttctttttataattaattacttagaaataggtaaaaataaaaatttatctgtgttgacacaatttgtatcacctttgatgatgtattaagaatactatcattttgtgcatacttatatatatacacacacacaygaacatatacacatacacacacattaaaagaactttcaagtattttcatatgtttctgcttattgttttgttgatccctcttttatgcactttatagcatctcctagcagattaattcgaagcttaatagaaccatttccatctgactagatcatcttgcagtgtttatatatatgtagtataatgtttactttcatcgtttgtataattaacgtagatgaaatgcttgcacaccactttagagatgttatagattaattacctatttagttataacttagataagatgaaaagtgtcatataaattttaagcactacaattataataactttttgcatagctgtaattatactaaaagtgtataaggaaaatgtgatgttgccacataaaaatactttagaatatagaagacagtaataataacagtggcacaaatgtattagattttacatgttaggatgttgaaagaaagtaataaccraaaaagagcacatttttatagtgcctgaatggtggaatatgtatttttactaataaaaaggcatacatttttaaaatgagtacttttaattatttgtgtcataacttatatacaatgaagtttctaagttattacaaatatattgacttttcagaaacatggtattaattttctaatggttaacaatgacatagtatgtcaacagtttataattatagcagctcgagtttgatgactatagttatttttcaaatttttagttatttctgagcaatttcaataaaactagacaacaaataattaaaagagaatatacttgtgttaatgtttcacgttcattattcattttcttttgagctgttatgatcacaattgtgaaatgttgttaaaattaatcatttgtataacccttgggggaaaatctattccaaagctatggaagccttcattaattaaatgggaacaattggttacatgtatgcagggggttaaaaagtgatctgcttttggcatgtttttgcagtggctagtaccagttgttcctttccatgtttagtgcttccttcaggagcttttgtaaggcaggccctggtagtgacaaaatctctcagcatttgcttgtctgtaaaggattttatttctccttcacttatgaagcttagtttggctggatatgaaattctgggttgaaaattctattctttaagaatgttgaatattggcccccactctcttctggcttgtggagtttctgccgagagatccactgttagtctgatgggtttcgttttgtgggtaacctgacctttatctctggctgcccttaacattttttccttcatttcaactttggtgaatctgacaattatgtgtcttggagttgcttgtctcgaggagtatctttgtggtgttctctgtatttcctgaatttgaatgttggcctgccttgctaggttggggaagttctcctgaataatatcctgaagagtgttttccaacttggttccattctccccatcactttcaggtacaccaatcagacgtagatttggtcttttcacatagtcccatatttcttggaggctttgttcatttctttttactcttttttctctaaacttttcttctcacttcatttcattcatttgatcttcaatcactgatactctttcttccatttgattgaatcagctactgaagcttgtgcatgcgtcacgtagttctcttgccatggttttcaggtccatcaggtcatttaaggtcttctctacactggttattctagttagccattcatctaatctacttttcaaggtttttagcttctttgcaatgggttcaaacatcctcctttagctcggagaagtttgttactactgatcgtctaaagccttctctcaactcgtcaaagtcattctctgtccagctttgttccattgctggcaaggagctgcgttcctttggaggagaagaggcgctctgatttttagaattttcagcttttctgctttggtttctccccatctttgtggttttatctacctttggtctttgatgatggtgatgtatggatgggattttggtgtggatgtcctttctgtttgttagttttccttctaacagtcaggatcctcagctgcaagtctgttggagtttgctggaggtccactccagaccctgtttcccagggtatcaccagcagaggctgcagaacagcaaatattgcagaacggcaaatgttgctgcctgattcttcctctggaagcttsgtctcagaggggcacctggctgtatgaggtgtcagtcagcccctactgggaggtgtctcccagttagactactcaggggtcagggacccacttgaggaggcagtctgtccgttctcagatctcaagctgcgtgctgggagaaccactactctcttcaaagctgtcagactgggaagtttaagtctgcagaagtttctgctgccttttgttcagctatgccctgcccccagaggtggagtctacagaggcaggaaaaatctgcccattgtgcacatgtaccctcgaacttaaagtataattaaaaaataaaataaaataaataaaaataataaaatttaaaaagtgatctgctttatatttatatatatatttttttctcttgttacaaacatattgcctatgtttcttacctatttttttctgtaaaggtaacatatttaatcataagactgaggcccaggaaagttgagcttgtataaattgttagcattgtaaaacatagcaaaacaatgttcaaatcttttttgaataagatttgaataatgtgagcaatttaattcatgatatgccaccaaataaaggaaatattactatagtgacattattcaaatggcatttccttttgacacactcctggaacccagttttattcactttaatatattattaaaaagaaaagccagatgcagtggggcatgcctgtagtcctagctacatggaaggctgaggtgggaggattgcttaaacttaggagtttgagttcagccgtggcaatatagcaagactcctatttctattaaaaaaaaaaaaaaaaaaaagaatggtgggagggggccgggcatagtggctcaccgctgtaattccagcactttgggaggccgaggctggtggatcacctgacgtcaggagtttgagaccagcctggacaacatggtgaaaccctgtctctactaaaaatacaaaaaattagccgggcatcgtggcrgaygcctgtaatcccagctactctggaggctgaagcagaagaatcacttaaacccaggaggtggaggttgcagatcgcgccactgcactgcaacagagcaagactctgtttcaagaaaaaaagaaaaaaaaggaagaaaaatacttaatgaaaaygggagtttgtcactcctctcagaatatggggtttagagtaactgctgtctatgaaatttagtaatagatgttagtaaataaaatatacctataatcttatcttcttaggaattttgctctggaagtgggtcttttcctctggatacttaggccacatctccaactgttatataaatatatactgatataaaaattaaaataagaagataattttaggctcattttattaaaaattattacttaatttttatttaatactttaaatcttgttttatctcaagttttgtcatatcacttaaaactatgtaacattatttcattgtataaattaggctctcttgagttctactgttaatgtgattttttaatgtgataatcaccacatttttcacagtcaactcttagaatatgatgcatccaattttgttactgaaaatgactcatctattgaaattatacatccattttagactaataaattatcattttgaatctacataaaatattaggaaaagcatgaaaatactctttccagatgcatataacataattatattgctttctggtcatctactgttttgttaattttatcagtataaaagcaatgcattttatttgctataattccatttttattacctacaatagctcatagtgatctctatttatttttaaagtcagtataaaccatccttttaaaaaatctaatatagaaacatatctaatttaatgtcacaagcccttggtttataaacatatcatttttcactaataaaaaatggctcagttttggcattcagcattggcttgacgagaagaaacccctggtattggccatcctytctctcatatgtctctgttcccgtggctaatcttttcatggccccattgcaacagtactgcatagtcaaggataaggattggctgacattcacagaatgtttcatgttgtccacatcattactaagcagctcttctgaaacagttgctcttcaatgggcactaacataaaatacaaagatccatgtgttctatccctaccaaaatgcctccctcccagaattttttgtcatctataacatttggatcttgttccttgccggaccctgaacaataggacaagtcattgcaaacttcctggaagtcttgagtacccattcttcaggctatttctccttcaaaggctcataaaagagwtgcatttttttcctttgcccagtgtccagctacactaggaaatggcattcgatccccttgggaaataatcagaaaatgttattcatgtatcctggtaataattctgcaacattttcttctagttatttgaaggtagttagtcaaacttactttgatctacaacttgggtgaaaaattgcagttttctgttttggtgacttgtctgccttttttctagtttgtgatttttttctagttatgcaagtcaaaatcaatttaggcagctattcgtctctcttaccactaggaacatcatgacccattagtcatcaccacagattcctgtatttcaaggcagtttgactgccattttggccatgaagttcattatggtgattaagtctactttatctctgttggatgaattagtactacttgaccatgaacattctggagttccactggccctaatgatagtaagaaaatgtcagcttctcctactcttaaccccagtttctagaaatcagccactctctccttctcaatgatgccaatagcctcattaccagtgcagttcttaatgttttggtgaaaggagttttatttatgcccttgagaaatttggtagagtgatgatggttcttcattcacataataaattcattctaacattcctatatctctgcattttctgactctatccttaacattttgtcaaggtagtttatgcatctcctctaatttgccatagtctatcatcaggtataagcttcaaaaaaacattccagtggtgtattaagagcagctccagatgtccttatggcataagaaatggaaaagtgctttttcaaataatacattttcacttgtcctgtcttatattctccttcctgctcaaaatccctgatacactctcacatatattttcctagttcacttcagtgtgtattagcaaggtcatgcaattttttcagtatgaaggtggttttcttctttagcccatgctattattttgttctcaagataacttatgccctggcttatttattgttctgaaggaaatgaggagaagtgaggtacacctttgagtagaacaaacattcccttgtgaaattaactgaacctatgcagttgcatagtgcaacttttttttaagcaatgattaaagtataataagatattatcaaatatagcgtctcagaaccctcaataaataatttaccattaatattattccaacaaataaactttctctcctcacactgatagaaaatacaaatttacctaacaatgttttaatggaaatattttcctgttatatacaaattaaaattttgatcttctgctgttcaattgcattgatatttatccattgaaaatggtccctaaagtattgatgtcaatagcttataatagtgaaatcatcctgtatgttatcgtgagtattacctctggagagatttctttcaaccatacttattaacaatgaatacaattggattwcatcccatcccccatcttgctcaacttgactgacagatacttattttcccatgaggtaattcactccaatactggacaatttgagttaaaaattttttcctaaactgtgattagatctacttgtaaatgagttccataccagtccttattaaattttctacagtaatctagggtatttcttctgttttccaatttaagaactgaggcaaagtgaataattactcttaattcttccattagctttctatttgacatctaatctaacatatgtcttgttggttttaccttaaaaaaaaatctctaatctggccacttctcaccaaatttacagctgcttagtccgagccagtatctttgcatctttttctatctggattacttactgcagcaacttctgactgataatactttcgcctatactttattgttcatagagaagtcagagtgcccgttaatgcataagtcagattatgcccgacttctacccctatgcttgcttcccatcgagaagaaagtgaaatgctggctctttcctctaaggcccaatgtgatctgggccctgaccatcaattcaattgcattatctgtcatttttcctgctatagttgggccagagcagcctttatgctattctttgacatatcaagcatattcatttctcggggatgttcttactttctggaatattattgcaaattcttcatgtggctactgttatgggctgaattgtgtcaccccaaaattcatacgttgaaatcctaaacctcggttctcagaatgtgagtgcttttggagatagaaagtttaaagaagcaattaagttaaaatgagatcatggtggaccttaatcaattcaggatgttggctgccttgttcattaaatcctatcacaaggtagatagatgttcaataaataagtgttagaagacaagtgctctgtcttcctaccatatcacttacttgtcttcttccccagaacaaacatcttgaatttcttcgatcttccttctaatgtattcttttcagaactcttgacatctcatttatattcccctttgaaataagaaacttacaatgaattattctaagatgactttgtcactgagaagattgggaccattatttatagtgacctagattaattaacactacttagagttgtatttaccttaaaacaacagttaatgttctctataatcaattgaagccttaacatcttattttcatacaaatgaaaatactattcttctagtctattctattaatattgktttataaaatatctgaatataaggtattgtgtcatttaaattagtattgtatcattaaattatccttagttctaccccaaatcttaagtatatgacctaattgattaacaagtcttcttgaatttttcctccacctttttccactcctgaatcagtttgttcttaatctcagtgaaccttttttatccataaaatatcattatctccacattgtcatactcagctttgtctcctgtctttatttttttaaatatattcattaacaaccttatctttatcttaaaagaatgagatatgtgctaaatgtatgtaccactcttccttcgtcaactggtacccaaagaaatggtaccgaaatgccagctrttacccacatctttgagattactaccaaaaatatccatgaggtcttctgactgtatcattttctccataaaataggggtgtcactaaacagtaaaacagatgaattctgttaggttgtccgctatttccaggagtgggttcaaagatgatttataatgcctggttacccccaactacctccataaatcttagtagctttcttgtcaccaaacgtcacattatttccttagggtaggtaatagattttaacatctttaaaaccataataaaaaaaaggaaagatgaaggccggggggcggttggaagagaaatgagatagtagacctttagagtcagagacatggtttgtcaaatctcagctatctaatatcaattattttgccttgggcacctcagagaacaactctgaaactatttctgcatttcttatatggcacgagtaaaataaattagcatgggttgctataaaaattgcagatggtatacattgaagcatttaacatactgtctaaaaaattataaatgcctaattaatgatgatttttattgcttttcattttgaaaaaaaaatcaagagagcccatatgaaacagattgtatcatggccttgttcattgtaactacaattttttattttacttatttttaataaatgtcatgttgcatgtcatgctcgcaaacctctgttgaagagttaacacagattgtttgccatgctctggagaacatagtccctctactcagatcacaataataagaattcatacccgtacactacctattgacttgtgaggtacaccagatttaacaggtgtcctttttgattactgacaaaaccatttaaggaayaccaaaagaagaagccagagcagaacgtgaggccagagaagggacgacacaccaggatattaataaaaatacacaaaaatcaatcatcagggaattgaaactataagagtagatgtgtgattaggcagagttcctcacctagaaaaaatacttacagaagttagttgataatcaggtgcaaaaggtagacacagaagcagatatagagaactcacaatcttatcaacccactaaaaggttttagaggtgacagcatgctttggactgctaagatttctattgtattttaaaaggtgaatgagtgatttttcctttcctcatgagacttactataggtcttttgagacttttccagtctctcttgctttcctggaaatgtttctgttttgtttcgttattttcaatccattaactgaactaacctgcatgcatctcagtttcttgcagtgtaaaatcttaattaaaatgagacaattagaaatcaactagtgcaggaatcttaattcactaatgagcagttgattytacccttgttcacccaagtttcttgaatacagacaaggatacatctaktttttctactagttcacttctctttctgttctaaattctcacaatactccaaatctccaaattttagtaaaaactacatcgttttcctggctttaatgctctacttctccttttccttttcatgtttgcattcttttttatgctttaatttttttattctgtaatatttcttctatcttacctaaagagtttccatccttgaatataatttttttagcatccacacaaaaaatcccccaaaatcacctttaaccaaaaggacttgctcttsattgtttatgcctaataatcagctcaggcagaaaagcaaacgttgcaccacagttagattttgtgacaatattatctctacatcaatattgcttaagtcactcttgataattcttaaagatttgttcttgacatttttttcaaaaaactgctatggatttatatcctcatgtttctgaatcaaaattagagtttaaaaataaaataaggaacaagtttattttgcttagtatgacctgaacacgtaggcaaacaattttgttcctgttaatcaaggttatatttttcccttattttggcaatttccattaattccacctgaggccaggatctcactgtttcatgccaagattattatggtggtctctttatttatttattttttgtttccagcttcagttatattttctcttacactcctagattaatgataggaaaacacttagtaatcactacctcactagaatttcactggcttccaattttcccccaaacacccttgcaattcaagcctctacctttctttttgtttcctataatatggtgctccccaatataagctttgtttcaaaagacttatcactccattgtcactcaccaatgccatcttccttcctttactcactctgtttcctcctaactatttcagaggacacatctagttcattaattatttcatggctactataacccacaatcgtctccctaattgtcaaacttttattgtatgtgtcctttttattacccagttaatacttcgttggtcattattttatgcacattcatttgctaaaaataaatagcatatagtagaaaccatttttcttatttctattgttctcagtggtgagcacaataagaggcatataatagatgctttaatatataacttctggctaatcagtatcaagcttccctgaaaatgtgaataaggaagggggcaatgctgtctgccactattggtatttcccaagatactcatggcattttccaactgtctctgtagagaaagatgagcctacaaggacattaagtacgtctcattgcatttaatgtaaaaacaaaaaaaagggtgggggggaagtaaaccactagaaatgaggaagagagaggcgagattacatagcaccatttaggggatattgaaatgtcatccaccctctaaaggtgatagagattttatctacagagagctaaatgttgccataaacctgaatctcacttcaataactattattcctgattataagatttttcaagtatgaataatgcatagatgatatgcacttcagtcttcattttttctattgtatttagcttatacttacttgctcccacaggtattgagattctgaattctacttatatacatatgtatacttgcacagtatacacatgtacatacatatttggcattttatgccaacagcattttccagtagttatatttttcaaataattgcattattgaaatgactggtgatacacattcagccccaggtggctgtcttactattgaagtgattacagaaagatcgaaaagatattttgcattccatttgtggttgtcttttattgaacttggctaatgtaacatgcttctgtgattttaggtttttaaagtaagtgcggtccccttgaaagtgtttgaacataagcgtgggtgaaaagcatgtagccactctagttaagctttcaaaaagtgtttttaggaaaggtttgaaattaaggcttaggttatagacttcctttaacatgcacaaataattctcactaatcaagggaatcaagcacatatctacagtgcaggaaaagtaatctttagtacttttgtttaaaatattttttaaaatctctttctctaaaataattaaatagaggattgctaggcatatttgtcatctctctggaaaactgagaaatgaaatctgaatttatataacttcaaacrtaatgagccaaattcttgttccatagtcttgtattatgtatacatgtacaacactgatatcattttgcaaatacaacaggatagtgagatatgatgttatttgcatagccacaaatagcaacatttcttatttgattatgaaatcctgacaaatgcttgatagacactacacaaattcccatcctcattttcttatgccattaacttttaggttagtttactgatgcatttatatttttatacctgtgtaataaaatttcttgtgcgatgtgacaacaccattgctttaaatatatagagaaaattagtctccctaaaatgccagaaactttctatggtttaaaaactataaaagttactttaacattttattaaattcataaaataaattagtattkgttaaagcaaagtgttctactgcttatattttaaaatgaaataaaaataattcatttcatatacatgaaaaatatctttagcatctttaaatttttaagagaatacaatgtaacaaaaaatagtctcrctgcagtctgcatagctcaaattcacagtagtacatataacggcataatagttatacattttcatagttatcatcatataaattaatattagtatgtacaactgtacaatagtaccatagtaatgtaactgtaattcttatcctcaactgagtattataaatcctataaacaaagctttgatctcaaagttcctttagacttttcaaatctttcatgcttatactttacattaaaaacacaaatacatactttttagagaaacgttttattacaactgaagaaatcgactataaggcttaggaattattttttagaaaccgttatttgttagaatttctcataatgtttaatgtcctaaaaatgacattaaagaactttaaaattacttaatatgcgtttagaaaaccagattttttcattcaaatataaatgtaattgaagagttgatgtggcatcatatataataatttagttttctcttataaaaagaaattamcccaaattctgcctttgcctttagagtcattgctaatttcacttcaaccccttgactatgtgtatatatagagagagagactatatacagagagagagactatatatatatatatatatatatatagactatatatagactatatatatatagtctatatatatagactatatatatatagactatatatatagactatatatatagactatatatatatagactatatatatatatagtctatatatatattcatttattgttttacagaggtagaatcataatgcatatacttgcttaagatacttccattgccactattatttagatactaatctcctaacatgttacgtaaaagatcttgcttgatctagctttacctggggtaacagcagtcctccctgactgtctattatacagtcattttggcattcttctgaccctcaaaattcctgaagttataacttttacagggcctttgcccatgacttttcttctacttggaacactttccatacttcttcatctgaataactcctattcattctccaggcacctttcccacgaagtttttttcatcctaggctcatttagattctcctgttatatccactccagaggtcctgtctctttcctcagtaccactcagttctcttgtaatggattaactcagtgtggtcactttttttacatatgcatccaccacaagtgtaaaagctccataaagttagggatttcatacattttgcctaccactttttttaaaaaaatgtgtgactagccacatggtagacataataaatatttgtcaaaataatgaatcaatataayttgcattctccttttttctacctaggattataccataaatatttttccatgcttgtaaacagttatcatccctttaaatgaatgaatcagaataatagtgataattatgataataataatactgacataacatcatttacaaagctaatctatataattaratattcaaaacattaattttgaattaaacattaatctctgaccttatagatagcattgataagaatatcttcatgtagatttctgttttcttctgtttaattaactctttaagaaaactcagaaacaatagctagtataagaatatgacttctttgtattgccacaagtaactttctgaaaagactatattaatttacaataccacgctatatatcagtttctctggaaactctccacaaaaagaggagacctattaatttgtttgttgttgttgttattacaaattgtcttagaagacacaaatagaacaattttggtgctagtgtctaattaattacaaattttttgaaggatatttgatagaaagagtatttgacaaatttatgactgctgctgatctttagatgatcaatagtgctgatttaaatcccatgttgtagatttactgaccatacaggatctctgcttcccttcaggagtcagataattctatactgtcatctgtgtgattcttgttaactttaaaaaaataataatttataaattgagaaaggagattttatttcttgtgaaggtttacagcctacaggtggccaaactgtaggctgggaagtgtgtctccggtgaagaccgaagacagacactttgaaggagcaggagttggggtagaagcttatgctgaacaggttggctaaacatacatattcaacaggttataagaggagctataaatattcatgatggtggtcctgaggcatgcattttgaatgaaacatccatgcctcatacatccatgttaaccttggagtggagacttaacatttaaatatactacaattaggccctatatgtcaaaaggatttttcaggacacgaagtcacccaagtgtcagcctctgtaaacccggccagaaccaatccatggtgggtattcttcctatctggagagagttaccaaaatcagtttcttgtctgtaattatggctggcagaacagagggtcaattagtcagcctttgtaagctgagtgagttgtaatcattttaatactgtttattttgaggccagtgttgtttagcttctagaaaaagaaaaaaaagaaaagaraagccttaaggagttagaatatagtttattctttamatgtaggagtgtgtgacttaacctttgcctggcatggcctcacaccctgtttataatttggtatcttattgttacaaagagtatcttctgtcagtcttataatctctattttaacattaatgagggccagtcattgtgtctaaatgccaaaggaagagggtattagggggcttgtctgacctcccatctcattattgctgagaattcagttttaaggcttttctggggtccccttggccacaaggcagtttgttcagtgaataggagggcttagattttatttttagtttatttttccaattctccagctgagatgtgtaagctactctagagggttaagcttttcaacttttccatacagggaaaaaaacatcatcagttggttaattccccctctgcttyattcaacttcatgttggtttgccctataataaatttatttaatataatccaatcagaatagcatttccacagtaacatttgtgagaattccaaaatccaaagacacttaagacattttaaaaatatataaaatttttagtcatttaaaataagcactttcaatagatttattggaaatttcctagtatgcaattttcatcaatgacttcattaagaaaatctgtcatcaacttcaattggttctgccagtaaccagaaaaggtaatccatttactaagaacaattttacataaattcagaaaatatagcatattagtaacaactaccaagccaaaaatacatgagatgttgtacattttgttctctaattaacggagggactagttacaaagcctaagaaaaaactttttatattgacatcttttgtttcaactgtgctgaaaatatgaatactgaaaaacagagcatatacgttttatattttattctgttatattttgtttgctcaaaataatataactgatttacccttattctgtagttttaagtatatgtcaggattacatatggattatcatcttgttccttaaaaattaaacacacacacacacacatacaatgattttcaggattctacttcaaaaaagagaactggctttgacttcataaactgttattactcagcctttgaccccagttaccaaagcatttgattttaaaatatatttgaaacaagaatgtttaaagtacaaggctcatacaattaaaacttctaatttgaaattacctgaagatgcgagctagattatccagccctgtcaaattctcaatttcaagatacacatttactgaagcaaaatctgtaagtataaaagcttttttttagctttttcattttactaaagaaaaacacttatgtttcagatccacaaaagtgaatcttgagggcttagtagacctaacacaagagtgctcttcattcatggtgactcaggccactgtctggagaagccaaggactccacttcacaaaaactctgcagtatattgattctccttgctttttctctaaggaaaatgtggatttggaaaatatgaaaaactgattattctcaatctacttcaaatacaacatcaagcatggtcctacttagcagaagatgtattatttttcatgaccaatggaagaaattgaatttagtagacattgaaatgacagtaaatttgtctaagtcaacacctcacatatggaaagaaacaaacacataactaaaggattagggcaaaaattaggtcactcagaggaaaaaaaaaagaccatatacaccttcaaagcaagagaacaagagaatactctttaagagaaaaggcaggtgccatggctcacgcctataatcccaacagtttaggaggctgagacgagaggattgcttgagcccaggagttcaagaacagcctggataagatggggaaaccctgtctttaccaaataaatgtaaaaaaattagccaggcatcctggcgggaacgtgcagtctcagcgactagaggggctgatgtaagaggactgcttgagcctgagaaacggagtttgcagtgagccgggattgtgccactgcactccagccggggcaacagacactgtatctcagaaacaacactaaactaacctaaaaaactaaactaaactaaactaaactaaacgagtgctgctttcaatgaaaaaaagagaagagaaatatatcaaacaccaaatcagatggcaaatcagtcaaaaaaagataaaaactaacctattagcatcatccagagttcaggaattctgagaaaaagaaaaataatgcctgaaagtaaaacaattggggaagcactattagtacatattccatgcataaaggaatttgtgagaagtttggagttcaaactagaaagaatatagcactaaaatttttttcggaagatgatgttgaagattacagctataatttaccatttaggttcagactttaaaagtattttgttgtctttcactccccaaacccactgcagtttactcaatatgtgtaaaataagtgatagaagatatttgtaaagtaagtgcacaaaataaatattgcgtttaactgtktggggcagaacccttatgttgatagaatattccaccatattttactttctttgccaaccattatcctaatggagtagaaatatattactttatatggcaaataatctataaaaatttactcactgaattgaatcgtaaaggaatagtaattaacatggaagataaaagcatgagttgtgtgtggctaataatgtttccttaatttgtacttgcattaataaaaagtacagtatggaattcgttttctgatatgtagcttgctggtatttcttacagttctgttcttccctctcctttataggaaacgtgagatagatgctgcacaatatgtgtaactcaatcaatataggttatttgagataaaaattttactgctattaatttattgtttttgataacatgtacatgctaatgaggcctgtgtgagaaattagaaaatcatacatrtaattcttttcctataagatgatatacttaatgtggttttggaagattatgtggtttttggttttgttgttcatgatgttttgtttttaagacattctctgatattcaatcagactcccctgcccttcaccccagagtttataaagccaaatcttattggaggaagaaaatagattccctaaatttcaaaacgatcactcctcagatatttaaacaatgtattcttaagtccaagatgaaatcgttgcaaaaaatgtggatgatgtaattttaccatttgccttgatatgattgatttagaatatcacattttacctgcctttacatataaatttttcatgaaaaaggaatgtaaatttaaataagatgtaacggcctttgtaattaagtccatctgtgttctaaatttagtaccacggatagttaaggtgaggatacatgagacaaaactcagtgtctaactctgaaccctgttaaaagtattggagtctattaagtatgcatcaacccaggaacacggtctgttaaaaaaaaaatcaggtttgccgtgtaattttgaatttaatatgttacctaagtgttctgataactaacgtgtataaaattagaagatgatacataatctgcattaatggaaaggttattttcaattcagaaaacatacttcacttatatatgaactattcaacaaatactatggcttatttcgattttctgtaaaattgcaatttcaattgctaagggtaaatatgaatatctaatattgagagtattgtgaaactgaaccctgaagatattaagactgaaaacaaaagttatctttttcttccagcttgttatatcttacctcttttagcccatctcctgctccccagaaatcaacttactcaagagttttagaaaaataatattaaatattacgagacaatttttttgttgttatttgtttgttttttcttgagacagggtcttgttctgtcacctacgctagagtgcaatggcactatctcggytcactgtaacctctgtctcctaggctcgattgactgtcgcacctccatctcctgagtagctgggactacaggcgtgagtcaccatgcccgcctaactttttgtatttttcttttttttttttttaagtagagacggagttttgcatgttgcccaggcttgtctgtatctcctgggctcaagcaatccgcccacctcagcctcccaaagtgctgagattacaggctttagagacaatgttttcaaaatgtgatctatcccaatttccaactttggattagtgtctcctgttttgtccaataaagctgataaaaaataaagtgcccagacagaggaaattcagacctctggacttgggatccccttaaatgtctatgtttactttttgaggtcttttaaaagaccttccaataatttgtcaaagccagaattcacactgaagaaaaactaatttagacaaataatttgttcatcaaatttttattaaatacctactatatggctggcataactaacttctagagatgcaacaataaatgaaagatgaataatgtaagaatcttatattagaggatctcaaatttaagcaggtcgcctaatcgactatggctgcatgagcgagggaagaatactattattggtatagcttgggtcagatgtcctctcccttccccatcttgagatgatggcagcttgagttcaaaccacaggacacaagggtatattagtttagacagacaaaagaaaaaaacaaaaaggatgtgtatcaatcagcttcctgtggctaccataacaaattggtacaaacaaggtggcttaagatcagaagtccaaaatcaagacatcagcaaggtggcactccctacagaggctctgaagaataatctgttctttacctcttccagcttctggtagttggcatttcttgacttgttgcaccctagtctctggctctgtagtcacattgtctgttccttttctgtgtgtgttctattctgtgtgtttgtctcaaagcttgcttagcatccctcttagaaagaaatccatgcatatacttggggccacyggataattcccttgtctcaatctgctttattgtatttcattatacattttctgccacataaaatattattcactcttttgccttataaggtaacattcctagtttccagggtttggaacacagctttttgtgatcaccagttagcccccactgggatttaactccctagctgacctatattatctaagtcagtcaaggtaccagctgtatctccaatcagaatatggagccaatgcaggcattatccactgcttcaaaatgccaaaaatacttgaaatgcagctcttcttcttaaaataaaaatacgtaatattaggaatgtatttctttttataaatactttattatatttgccctttttgccaatataagcaattgcaaaatatctgatacatttgtgctaactttcctgtttctctattgcatgttgcaaaaaaaataagaattattaaatttaaatggctattctaaaaaaattaagactataaaaactggtaaatgttaaaatggtaaacattagatgtatgagaattgtaatgcagtcttcaacataaaaaatactgttttgtaaagattgattagtgttgggtaagactactaagaataattatattagaatgatatctttcacccctttctcctttatgcagatcttacatttgatttttgggttagctgatactgtccgggagatttctcttttcagctattaaaccatttgtcaaattaatggattagagaactaaaaatacttcacttctaaactactttgatggcctaatatgaacttattagcttagtgccatattccattcattaatttttacttccaataggtgttacttttgagttgctttgaaaatttctcataaaggtaaatacactttctgtgcttttcgtttgttttgttttcactagattaatgatatgcctttacataacatatattactgcagttaaagtaatttttcttaagtaaaaagaaatacttaagatcactagaacagctaatgctacattttttggaaacctttggctctttaatttatcttcarctttaaagaagtttgatttgtcattacaaaaaaaagtgttcattccatttctacatcaatatgcaggtatttgttgatatcctatattttagttattcaagtttacatcagcatttggttcctctcccactaactgtttatattttaatgaagtgcgatggttaaatctttcaaataagatatraaagacattaaatatttataatttattttatttctcttctctgtcatttgtgattaattaggccagttgtcagcctatattttggataagaaacattattctttccaaagagaagttttcatcagaaaaaggattgggaaaaatattgtttgttatctgaaattcagtaggaggttttcaacttgggaatttaagactttgatcctgttaattttagttcacaaagacaaaaattcataatgcatagcctttaaatctgtatgcatacacattctcattaaattcaaagtcagttggtagagtagcaggggtgcattaattttctgagtatttagactaaatcatatctctgctacacttctytcaaaccagcaccaccctaaagtaaatgcagcttttactgtactaccattttggttacctacatagatgattgtaaagtacccactgtgatttaatctgacaggagcagtcaggttgatactatgtgtctctaaggagggctgtgtgtaattagcaatctctatgtttagaaagatgtctttaaaagataattttacactgagaattatggacttttttaatctcttgaattattttatctttactttactatctcaactccctcatctaaaaaatccccagtcatccttgatatatttcaagcagcagttaagaatttttcctttaatacttattctttgtaaaggccaatggtcttgccctcttttgaactccactaatagacaccctctgtgtaaataacagtgtcacagtaaattatgaatgttcacatgagttctttcattgatgttccaaaatattacttaagcccttgttcattgacttttcagtcttatcccttatcttactgaacaaaatctaagtatcttgaaggcagcaaccatgtcttacagagtaaaaatgaatgctgtagatccttagtaaatatttattttcaatgaatctctgaaaaaaatagtgtctccttagtaaagaatgaaaaagaatatgaaatctatttttacattacagttgagaagtgaatagaaaaaaaataggaaaaatacacttgcctgttgttagttatcgctttatcaatgtgaacggcttaatttttatgcagtagtttagatttgatgcataaattatgaagacaatcttgcaattatgtatgccacaagtatctasaagtatatagtctatctttttcctcccttttctctaataacattcaattactgtgctagccccagttatgaatatttatcagtaaagaaacaggtggaaaaaaatccaaaattttatttgaccatgtttgtctggaagtgacagtattgttccttacattaactagaactggaccctagagatagaaaataagtatagttacataaaaattttaaatgtatgcacatttaaatttaccaattatgaatatatacactctacacaatgaatagtggagaataatgaaagtagcaaaccatcgtatatgtcaaagtaatttccataacattatatttttttaattaacaaatgttatagctgatctcaacatggaatggtggtgggcattgggggcaggcaaaaggggaaaatattgtcttttttggaattagcctgtaaaaaatcattaaccttgaatgttgatgtaaaatctattttaaaattttatgtttaataatttaatggtaactttaagaagagcaggaattagttgtaggaattctaaattatccaaataaaataagttactacttcaaattccttggtcaatcaaacaaaatgaaaaaagaaagcaaaaacaggaaagagtgaataagtaatataaaacaggatgtcattgctgagtccaatgcattgtaacagtaataaacctgaatatgaattaattctctgattaagaaaatttacattaggataaaaaatttctggcatacactattttctggagacatgcatgaaataaagtgaaatacagattaaacaaagataataaaatagaaatgctattcgaatttaatagaataaaagattcaaaaaactaaggtagtaaaaagtttttgtgcacttataatgtagtttcataatgtagagagcagacactaatatagatgaaatgagaaaatggtaaatgataattcatgtttaatagaaaaacttacatttcccctaaatcagattaagaacacatctaaaacattaactaacagaaagttttaatttttaaaataaatcataaaatattcatgaaaattggccatgtttcatgccacaaaaaatgcaacatatcctgaagaaactacaattttcagattttgtggcaaaaacacaactaaaaattagaatgtgactctatgaacaaaataaacaacaaatatacacactataaaaattcaaagggaaatttccttttaactgatttcttactttaagaaaagaaaaaagtcaagacaatagcttctttagaaattaataaccatatgtctgttggctgcataaatgtcttcttttgagaagtttctgtttatatcctttgctcactttctgatggagttatttgtttctttcttgtaaatttgtttaagttctttgtagaatttgcacgttctgcacatgtatcccggaacttatagtataataaataaaaaagaaaaagaaagaaagcttcttttgccccccccaaaagaaagaaattaataaccaaaaagttttgaataaaaataaccatggaatccagccaaactatgaaatagtgaggaacaattctcagaagaaaagatgaaagttctatatgaaaaaagaaaatgtcgatcttcactgacagacaaaaaatcttaaaatggtgagcaatcactttctggtggaatttggaaagttgtataaatttttctaagctcaaaccataaaaatataacacaccacatgtaataaataaaggagttattgagacagatatataaaacattttaaaaataattagagwattctgatataaactcatataaattataaatgaattataatacaatttattttaaaaaggtagaatttctataaatgcctaactattctcttctaactattctaagtagttttaagtgagaagaaaggttatctgtaattgaatggaatattttacaatttgagttttcttaggttggcatgacattgtctatgaaaaaggtaaataattattatagaaaattgctattcacttgggaaaaataaaattagcttagtatataaatgcagctctcacaaacattatgtgcaataattttaagttattcagaagaatacatgcaatatataagtttagaagcaccaaaatattttatgtatgtgcacacatacacacatgcatagtaaattccatttatatttttaaaagatctatgttagttatggagaaattagtgatcaaggacaggaggttaaggaggactgactacttaatatgtcacctaaaactgtagcagaaatagcaggattgcaaaaagcatctaatatatagtttctaccttctagccattcacacactgtggaaacaaggggaaccaaaatgaaacaatgcacaaaaagaagccaatatatgatggtgccagcatatgtctcattggcactcagtcacacatgcctcaatggttccaacttaatgtaaatttacaggtagttgcatcaaaacttttctcatagtatgtggccaaatcatttcagacagattcataactgatagcaaaaagaaacaaaataacaaattaccaagaaacaaaataacaaattaccttgaaaatacatattccagtattaaaggataaaaaaggaaaaattgctgagaggccacatagcaggaggatgaaggacaataaactgtaatcattttaactttttcataggaacattgtcatcttttagtaaacactgtaaattataatttatgtattacatataatatgacttgagtacaggaaatgcttctcttaggaaatgtttttctaaacatagagccatttgaaaagtgtagagaaagactctattaactgatactaaatgtaattcaggcaggtgttccttccttcaggatgagtgtcaaatgacaggttgctaccctctattttactaaaattctcattagcattatcttggaaatgagacattagctggttgaaaagctaaaaggttttttcaggggaagatgcagtagtagcatatataacacaagcatttcaaggtagagaatatttcttacttaataggtacgtggggctttccattgttgtagaaattagtttgaataaaatttatcataaaattacttgtaataatggaaataataggctaattataaatgaattaaaagtacttaaacacacctatgtagtttctttcctcaatacatactaaataactctgataagcaaatgctgaaatataatgaaatttctaaatccatggcaagtttcaaagatgtatactctctggtcttatggtaatttccagtatatttctatggaaatcttccaaaaactttgcaaatggagtatttttatgtcataactatttatattaagcaaactaaaaatgtgatattgaaaagagtaatgtccagaagaaatgttgataccagtaattaatcaacatgttattttagtatccaggattatagcaaggatgccaatttcattgttattctaaagtcaatgtggtgcctttctggcaaacaagtgatcaattcaagccaaattattttctacaaaagttaacatatgttatttttctccttacaactttcctcttatcaatggttcttgcaatacaacacttaaattaaatattcacaataagctacaacactctttatagcaacagactgttgaatcaggacttatttagtgacaaaacaatttaaaatgatgaaattttgagaccaagattgtakgcaaacatgccagctggagataatatattataatatactcgaacttgaaagaaagctcacagtttggttttataagggctggtagatgaatgtatgcttcatggacatacagttctgaagaaatatgaacctacaacatatgtatagtatataaattggaaaagtagcaaaagaaatgaactaagtccgagatattaaaaaagacaaagaggctgagaagacagggaaatcagcattgcaaacagatgattgcaggtactgagacaaccacaaatatattatatgggatttaggtggaagaatcccctctacagataaactagggtaatagaactttacaaggattttagtcrtattgttatgacattattataaagaaaagagaataaggaacagaatagcatcccaacagcaggaaaaataaaaccctctacttttcaagtaactaaatgtaaaaagtgatagaggatataaaagaacaacgtaaatcagaattagaaaaactcaatgacaaattgatcataaaaaaaagattygaggaaaaaaaagtaatccaaaacaaattattttagaaaaatatttcacaagtgaaggtaaaacttgaagaaacacaagagtgacttaaaacaacagacaaccaattaagataattagaagatggaatggggatttttttaatatgaaagaaagaaaaaaaaggaagggaaggggaggggaggggaggggaggagttaattcaagaagtaaaaaatatagaagataggcaagtaatagaagaataccaaagtaaaggagcaaaacaaatataaataaatgtttaaaaatctgaaataagaaactacatattgataggtcatgccatgtatgtgacctataatggccagaaataacaccagttctagtaagactactgaacttaagagaatttttaaaaaggcattaaggcaaaaatgatgaaatacttataaggaaaacagagactgctactaaatctttgacagcaaacatttctttttgccagaaacaatggagtaatatattttagataacaagggatataaaatataagccaagaattttgtaactagccaaagttgattcaagtatataggtgacagacaaactgctataaacatggagaatttcagaaatattgttctaatgagctctaccctttaggcaaccaaaggattagagaaatatcaatgtaagcagtgttgataataattaaatatgtatttgcctatattttaagactaagtaatagtcaatataaaatggaatgattgtatattctgacacgatgaacacaaatatcaaaaatcacaggagatgaatataagtaaagtagaataagcttaatgtttgatttacaggaattgaataggagtaggacattacttcaaattagatgatatggagagggagagaagtagtaaaaagaagttgccaacgagttccaatattccttacaagaaggaaaaaaaaaaaagaaaatagtcctctctactcaaaaagaaaaggaaagctaaaagcatgcataaagcatgagtagataggtagcccctagaataaaatgcaatcatgcctaaataatgcattaaaaactcatttaagcattttaaagtagttgctaataaaaggaaatatgttcaaagaataaagattccaaaaccaggtaaatattgtccataattgtaaaaagcaattagaaagcatcctttcaaataaaaaataagataacaaaatgtacttaaatatgcattcagaaccataccagacaaaaatattttaattaattttaaaaatattaattggactgtattaatatctgggagtatatatactttaaagtagggcatttttcctcattctttcaagataactcctggatctccaagcattgttcatgtgaagagcatgcgctagtcatcaagtctctttataaagtttttcccaaaggtgcaaccaacaacttcaacttacatctcattagtcaaaacttaaacatacatcatttatatcagtatgtaaatctagaaaatgtattgttcttaaatctgagtacaatgccactacctcctcaacttggatttctgaaactaaggaagaaggggagaatggatattgggaacatagctaacattctctgccaccacagcttttgctgagtgaatgctgtgacagtgagcagctatcttggcctctactcttgtctctttctaaaggaagaattggctctgtaatcctttaatctataacttaatgtacaaggaaagttagaaggattcagagacagtgtgctaattgagtctttttaagaagaataaatccacatcattcctcacaggggcaaagggcataagatgataccaagcaaaaaaacagcaatcacaaatttcaaggcctcatactcaggagaaataaaagaaagaaaagaagacagatacttacaaaaactagttttaatgaaaacatatctttgtaaaattcatctgagcagcaggcttcgtgtaatcctatttttaataataaaagagatttaaaaagattaggatatctgccagtacattaggtgaatagcttaattctgggatatacttttgtcttttaaaatagtatataaaatatttagcagtgtataaggcatatgtatacatattcacatctatcaatattattataacatatacatggcatttacgaagatacaacagtttttgtcaagtttactttcaattggggataatttatgcatgacaacttcctttccacccatttgagaatatttaaaaataatttatttactgatcttttctgtcaattttttggaacaaaaatcgtggcatgccaagattacagttcctttttttggccaatatcttcaagatcctctttttcagtgtaattttacaaccttattttctctcccttagttttgtacatataacattgctcaattcttctgtccttccatgattcacacaatatttcattgaactctcacttgcatcaacacattacctgttttcccctttttcatttccctcattgaacatattttacacaatctctaaatctggcaatatcctattcaccttgcaatttgaaataaatacattgaatacgtgtgaaacttcagtgtctatgagtaagacataaaagtaaactaataattacaagaatatgcaagaaatgtaaaatttatagcatattgaagaagcacagaaatagtagcaactaagtttgcccaaggaatttaagactacatttaaggaggtgacctatttgtagaatgagaaaacatgaaacgtttcccaggtaaataagagtaatttaaaagggccttgtaggtgttgttgttgttgttgttgttgttgtttttagacggagtctcactctgccttgcccaggctagagtgcagtggtgcgatcatagctcactgcagcctccacctcccaggttcaagcgattctcctgtctcaacctcccgagtagctgggactacaggcgagtaccaccacacccagctaattttgtatttttggtagagacagggtttcaccatgttggccaggctgatctctaactcctgagctcaggtgatccacctgcctcggcctcccaaagtgctgggattacaggcatgagccactgcacctggctttaaaagggccttttaagggctatgaataacttacataagcatttaggaatgcttactgaaagcatactgtcaaagtattagatagaatcctgggttaagagagaaagttgcttatgcagaatcaagaaagtaaaataatttttaaaaatatgagaactttagctgtatgatgtcagagtggaaagagtcagtagaaaggaacatagtgataaaattcgaaagaagatttagtaataagggaagtgatgttttgaaggggaacagatgaaagctcagggtcagctttgaaagaaggacatattcatttctttctgacattatatggtagatagataaaagtatgaatagagacaaagtttcagtgaggttaagagggtgattggcacatggacacagggaggagaatatcacacacaggggtctgtcaaggggtggggagctaggggaaggatagcattaggagaaatacctaatgtagatgaccggttgatgggagaagcaaaccaccatggcacatgtatacgtatgtaacaaacctgcacgttctgcacatgtaccttagaacttaaagtataataataaaaaaaagagggtgattggagggatggctttaaatgatgagttaaaggaaccgtcatatgcctcctagatactgtgtgttcttgtcataactctttagaggcctatgccctgcaggcacttaagtgtcagttaaattaaatataatgataaagagacgatgggtctagatgcttgagaataatggttaaggttaaagttaagatccagcgtcctcttggaactcagaaataaatgaaaaacagagttaattgagaatttagttgaaattttagcactaaatctaagtactaaatttccctggggcacacatattttgcatattcatatttccaatgttaataatataatattttagcgtctttttttagtgttttagatcactaattataactgtgttcttgtgaaataaatgccttaaaccctctgggcctcagataaacaataggataatagtaatttaaaacaatagggtaatatagtaatttatataaataactaggataaatagaacaacaggataatagtaatttatctccacctttcttccagctccttccaagatatataaatattattacttaatcaaacatgttgagaatgaagtatgctataaggccatgattgcttctgcatgtcaactggcaattttaaaaattttgcttgtagctaaccatcactaatttctgtttgagcatgaggtagctgtgtgattatttgagagaattctgatctgcaatgaaaaacaaaaggtcacttgacatttttgtaggtatttttgtcctgtcgtatatcagagaagactgaagggccaaaggttactttagggtgacaagagaaaaactatacttagttattgttgcagagaatggagttaaaaaagaaaaggaaaggcaatttctggttcttcctgtgatactagaaagcatgccttagtgcctttgggattctctcaagggaactgttattagataaagggaagggtagctttcctctcrtaatgtctttgtgtctctggtgaatgccagaggcaggaacttgcaggttatgtgaagcttctgttaatacagagatgttatgatatacttcaagggctctccatcgagttaagagatatacagaaacatacctttgtatcaaggagcatcatttttattttcttctgaaattctatatttaagtcacttttcaatagaatagcataaaataaaagaggtattataaagctatgactttcaatccctcagcatttctctgagtttgctgtttattatttgcctgagactttcagccatttcagaacaaaaatctaatattctctagatgctgacattggtatttaaattcctcctgcctgagtagccactttatgctctgcttttaatcctcctgttagccactttatgctctgctttcttttgtatttggctagtgatatcaaagtgcattaatgcttcataaaaaacaaaaaatatcctaagtattctcatggtaatgttaatatctgaggccagtggggggaaaatggttaacagcccatcacaatattcatgttatgaaatgttgacaattatacattgaggttttgtgtttctgcctcatttactcaaatcttaggaagttgttattattcaaggatactgcttttattctttccttcctaataaattcattttttaaagaaatgtccaaggcaacatttttttattttaaaatatttctactgaagctccaagaattagaatatttcttgtgtgggcagttcaacgtatttcagattctttcctttcagtttttaacatttttattgttttctcatttcacttggtacattatgtgacattttacaggaaaagggaagataaaactacatgtttaattttttatataaatcattacaagtaaataaattgagttttgttttcttctaaattattcttcttaaatggtaaattaaacaattggttttggctgtcaggatttttaaaaatatactttagaaagaatctaggaaggtagcccaagcatgtgctcattattccttatcctcctacctttctaaacaaacaaaaaaaagtattaaaaaattatagttaaactgtgaattaactaatgaatctggagaagaagtccaagctcactgtggctttgggttttcaagaaagagtgtgagtaaattgtcattgtttagaggtatatatrgtcacaaaagaattgctagccttgaactaaacctgtcactctggaaaaaatacatagactggtattagacttctcattgcggtattagaatctagaaaaaagtaaagaatatttacagaaacatgagagaaaagtactgcaacattaatatttacactcaaccaatatatcatacatatttaagggctaaaagtaggtacaacataatgtaaaattattcagaaagtatatcactcctgaattttctgggtgataattactagaagacctgctccacccaaatgaaaattaaataagatgaaatatctcaaggtagaatacactgagtatgagaaatagtgtttatgataaatataaatttataaagtttttaaatgaatatatgcataaactttatgaatatggcatgaaaaatatgtttagtaccatcatatatgttagtactaaatctcttttaacataatatttgacataaacagataattccttagaagctatcagcaaacattctatgaaatggctaaaatctaaagtgcccctgaatgaaattaagaacaagacaataacacttacaattctatattataattgtatattcaaaattttggttaatcccaaatagaagagaatactgtgtttgtgagcagtaatatttgtagagataaatagaactttagaaaacccgatcaatcagccaatattttcccaggaaagaaaaaataaataaataatatgtttatagtgcattttaaaatatgggaacaaatacctgttatcaaagaaatgaaatcaactacatcatctatgaaaaagagtgggtaaataatatggtattcaaagacaaagactcagttttgactaaacaaatacaaactgtaaaatctgccaaggagaaacacacctaaagcaaaatggcaaaatgtgacttgaaaataaatgataggcaaaaaaaatggttattaattttcaatttgatataatgtcatttaaggacaaaagcttaaatggtaaaaagatgaataattttaataatagggcaacccatcaagataatcagcaggacaagacataaacaaaacaaaacactttagaaataaacagagaaattgctaaatcaataaacataatagaaaattttaagatgttttcctgagcattgacaattcaaccagtgggatagaggaggagaaagacatgaacaattttaatagaaaaactcaacaagctcaatctataactgcatgtacatgttattgtactatgtttatagaacagacacaaaatctgaatatataatagcccacaaataaaactttaatacattttcaatgtattaacagatagaggatacatctttttataaaaatacaataaaataagaaacacttttcaaaatattcttcaacaattacttaaacaagttataaacaaaagagcaaaaggaagtgtttacatgtatttcacataattctaatagctttatacttatattaggctttctgtttgataactttgcattgaacttaaaatataccatttataattttgctgaggtttgtctttcacctgaagatgcctaaactgtgattcatctatgttagtattaaatctcttttactataatatttgacataaagaagagtattcatcagaaaccatcagcaaacatgaaacatatgaaatggcttaaatctaaagtgcacctcgatgaaataagaagaagacaataatacttacaattgctataatacagactataagttgaagattttaagccataaaagaaaaagacagcaaaataagttctacttttaggtccttgaggaatcaccacactgctttccacaacggttgaattcatttgcactcccaccagtagtgtataagtgttcccttttctctgcaacacctccagcatctgttatttttggcacttttaatagtagccctatcccttttaatatgagatggtatcccattgccgttttgattttcatttctctaatgtttagggatgttgagcattttcccatatgcttgttggctctgtgtatatgtcttctcttgaaaagtgtctgtttgtgtcctttgcccactttttaacggagtttcttgttttctgcttttaaatttgtttaagttccttatagattccagatattagacttttgctagatagatagttcgcaaatataatattttccactattctgtaggttgtgtggttactctgttgatagtttcttttgctgtgcagaagaagctctttagttaggtcccacttgtcagtttttgtttttgttgcaattgcttgtggcatctttgttataaaatctttgccagggcttgtgtccagaatggtatttcctaggttattgtccagagtttttatagttttaggttttacatttaagtctttaattcatcttgagttgatttctgtatatgctataaggaagggctccggtttcagtcttctacatgtggctagccagttatcccagcaccatttattgaagcacctttccccactgcttgtttttgtcaactttgttgaagtacagatgtttgtaggtatttggcgttatttctgggttctgttctgttctgttggtctatgtgtctgtttttgtaccagtcccatgttttaattactgtacgcttataatacagtttgaggttgggtaatgtgatgcctccaactttgttctttttgcttagggttrccttggctattcaagctcttttttggttccatatgaatttttaaatagtttttttttctatttttgtgaagagtatcattgttagtttgataggaatagcaataaatctgtaaattgctttgggcagtattattgattcttcctgtccacaagcatggaatgttttcccatttgtctgtgtaatctctgatttctttgagcagtgtttcataactttcattgtagaaatctttcatctccctgtttagctgtattcctaggtattttattatttttgtgcatactgtgaactccgttgtgttccccatagtctcagcctaaaagctcctagatctgataaacaacttcagcaaagtttcaggatacaaaatcaatgtacaaaaatcagaagcatttctgtacaccaacaatgtccaaactgagagccaagtcaaaataagtgataaattctaatgaagaagagaccaatttatcattacttatagactatatggtggaattgtaaaataagttaaatactagaaatagtataagcattagaatgtattgaacatatgataaagaaatccaagaatattttacagaagcaacaaaataactgaaatgagaaaaaaattaaaagatacaattttaacagaaatataaaataactggaaaattaagttatagtcactatggagaacagtattgaggttcttcaaaaacactggagatagaactacccaggaatcccattgctgggtatatatccaatagaaaggaaatgcgtrtatggaagagatgtctgcactctcatgtttactgcagcactagccacaatagccaagatatggaatcaacctaagtgtccatcagtggttcaatggataaagaaaatgtggggtatatacacaataaaatattattcagccataagaaacaataaagtcctgtcattaacaacgacatggatgaaactggaggaccttatgtaaagtgaatcaaaccaggcataggaaaacaagtatctcatgttctcactcatatgtgggagctaaaagaaaaactgaactcagggaaatatagagaagaatgatggttaccagaaacttggaaatgtaatgggagaggagggtaaagagggtatgacaaatgaatacaaaaatacgtctagatagaaataatatctagtgtacagtagcacattaaagtgactatagttaaaaatattttatatatttcacaaaactaaaagagtggaattggaatgttcctaacacaaagaaatgataaatacttgaggtaatggataccccagttacactaattggattattatatattgcttatatcaaaatgtcacatataccccataaatatgtacaactattatgtatccataacttttttattactatactttaagttctgggatacatgtgcagatgtgcaggtttgttacataggtatacatgtgccataggggtttgctgcacccctcaacccgtcatctacattaggtatttctcctaatgctattcctccccttgctccccacccccaaaaggccccggtgtgtgatgttcctctccctgtgcccatatgttctcactgttcaactcccttatgactgagaatatgcagtgtttggttttctgttcctgtgttagtttgctgagaatgatggtttccagcttcatccatgtccttgcaaaagacatgaactcattctttttatggctgcatagtattccgtggtgtatatgtgccacattttctttatgcagtctaacattgatgggcatttgggttgggtccaagtctttgctattgtgaatagtgctgcaataaacatacttgtacatgcgtctttatagtagaatgatttataatattttgggtatatacccagtaatggaattgctgggtcaaatggtatttctagttctatatccttgaggaattgccacactgtcttccataatggttgaactaatttacactcccaccaacagtgtaaaagcattcctatttctccatgtcctctccagcatctgttgtttcctgactttttaatgatcatcattctaactgtcatgaaatggtatctcattgtggttttgctttgcatttctctaatgaccagtgattacgagctttttcttatatatgtgttggctgcataaatgtattcttttgaaaagtgtctgttcatattctttgcccaccttttratatggttgtttgtttttttcttgtaaatttgtttaagttccttgtagattctggatattacctctttgtgaaatggatacattgaaacaattttctcccattctgtaggttgcctgttcactctgatgatagcatggtactggtaccaaaacagatatataggaacagaaaagaggcctcagaaataacacaacacatctacaatcatctgatctttgacaaacctgacaaaaacaaacaatggggaaagattccctatttaataaatggtgttgggaaaactggcttgccatatgcagaaaactgaaactggaccccttccttagaccttatacaaaaattaacttacgatggattaaagatttaaatgtaaaacctaaaaccataaaaaccctaaaagaaaatctaggcaatactgttcaggacataggcatgggtaaggacttcatgactaaaacaccaaaagcaattgcaacaaaagccaaacttgacaaatgggatctaattaaactaaagagcttctgcacagtaaaagaaactgtccataactttttaagaaagaacaaaacagaaaacatttaaaaaataaataaaaaataaactatatgagagaatgtatagatattttgaaatagaaattgtgagagtgcatggcttttcagatattaaaaagtattacacacacatccttataacttagaataaaacccaaaatcttaaccaacgtctatcagacccagtatcacgtagttcctcactacctctcttactattttcgttactgtgacctattctactcaggttacactggccttacaaccatccttcaaacacccaaagattacttctgtttcagaaatatatactaacttttcattccaaacaaaatccagccaccccaaatagtctcataggacttccttacttcattcagtcatctgctcaaacttcatttgctcaggcctcttttccttttgctttttttttttaataagmaaatggttttattcttaatttttagttcccatacagtatacaaatacacttttactctgataatacagctttgcaactagcaaagcagttgcgctaacacccataaatataggtggggagacaattaacatccactaatgtttctctatgtaactattcttttaatatcttttttaaaaaaacagttgcaaatagaccacataatatacatggcaaaaaggcaattaagtgaatctcttgaaacactaaatgtgtaatacacagaatattatcaacatttacatgattcacatcaaagtgatgacatcctaaaatgtattccttttaaagaatagatttatcaataaaatattacatatcttttaatactctggtacaatacttcatatactgcaggaaaattaatttcacacttcatttcctaaccacctcctcaaaaataaatgccttgttttttaccctaccaggttctaaacccttgcccaaaattatttttctatgtaatgctcaccactacctgacattagagttattgctttatttttatcctattagtctccaaaaatgaaatgttagttttttgagcgcagggacttcttctatcctcagttcctaggacaatattttacaaatagttgatgctcagaaatagttgttgaatgaaaaatcacctcagtactaaacttccatgcttaagccatgtgcttgggagctttccctcacattcttcttttttggggtccatgggagagctacacctctgttcaacatgagtagaatttttactgactgtggtaaacatctcttctctcaattattcttggaagacatagatcctggacaggtgttgaatattccttctctttttgcaacttgccaaccttagattctagagattcatattgctcataagctaccagagaaataagtcttctgaacatgaatgaaagctaataatcagataatgagacagccatgtagctgagcagaaagacttggcaaggaacattgtggtgataagccaggatatgttgatttaggatgtagctcagatataattcactctgtgtatgagtccattctgttctaaccatcaatgattattgttatctagtacagcccatcctcaatcgtgtctctgtgattttatttrtactcacaagctggtgaggatttcctgattattgtaactagagtgcagatacttgtgaggaaatgacaggaaatgaggaaaggacagtagagaggggcagacagatcatacagaaccctgcggacagtactataaaactgaatcttatcctgaaggaatagtaagccatcaaacacttttaagccaaatagtggcatgatcattttatattttgaaacaatctggtagcagtactgagaatcaatgagagaaggttgagtccaggggcagagagatcagctaggtaaaggccttaattatttcagatgagaaggtatgaatgtctagagtaagtcaatgcccctatgaatgaagaggagatgatatatttaaaatttgtaaaagagttaaaattggccttaggttgtcaattatttaaatggcaatggagcaaaaagagaggcttatgactaaatgaagcttctgactagatgacaggtaggtaatgacaccattaaaggacacataagtaagaggatgcttgggaaggataatttgagttcatttgtgggtagattgagactgagttgtctttgaaacaaacaattgtaggttgtatgtgattatagatatatgaacatatgatatactctgaaaataattttcatgtcattttccattggcactgataatttaaataaaaggtattcttgacaaagagtaaaatgcaaaaaaaaataaaagtataaatcaataaaacatgttagaattattttaccattgaaaaatccaaattaactttggatttgtaaaaacccttccattattttcccataacactaatttttataatgaataaaccccaatagaaatgtattttatggagagaaaagttgtaaatagatatcatatcatatgtaatagtttgatacttatattagactttctgttggatcattttgtgctgaaacttacaatatgccatttactactcacaactgtgctgtgtttattttctcttttccctgaagatggctaaattgtggttgatctgtgttgcactaaatctcttttaaataaatctcacatttgacaaaaaagatatgytccagattgtctctgaagaaatacagtaatacaaatgaattgtcgcctaccaattcctttttcagtataaacctttaccttatttccaattagtccaaggaatcactctctggggaaagaaagacacagcaatgctaaaaagaaccgtaagatttttgaggtgaaattgcttagagatggtttaatccaaagccttcattttgcagctgaggaaagtgaggccaacctaaggtcacttaaggtcatctagactgttkaatggcattgccagacttagaaatactgtcttctggttctcaggctagtggttttttattatactgtgctgttgtccattttgtgacatttctgaaaggggattcttatgaagtgcttatgcatgattcacagtgtttccaacagaaatactttccctgcagaaaaatgcctgccaaggattctgctactaagagctcccactgggcaaggggtccctagacagtatgctgcacaaactgtaatgagctacataatgtctccattctctagtgacatggaggctttataatgtagatgtttttaatgaagattttaagcaagcatttcagttgtctactctttgcaacacatcccatgagacaggacccacagcctgtcacattcggcaatgttatatcttaggacaacggggggatatttccagatagttggccttatttgtttagagcacatttttttccttttttcttttatatatcagcatgttctttttggtcctttctgtacctcagcaactgaacaaggcctcaatgtgcaagcttcatgcacagcaacagggcaaattgtcactaagttgtcaccccccagacttcattcaattcttgtaataaatattctccattctatgttccaaaagctattttaggcattgtttcctagtgttatcagttgtgctagatgaacactagctcttgaatattccagagtggattcatggtgaatttgtaaatttctgtgaacaacaacaacaacaaaaactatcaaaacaaatgtaatattataataaacagcatctataggagattaaaatgaggtccctaatttctgtacaatgttcatttgtctctggtttggatcacagactcccgaattagagtcactttgactatgctgacttctgtcatcccaaaaagtcaccatagcaacaaatcaatgacaataaaagtcaattcattattgttccttaccatctatagtgtgccaggatgcatcttgggagcaaaattcactattcaggaactgttcaagtgtcttttttttatatttcactactattgttttattatccacaatarccatgtttgtttccttagacatggaatgctaaaactatgttaaaatgcatacttcctctggttatttccccttggatcacagagaaacaaatggtaacctattcacatcaactaaatgccattctatttataccttttttctttaagttgaatgctcagaaaacatatgcattacttatagacttgatttaatgtataatttcttttgaaaatgtattttcatgctgaacacataagcttattctaaaaattaaatactttaattttgttacccaaaaatattttctggtaatggaaaaccataattgtgtttttaattatgctcacgctgggaagataacttcrtggggtaacatattgatttgaatatatccttccttcagttaataagtccctcctttttttctttcatgcctattaattttgagtagaatacataactccaaacatcagccattgttacagcactagacatgaaactctggttgcaatgtcttgataccagttgaattcatggtaccggtgtgtgtgggtgcgtgtgcatgtgtgtgtgtgcacaagcgtgtgtgcgctctgacatgtttttataaccagattaaagcacagttgggaggatactttatgttccttctgttgttgctattatagcacttcacatattttcaggtatttcttaaatgctctatttgataatttccagtgtgaaaatatatgttgcctattttctatagtaatcaagatagaatagaaaagctaaaaatataaagaaaacattaaaaaagtgtgtgataaaagctgragttagttactaggggttaaaataatacaaataaattacccagaatagtgagtacaactgcttgcccagacacaggaaatatattggatttggtaaaacatagcaatctctataactaaagccagaatgtttattaatagatacaacaggagacaaaatgcagaggggaggagaaggaaaaataggcagaaacaaaagcgaaaatgagataaacagatggcatggcagcatagcactggcactatgggtcatgcttggtgagggaatcttagctatggccctctagcgtaacagaacacagcagggagaacttcagagcctgtctaggcaggagtagagtaggggatcaagtagaaagaaaaaaagaaaaatggaaagaaggtgacagagaaagagagagagagaggcctagctaaatgagttaatcatttcaatgagcacgacctggaatgacagtgagttaagagctgtaaatttgctcccagtagtctccatttcactttattcttaatgtttgaatatttttagtgtttaaagattcagaaatatgtttgtatttgtatatataaatatattttatatatattatttttacacacttatacaaataatccatttacccatatacattattgttaaacttatatacataaatcattaatattatggagtttttgagtaaataggaatgttttcagggtaattttccagggaaattcctattttccttgctgaatatagaactcacactcattccaacccgcatcctctcatcagacaagaccatactatatagtgatacttaatgatgaccaatggctgtccttagatattttaagacttccaaatgtgccattctggactcacagtttgtccttgctcttttgatctcatagtccagaatttgaggctgcttcctaaaccttcagcaagtccaccagggtttcctcactttgccttgaggttggctatatctaggaacaactcttaaatgaattaaaaggagaaaaagtctcttgggccctttacaactctaagagatactaaggttgttttctgtgcttttttattccattgagtaaatccctctattctgatttattaaaaacccatattaactaagtactacatctatgccaggatttgactacatacccaacatacaaatgctactcctttcaaccagggcattccacctgctgccaccactacaccaacattaattttcttttctcaaataatcagtgccttttcatcttacaccatatttttattagtaagcctcttctactttgtgtggtcttccttctaagctctgttctcrtctaggtctaattttaaaaagaaattcaactaagatatgaatacaatgagtttaactgtttgcttgtattacaaaataacttctatacataaaagtagtaataaactaagaaggtgcatgtcagatgtcaaaatatttgtatcccatgagagtgctcctcaatgggtgacctcagcagaggaggattttaataatctaatggatagaatgacccrttctgtggacggcaatcagcctctttgcccagccacccctgtcatcgcccgatgggccatgaacaaagtggccatggtggcagggatagaggttatgcatgggcccagcaacacggacttccactcaccaaggctgacctggctacatccactgctgagtgcccaatttgccagcagcagcgaccaacactgagccttcgatatagcaccattccttggagtgacaagccaactacctggtggcaggttaattatattggacctcttccatcatggaaagggcagcagtgtgtcctcattggaataaacacttattccagatataggtttgcctatcctgcatgcagtgcttctgccaagactaccatccgtggactcacagaatgccttatccaccatcatggtattccacacagcattccctctgatcaaggcactcactaaagaagtgcagcagtgggctcatgctcatggaattcactggtcttaccatgttccccttcatcctgaagcagcttgattgacagaatggtggaatggccttttgaagtcacaattacaatgccagctaggtgacaatacttagcagggctggggcaaagttctctagaaggctgatgctctgaatcagcatccaatatataatattgtttctcccatagccatgatttatgggtccaggaatcaaggggtggaggtgtaagtggcaccactcaccatcacccccagtgatccaccagcaaaatttttgcttcctgttcccgcaacattatgttttgctggcctagaggtcttagttccagagggaggaacgctgccatcaggagaacaacaacgattccattaaactggaagttaagattaccacctggacattttgggctccttctgcatttaagtcaacaggctaagatgaaagatacagtgttggctggggtgattgacctctgctatcaggaagaaatcagtctactactccataacagaggtaaggaagagtgtgcatggagtacaggagatccattagggaatctcatattattaccgtgccctgtgattaaggtcaatgggaaactacaacagcccaatccaggcaggactacaaatggcttggacccttcagatatgaaggtttgggtcactccatcaggaaaaaactatgacctgctgaggtgcttgctgaaggcaaagtgtattcagaatgggtagtagaagaaagtagtcatcaataccagctatgaccatgtgaccagctgcagaagtgaggagcaactccagaaatgaggactgtaattgtcatgagtatttcctactccttttgttaaaaacatctttgtgcatttatatgcttgtactaagaaaatatattcgttttatttcctttcttttttatcatgtaatgtaagatttattgacttcacatcagcatttaagtattgttgacttcctgtaatagtatttgggttgsgaaatggtgcatttctggttgcatgaaggatagttgtattatgtcagatattattatgaacttattattttctttatttgaagattatgtataatctcaggagatgtgtatgggttcaagttgacaagtggtggacttgtgatggttaatactgagtgtcaacttgattggacagaaggatacaaagttctaatcctgtgtttgtctatgagagtgttgccaaaagaaattaacatttgagtcagtgggttgtgaaaggcagacccacccttaatctaggtgggcacaatctaatcagctggcagcagggctagaatgtaagaaggcagaaaaaagtgaaaagagagactggcctagcctcccagcctacatctttctcctgtgctggatgcttcctgccttagaacattggactccatgttcttcagttttggaacttggactggctctccttgctcctcagcctgcagatggcttattgtgtgatgatatggtttggctatgtctccacccaaatctcaacttgaattgtatctcccagaattcccacgtgttgtggttgtgacccagagggaggtcattgaatcatgggggccggtcttttccatgctattctcatgatggtgaataagactcacgagatctgatgggtttatcaggggtttccgcttttgyctcttcctcatttttctcttgccaccgccctgtaagaagtggcttttgcctcctgccatgattatgaggcctccccagtcatgtggaactgtaagtccaactaaacctctttttcttcccagtttccggtatgtctttatcagcagcatgaaacaaactaatwcagaaattggtactaccaagagtggggcattgctgaaaagatacctgaaactgtggaagcgactttggaactgggtaacagacagagcttggaacagtttggagagctcagaagaaaaaaggaaaatgtggaaaagtttgaaacttcctagaaacttgttgaatgactttgcccaaaatgctgattgcaataggaacaataagatccaggctgaggtggtctcaggtggagatgaggaacttgttgggaactgaagcaaaggtgactcttcttatgttttagcaaagagactggtgtcattttgccccatcctagagacttgtggaactttgaacttcagagagatgatttagggtatctggcaaaataaatttctaagcagcaaagcattcaagtggtgacttgggtgctgttaaaggcattcagttttaaaagggaaacagagcacaaaagttcacaaactttgtggcctgrctatrtggtagaaaagaaaaattcacttttggtggagaaattcagctgactgcagaaatttgcataagtagcaaggagcccaatgttaattaccaagaccatggggaaaatgtctccagagcatgtcagaggtcttcacagcagtccctcccaccacaggcccagaggcccaggaggaaaagaaggttttgtgggcagggccctgtgacccagttgctccagctgtggctgaaagggggcaacacagagcttgggctgtggcttcagaggatggaagccccaagcctgcacgtggtgctgagcctgcagatgcacagaagtcaagaattgcggtttgggaatctctgcctagattttggaagacatatggaaacacctggattcccaggcaaaagtttgctgcaggggtggggccctcatggagaatctctgctagggcattgcagaagggaagtgtgggatcagagcccccacacagagtccctattgaggcacagcctggtggagctgtgagaagagggccactgtcttccagaccccagaatggtagatccactgagaacttgatccatgtgcctgcaaaagcagcagacattcaatgccagcctgggaaagcagctaggagggaggctgtaccctgcaaagacacaggagcagagctgaccaagaccatgggaacccatctgttgtatcagcatgacctggatgtgagacctggagtcaagagagatcattttgggactttaaaatttgactgcaccactggatttcagacttgcatggtcctgtaaccccttggcgttggccaatttctcccatttggaatggctgtatttacccaatactgtacccccattgtatctaggaggtaacaagctcgcttttgatattacaggctcataggtggaagcaacttgccttatctcagataagactttggactgtggacttttgggttaatgctgaaatgagttaagatwgggggactgttgggaaagcatgattggtattgaaatgtgaggacatgagatttgggaggggccagggkcacaacgatatggtttggctgtgtccccacccaaatctcattttgaattgtagcttccataattcccccatgttgtgggagggatctggtaggagataattgaatcatgggggcagttttcctcatactgttttcatggtagtaamtaagtctcacgagatctgatgcttttataagggaaaatctcttttccttggccttcaattctctcttctttgagaccatgtaggacgtgcctttcaccttgtgtaatgattgtgaggcttccccagccacgtggaactgtgagtgcattaaacctctttttctttakaaattacccagtcttgggtgtgtctttatcaacagcatgaaaacaagctaatacaggtccatatgaaagaattaagaaaaaccaccagtgattccatttttgagggctctaaagcactgtaagagacatagaagagttttacatagagtgtcattatacttgcactcacttctataaaaatatggattattctacaaaatgcaaactccaaatgcttattaagatatactattcagtaatggagattgtattagtcagggttctctagagggatagaagtaatggaatatctatctatctatctatctatctatctatctatctayctatatgtttattaagtattaactcacatgattacaaggtcccatgtattagttckttttcacactgctgataaagacatacccgaaactgagaactaaaagagatttaattggacttacagttmcatatggctggggaggcctcagaatcatggtgggaagtgaaaggcacttcttacatggtggtggcaagagaaaaatgtggaagatgtgaaagcggaaacccctgataaacatatcagatcttgtgagacttattcactatcaggagcacagcatgagaaaaactggcccccatgattcaattacctcccccgatccctcccatgacacatgaaaattctgggaggtacaattcaaactgagatttgggtgaggacatagccaaaccatataatttcacccctgscccctccaaatctcatgtcctcacatttcaaaaccaactgtgccttcccaacagtcccccaaagtcttatctcatttcagcattagcccaaaagtccacagtccgtagtcttatctgagacaaggcaattgccttccacctatgagcctgtaatatcaaaagcaagctagttacttcctaggtacaatggggggtatgggtattgggtaaatgcagctgttccaaatgggtgaaattggccaaaacaaagaactttacagggcccatgcaagtccaaaatccagtggagtagtcagatttttaaagagtcgccttaactccagttcccaaatttctgatctccgtctgagactacctcaacctgaactttattgtccatatcactataagcattttgttcaaagccgccattcaacaagtctccaggaagctccaaactttcccacattttcctgtcttcttctgggctctccaaactgttccaactactacctgttacccagttccaaagttgcttccacattttcaggtatctttagaacagcaccccaatctatggtatcaatttactgtattagtcagttctcatgctactgataaagacatacccaagacggggtaatttataaagaaaaatatatttaatggactcacagttccacatggctgggaagccctsacaattgtggcagaaggtgaaaggcacgttttacatggcagcagacaagagagaattgagaaccaagtgaaaggggtttcccctattaaaaccatcatatctcatgagacttattcactaccacaacaacagtgtgaggaaaaccacccccatgattcarttgtctcccaccaggtccctctcataacatgtgggaattacgggagctaaaattcaagatgagatttgtgtgagggcacagccaaagcatatcacttgttttggagtatgcattgcataaaggaatagaaatgtaactcctagtcctctcgtgtgttccaaaatcacaatactgttaatgatgtcagatatcaggtaaagattaatgaatctcaaaaatttttcttctccaaacaagaaaacaacctaagtaaggatctaagaaactagataattttcataaatctattatcacaatataaaaggggtgtaaaaaatattagtatagttacttttcaattatattctgttgcgtatttcttttgttcaatctggaaatttctctccctcacaactttcttcattccatcctcctccactctgtttcgctctccatctacctgcttactcatctaatcaatccatctatccatctatccaaagatcctttcatctatcctttgcttcgttgtttaaaatatatgaggtgaacaaaaaggggaaaaaatgcatctgtttgacttgtctgtgtctttctatctagaaagagccttacagatataaatatacatacagatgtatgttgtatacttgtaaatacacttggctttttattttttcattaattacctgtaattttttcttctcttctttcatgtggatgacaataaaaaagcatggtttgacctggaattttaaagtgttttggggaaaaaaaaacagctaacaaaaaaaatttaggaaattctaaaaaagctcttactttgctttcttcagaaagacttttctgtataattagtttagtgacagtcctctatttgagagtagggaaaaatgtgttttactagctctgtaacctcaggcacatcacttaacccttttgccctccgttctatcatctgtaaaagaggaataatcatggcaactatctcaaatggctgttgtgaggacagaatgtgttaatatttataaagagatttcaatagtggttggaacacacacacacacacacacacacacaaaaccctatgcattaactgctacttatagtctgaacatcttcacagaaatgaaagctaatgagagcaagagattggcttttatgtttgttgccatttcctagtactaagaattggtgaccaaaacattgaaggtgttcaataattattmttttgaagaggcagaataataccctagttaagaacactgatcatgaagacagatttcctgtactgaaattctggatctaacacgttttactgttcaacttgtgcaagttagttaattatgtgctttatttcttgaatatgtaaaatgggataataaaaattcctaactcatacaattgttgagatgattagatgatttaaaatatgtaaagctatgacgcatagtaagtagtattgctaccatattacctgatgttaaaagaaatcattcacatagtgttatgttacatgtgaatagaatgtgctcctggagttgcacaaattagcagccttcatawgagcaacaaagttaaccataaaagtatgttcttatgaagagcaacatagctacctgttaatagccagatgtaaagttatcaaatattttatggcctaaacaatactgttataagccaactacaaagcacatttcataaattatttatattattgkattattcttcaaaaaacaattgggtctrtctgaacaaaatctttctgccttatctgatcctctggatttggtttctagtacctatcagatttattttttccttcaagcaggatgaccctttttaactttgactttcattttggatctatattttttccctgtctacattttcccatgataccttggtactttcccaacttctccaaaaattgaatagcttctggctgtggtattttcacagcgaatttaataagattgagtgcagtgtcctactctttttgtgctttaccatgtcatattgtccattgcctacctctgtatttaaaagtaatrttacttaggagttttaacttgagactatctgtcttatttcataagctttgaatttctgctttagctgcaatttagaataaggaacaatcttctacataataatgtagatttcatccccatttaaaagcattacatactcttccataggcaaattaggaacgtgctgtttttggcaaaataatgattttgcttcttgcttggtcaaatgtttttttaaaaatcaataattaactacattgttagaactcaactacaaaattagaattgtgaatctgattgctcatggacctgttggaaaggttactactctgtcctggtaagtatatccctgtattatgggatatacttcattcaaatacaatttgaatatccttctagaaatatctttagagatagatagaactttgaaatcccagctcattaaaaataatagagccacaacccataaaaactgctgccacctgtacaaatttcagatcaccaagggaatttttcctatagatcatcaacttatattaaagttkcaacttgagaaaaaaatatttgctgctgaatatcttggttgaatgtacacaaaaaagtggattagtagtgtactagcttttacctccctgttgattcattctttcaacaaatatttttataagtatttaccaggtgactagcaaacaatcagaggaaaaaaaagattactgtttttataaacttggcaatcaaatgtgagaagacagaaaataagtaagtaaatcatatggcatattaaaagatgataaatgctatagagaagaaaaatattgatcaagttcaggtatattagaatgcctgtttggagggagaaatttgcagtttaatagttagaatagactttgttaagtttattatatttgacttaaggaggataagtgttagaaccatgggaatatttaggagaagggatttccagatttccaaaaaaaaaaaaaatccaatgcaaagttcctacatcgggacctcataattcacaggacaccaaggaagacaatgtggctgctgctgatggaagagatgagttcaaggaaggcaccaggtcaagaagggccttttataccattgtaattggcaactgtttagcaataaatgagaatatattatttaattttgtgtagaaaaacttgattatctgacttccattttaataaagtcattctagttgctctatttagaatatattgggggtggggaggggaaaaaaaacattgcccgagtaaaagaatggagatgagttaaaaacacactagttaaaaccaggtaagaaatcatagtcactgagaccaagatgctagtagtaactttagtgagccattgttatggatatattttgaatatggggccagcacagttacctaatatattgggcatggatttaaagatggagttaagaatgactgtaattggcctggggaactggaaggatagacatcaactgagaataagaatattgtgtagattcattttcttacccaatctgccatagttcacactgttcacttccaccttagtgccatacatagaatattaagattggagacttttccactatagatatcagtttcaaataaatagcccatgtaaaatctaaaactcacacatatattttaatttactgttagcttggagtgttgttattaacccagtcacttatggaaggatcaccagtgctactgaatacaacatttgaggagtaaatctacattatctcagatttgacttgaattactgtatttgttggtggggctgtcctcatttaagataaacagaagagttttgtggggagatacttattaaaataatacttaacaataagcaaggtacactataatgttatattatttttaactcygaaaactgaaggtacaaaatgacatgaccaaattccagaaaaaaatgacaccttcccagaataaaggactcacatgactgttttcatccctgagggcaccgcagcagcaggagacaatctgctttagacagaaatgaggacaaaccagtccaatttttaacaaactattaatgaccacatataggttggagtggtgaattcgaattttaaggagtctcccacctaaagcaatactatattatcaaccarctcttacagagggacttcacagagtgcaaggycacaccctttcaaagattgcaacaaagagaagagaaagcccaccccaaggtttactgggctttcatagactgtactgctacaggtaaaaggggacagggcagcaaagtagagagagatcttcagaggcataaaaagctggaatagtaaagagaatgcctcataactcccaaagcccagagagccagctcgactatagattagattggcacaagccttcacacaagcaaacagaggaaagaataggcatttcctggaagtgtctgtgtgtgtgtgtataaatatatatatataatataaatatgctatgcttatatttataacatataaatatacttatatatatttatattcatatttatctatatatttatgttcctaaaaaagaaaacagaagcagttatgacttacatcaactctgaaaaataagaatgcgtccttggaatcagaaaatacaaaccctgaaagtgaagtacaagagcttcattagtaacataatgaatgaattataacaataaatgaaaaacaaactaatatcaatgatgatgacaaaacttgctacttttcctaatagagggaaaggatagtttagagatagttgcaaagcagattaagacatgaagagtagaacatctgccaaaaaggcaagccaaagtttaaaagaacaacaaaaacaaacaaataattatttgttccttaaaaatctgctttggtgcccttgataacaaaatgtgtgatatatgtttgatagcacaggttggtcagagaaactttagtaaggtatgagaaaagaacatacacagcatttccaaattaactgaagtggatgtcaaatttgaaattttggagaggtatctgtgcagcatttagcagaggcttaaaaggacctgaggatcttccagattttttggtgaggagcaaatccatctgacagggctcacggatccaggatctacatgctgtgatgacgagataacacctcaatttctgctccaactcttgctctgcatgtcaagaaaatttactcctgctttggcatctgatcatcaacagagaccagcaggattcataatctactacatgccttatgttgatgaaaaagatggtctaatgtcatcraaaatgaaatataatgaaataaatactaaagaaacatttggcaatttgcactttcactgtctctttttttttatactttaagttctggggtacatgtgcagaaagtgcaggtttgttacataggtatacaagtgccatggtggtttgctgcacccatcaacccgtcatctacattaggtatttctcctaacgctactcctccgctatccccccaccccccaacaggccccggtgtgtgatgttcccctccctatgtccatgtgttctcatcgttcagctcctacttatgagtgagaacatgtggtgtttggttttctgttcttgtgttagtttgctgagaagtatggtttccagcttcatccatgtccctgcaaagaaaatgaactcatcctttttatggctacatagtattccatagtgtatatgtgacacattttctttatccagtctatcactgatgggcatttgggttggttccaagtctttgctattgtgaaaagtgccacaataaacatttgtgtgagtgtatctttatagtagaatgatttataacactttgggtatatacccagtaataaggttgctaggtcaaatggtatttctggttatagatccttgaggaatcggcacactgtcttctacaatggctgaactaatttacactcccacaaataatgtagaagcattcctatttctccatatcctctccagcatctattgttttctgactttttaatgatcaccattctaactggcatgagatggtatttcattgtggttttgatttgcatttttctaatgaccagtgatgatgagctttttttcctttatttttaggctgcataaatgtcttcttttgagaggtgtctgttcatatccttcacctactttttgatgtggtggttttttttcttgtaaatttgttgaagttctttgttgattctggatattagccctttgtcagatggatagattgcaacaattctctcccattctttaggttgcctgttcactctgataaaagtttcttttgctgtgcagaaactctttcgtttaattagatcccgtttgtcaattttgacttttgttgccatttcttttggtgttttagtcatgaggtctttgccctgcctatgtcctgaatggtattgcctaggttttcttctagggtttttatggttttaggtcatacatataagtatttaatccatcttgaggtaatttttgtgtaaggtgtaaggaagggatccagtttcagttttctgcatttgactagccagttttcccaacaccatttattaaatagggaatcttttccccattgccttttttttttcaggtttgtcaaaggtaagatggttgcagatgtgtggtgttatttctaaggcctctgttctgttcctttggtctatatatctgttttggtagcagtacaatgctgttttggttactgtagacttgtagtatagtttgaagtcaggtagcatgatgcatccagctttgttctttttgcttacgattgtcttggctatgtgggctcttttttggttccatatgaaatttaaagtagttttgtctgattctgtgaagaaaatcagtggtaccttgatggggatagcattgaatctataaattaatttgggcagtatggccattttcacgatattgattcttcctctccctgagcaaggaatgttttttcatttgtttgtgtcatctcttatttccttgagcagtggtttgtagttctccttgaagaggtctttcacatcccttgtaagttggattcataggtattttattctctttgtagcaattgtgaatgggagttcactcatgatttggctctttgtttgtctgttattggtatataggaatgcttgtaatttttgcacattgactttgtatcctgagacattgctgaagttgcttatcagcttaaggagattttgggctgagactatggggttttctaaacatacaatcatgtcatctgcaaacagaggcaatttgacctcctcttttcctaattgaatacctttatttctttctcttgcctgattgccctgacaagaacttccaatactatgttgaataggagtgctgagagagggcacccttgtcttctcccgtttttcaaagagaatgcttccagtttttgcccattcagtataatattgactgccagtttgtcataaatagctcctattattttgatatacgttccatcaatacctagtttattgagagtttttagcatgaaggggtgttgaatgttgtcaaagccctttcctgcatctattgagataatcatgtggtttttgtcattggttctgtttatgtgatggattataattattgattggtatatgttgaaccagccttgcatcccaggtatgaagccaacttcatgrtggtggataagctttgatgtgctgctggattcagtttgccaatattttattgaggattttttcatgtatgttcatcagggatattggcctgaaattttckttatttgttgtgtctctgccatgttttggtattaggatgctgctggcctcataaaatgagttagggaggagtccctctttatgtattgtttggaacagtttcagaaggaatgataccagctcttctttgtacctctggtagaatgcagctgtgaatctgtctggtcgtgggctttttttgattggtaggctattaattactgccccaatttcagaacttgttattggtctattcggggatgcaacttcttcctggtatagacttgggagggtgtatgtgtccaggaatttatccatttcttctagattttctaatttatttgtgtagaggtgtttatagtattctctgatggtggtttgtattcctgtgggatcagtggtgatatccctttaatcatttttttattgcatctatttgattcttctctcttttcttctttattaatctggttagtggtctattttgttgatcttttcaaaaaaccagctcctggatttattgattttttgaagggattttttgtctctatctccttcagttctgctctgatctcagttattttttgccttctgctaggttttgaatttgtttgctcttgcttctctagttctttttaattttgatgttagggtgtcaattttagatctctcctgctttctcttgtggcagttactgctataaatttccctctatatgctgttttaaatgtgtctcagagattctggtacgttgtgtcttttttatcattggtttcaaagaacatctttatttctgtcttcatttcattatttacccagtagtcattgaggagcaggttgttcaatttccatgtagttgtgcagttttgcttgagtttcttattttattttatttcttttttttgagacgtagtctcgctctgttgcccaggctggagtgcagtggcgtgatcttggctcactgcaagttccacctcccaggttcatgccattctcctgcctcaggctcccgagtagctgggactacaggttgagtgagtttcttaaacctgagttctaatttgattgcactgtggtctgagagactgtttgttatgatttccattcttttgcatttgctgaggagtgttttacatccaaatatgtggtcaattttaggataagtgtgatgaggtgcagagaagaatgtatattctgttgatttggggtccagagttctgtagatgtatattagcactgcttggtccagagctgagttcaagtcctgaatatccttgttaattttctgtattgttgatctgtctaatattgatggtggggtgttaaagtatcccactattattgtgtgggagtctaagtctctttgtaggtctctaagaacttgctttatgaatctgggtgctcctgcacgggtgcatatatatttagaatagttagctcttcttgttgcattgataactttaccattatgtaatgcccttctttgtctcttttgatctttgttggtttaaagtctgtttcatcagagacaaggattgcaaccgctgctcttttttgctttccatttacttagtaaatattcctccacccctttattttgagcctatgtgtgtctttgcatgtgagatgggtctcctgaatacagcacaccgatggatcttctgaatacagcacaccaatggatcttgactctttatccagtttgtcggtctgtgtcttttaattggggtatttagcccatttacatttaaaattaatattgttatgtgtgaatttgatcctgtcattatgatgctagctggttattttccccattaattgatgcagtttcttcatagtctcaatgacctttacaatttggtatgtttttgcagtggctggtactgcttgttcttttccatgtttcgtgcttccttcaggagctcttgtaaggcaggcctggtggtgacaaaatctctcagcatttgcttgtctgtgaaggattttatttctcctccacttatgaaacttagtttgggtggatatgaaattctgggttgaaaattcttttctttaagaatgttgaatactggccccactgtcttctggcttgtatgatctctgtagagagatccgctgttagtctgatgggcttccctttgtgggtaacccgacctttctctctggctgcccttaacattttttccttcatttcaaccttggtgaatttgacaattatgtgtcttggggttgctcttcttgaagagtatctttgtggtgttctatctattttctggattttgagtgttggcctatcttgctaggttggggaagttctcctggataatattctgaagagtgttttccaacttggttccattctccctgtcactttcaggtataccaatcaaatgtagatttggtcttttcacctagtcccatatttcttcgaggctttgtttgttctttttcattcttttttctccaaacttgtcttctcactttattttattgagttgatcttcaatctctgatatcctttcttctgcttgatcaatttggctattgatacttgtgtatgcttcatgaagttctcgtgctgtgttttcactccatcaggtcatttatgttctctaaactggttattctagttagcaattcatctaaccttttttcaaggttcttagcttccttacattgggttagaacatgctcctttagcttgcaggagtttgttattacccatcttctgaagcctacttctgtcaattcgtcaaactccttctctgtccagttttgttcccttgctgrtgaggagctgtgatcctttggaggagaaaaggcattctggtttctggaattttcagcctttttgcactggtttctcctaatcttcatagattgatctacctttgatctttgatgttggtgatcttcagatggggtctctgagtggatgtccttttatttgatcttgacgctatccctttctgtttgttagatttccttctaacagtcaggaccctctgctgcaggtctgctggagtttgctggagggccattccagaccgtgtttgccggggtatcaccagcggtggctgcagaatagcaaagattgctgcctgttactttctctggaagcttcctcacagaggggcacctgccagatgccagccagagctctactatatgaggtgtctgttggcccctactgggtggtgtctcccagtcaggatacgtgggggtcagggagccactcgacgaggccatctgttccttagcagagctggagtgctgtgctgggagatccactgctctcttcagagctgtaagggagggaagtttaagtctgctgaagctgtgcccacagccaccccttccccaaggtgctctgtcccagggaggtgggggttttatctataggtccctgactgaggctgctgcctttttttcagagatgccctgcccagagaggaaaaatctagagaggcagtctgaacacagtggacttgctgagctgtggtggactctacccagttcaaacttcctgatgactttgtttacactgtgagggtaaaactgcctactcaagcctcagtaatggcggatgccccttccctcaccaagctcgagcatcccaggttgacctcagaccactgtgctggcagcaagaatttcaagccagtggatcttagcttgctgggctccatgggggtgagacctgctaagccagtccacttggctccctgacttcagccccctttycaagggagtgaacaattctttctagcttgcgttgcaggcaccactggggcatggaaaaaaaaaacaaaaaaaaaactcctgcagttagctcagtgtctgtccaaactgccgccgagttttgtgcttgaaacccagggccctggtggcataggcaccaagggaatctcctggtccgcaggttgtgaaagtcatgggaaaagcacagtatctgggctggagtgcaccgttcctcaaggcacagtccctcacggcttcccttgggtaggagagagaattccccaaccccttgcacttcccggttgaggggatgccccaccctgcttcagcttgccctccttgggctgcacccactgtccaaccagcccaataagatgaaccaggtacctcagttggaaatgcagaaataacccgcctyctgagttgatcttgctgggagctgcagaccaaagctgttcccattcagccaccacagacagtgtctgtctcttttcttgaaagtgaagcacctaaccaaggctttcttcctctactctgtcaccaagttgaaagcccatattggggatgaaaaaactgggtgaaatgatgggcgcaggatttccttcctccctacatgttcccccaagaagcatatgaaatttcccctattagtttccagaatggaattttcctggccagctcagtcccccaggagcaccaagaaatgtctgcccaccacggggttttcttatgatttttcttcaaaccaaggatttcactccttacaactaattcctgaaaaaagaaatgagtccacttttgggctgaattctacagataaattttcctctgaagatacagaatctaagcaataaatgtttctatttattttcttcagtcattttgtgctatctctcttagattttaacagctgcaaattgaaagattatacacatttgctcaatgcgagggttcataaaattttaattcctaggatataattttataattaaatattattgattaattaggattgtatgaattaattatttctactttattagaccccttaggttgtattttattgcaagtattgtatcatgatacractaaatagccagccataaacataagctataacaggcattttgcataattaaacaactagatatattttaaactgtggaagccattcttttcctaactctttataaaacaattgtaaaagttgcttgaacttttcctaaatacttttattgtttacataaacaaacaaaaaatacttggaggcctcagaaaattctataattgaaaaacaattctttatcctttcaatgaagtgacaatttagaagaggtcagtctacctaggggcctacctttgtgtgtcagaaagcttagtagagcccttgacctataaatagatctgtcataccccaagttcttcactttttttggaaaaactgaagttctagtcctcatttcatattatacctaactaaattattcctagtagatagccatgtttgcgtgtttccctctctccctccaagaaataacaaaagaaaagtcttgaaagaaaatgctgtcttttcttaatctttctgccttattcccgttctcattctgtataagatcttcgtctcttattcctctggttagtttcagtgtgctgacttgtattttaaggtagacagtgtggggttgaaaacttatcttacacggtgttagagtcttgtgttaggggctgctgctctggtgttcttgatacagagaaaggggcaagtgaaaggagcaacaaccaaagggacaggacccttctcactttagctccttgtaatcagctacattgaagtttcccactgtggttgtgctaaaagatctgcctactacaacctatgtagcctctgtcaactatacaagccacttcagattgaggcttttaatatccttagtctgctctgatagcagggatgtatcttccaaaagggagaaaaggggtagcctgggctacctgtagctcacagagaacgcagaagacaggtcagtttccaaccagcagaaaggaaaccggaaacactggtctgagcccagctcctgcagagaactatggtttcttctgagaggagaagaaaacaacgaagggataatcaaatattaaaacaaagagatgaataaatgatgaagaaagggctagtgtgaacattaagaagacatgttaaggctgggtgcggtggctcatgcctgtaatcccagcacttagggaggcagaggcaggcggatcacttgaggtcaggaattcaagactggccaacatggagaaaccccatctctactaaaaatacaaaaattagtcaagtgtggtagcaggcgcctgtaatcacagctactcagtcagccaaggcacacaagaattgcctgaacctgggaggtggaggttgcagtaagctgaaatcatgccactgaagaccagcctgggagacaaagtgagactctgtttcgaaaaacaaaacaaaacaaataaaaagaaaaaaacatgttagatctttcagggatatggagtgttgtggcatatgaattgaataagatgttggtgtaaaatattatattctttaaatctacttatattcctaaataaatgtgcatatctttgtaaatgtttgtatacatgtaagaccattgattagtaagattggaattggggagaatttcaaatgtcttgaaaaaaacaagacatttttacatctaaaagataaataaaataataaattagatgttcaagcatgtgttgttgtagttgaattaactcttacttttttactaaaatcatagaaacaccatgtcaacaaaagagagaaagacatttttctacactatataccatgaattaatttcatttcaaacctagaagacatatatatgttgccttggataagttaccaaatgttttaggatttcatttctcaataaaaaaataaagttaatatcacaaattgttatacttgcttcataagactattgtatgagtcgatgacaataatatgcttaaagcatttcccarttttaaagaactgtaaattgtaaggcataattaactgtaagcttttttgaatattatataaactactagggaaacattttttactattagcataatattgagttcatttttcttgctgaaagaagtcatgagaggaatttgaacatcttatttggcagactgtaaaatattttatagattttttgagatttataccacttacacaaactactcaaagaaatgaccagaaagaaaactgtcatctttctggtggggctttttaatttgattgcattatctctttctagcagatttattatagcatttatatgcatgagtgtaataaaataatattacagttttctggccaatttaggtcatgaaatcccattaacaattgaaatatgtagatacaaaaaatattcactgtgttaattaaatgtacattttatttactctctcttttataaaaatctaagcaaaagttcatttaatcattaagcaaagaagtgtggtaatgtaggttaaaatctagatttaaaaagcctttacatttaagtaaatctataataatatattatttgagacatccagaaacaactgccaaatcaaaattagtttcttaaatagcagtgtatagaagtcaaagttctgtctgctatagaaatcttgttgaattaaagtatttcccttaaaagctccaattagtgggaaaatcttatatgaatttattatactagtcatttagcaaacaattattgaagatctactgtattccaaacacaaaaatggcatgctatgatttctgcccttgaggttacagygttgggtagatactgacattcacacaaagattgcagtaagatggacttagtcctctaattgaagtcccaagaagagagagagaccaatattgctataggggtcacagccattcctgcagaggtgacagttaatcaaagtattgtctaggaaaatggaatatatgttcaaagtcactgaagcatgaaagctcacatgaaatgtgtttggaaaatagcaggtagttcagtgtagttgcaggatagaattattggtgggagtaaaatatatggctaagaaatgtatttattcaaacaatgagaaaccaataaagggatcagaaaaaagagggatctgaccagaatttccttttggcagcagagtttcattcacttacataattggatagaaatgtactgaaaagaccaaaacggtagatactataacagcccaggaatttgaggatgcagtgagccatgattgtgccactgcgctccagcctgaaccacagagctagaccctgtctctaaaaaagaaaataataataattagtaaaagagtttacataattttagaaatacattattatggaatctgcaaatttcaaaaattttgaggtctaaaggatataaaagaaatttttttaaataaaattaatataagttcaactagtttgatattagctttaaagaaaattactttgattttaaaatcaaggaaatacagaaatattttctccaatattagtatgtttattttcctacttaactttaaatttttatattatcactttaaatagatcattcattcattaaaaagttaggaaacaacagtatgctggagaggatgtggagaaataggaatgcttttacactgttgggagtgtaaattagttcaaccattgtggaagacagtgtggtgattcctcaaggatctagaactagaaataccatttgatccagcgatcctattactgggtatatacccaacggattataaataatgctactataaagacacatgcacacgtatgtttattgcagcactattcacaatggcaaagacctggaaccagcccaaatgtccatcaatgatagactggattaagaaaatgtggcacatatacaccaaggaatactatgcagmcataaaaaaggatgagttcatgtgctttgcagggacatagatacagctggaaaccatcattctgagcaaactaccacaagaacagaaaaccaaacactgcatgttctcactcataggtgggaattgaacaatgagaacacttggacacagggtggggaatatcacacactggggccttaagggggtggaggagtggaggagggatagcattaggagaaatgcctaacgtacatgacaagttaatgggtgaagcaaaccaacatggcacatgtatacatatgtaacaaacctgcacgttgtgcacgtgtaccctagaacgtaaagtataattaaaaaataaaaataaatagatcactcatttcacatactgcatgctttataagctcaaataatagttttctcaaactgacataaagtttagctcataatagagctaacaagttaatggcaaagtaaaggctttagtgagtacagaactcattaaaattatccagaagaatgcctggaataattttttttaacttgttgaaactagtggtatagtcaagccattgaagagtaacaactagcaagtattttacttagctagagagtgtcaatgaatggctacttttctctgaaaatgaatatatgctccacttgtgattgcatagcctggaagctgatgccaaggagtcaggcaaatgaactggataacaggggaatgaaaaaagagctgaggctgaaagagagaatgaagacgtgaaaagatacttgaatcataagtaaagatcaaatgaaaacaagatactattctccctttaccctcacccattttaggatggtaaagatttaaaaagtttgaagcacccagctgccagttgagtgtcagaaaaaaaaaacccttatatgtttgtggtaatattatattaacatgagtatccagtgttgatcctttgcatacatggaaatcacatgcttttctatgacaaagagtaaatagacaaatcaattaaagatcagggattagataattcttatagacagggatagtgttcttttgtcagtcattctaagctccatcatcctcaacatcacttatatgatttatggtttagagacttttgatattaatgtatttactcatgtggttctcattatcaggaatgtccttttatttcttttgtctaatgtacaatttcagctcatatattctctagtcacttaatatttcacatttggcattatttttacacatatatcttattccctcaactagacggttaactccctgaagcccagaaattaatcttaggcattttagtatcactcaatttctaacacagtgctttatgtaaatttatgattagtagctgtagtttgaataaatcatcactcttaccccaagccttgttgaggcttatgatgttagaacatgttggaagctactgataaaaatgaaaaatatgcaaatctttcaacaaaaacttactgaatatttactgcttgtcaacagtgtgcaagactctggggatacaattttgcacaaaatagaaagggtcttatgttctaaaagatcagaaagatgttaaataatcacagtccttaatatttcattaaaaattgaaataagtttgctgaagaaaagggaaaccgtttcaaggagttttaaattttagattttttagtgaaggaaaattctcctttaaaaccgagatttttttctgattatgcactaaatacattactacagaaattattttcatccaaatgagaggcccacacttcactcatggtggacctatgaactagataaacctaacagacagaaacccactgtgtttctggcttttgttgtcattgttttattttgtttttttaagctaatttattcattattttttaattgataaataaatgatgggatatatttatnnnnnnnnnnnnnnnnnnnnnnnnnnnnnnnnnnnnnnnnnnnnnnnnnnnnnnnnnnnnnnnnnnnnnnnnnnnnnnnnnnnnnnnnnnnnnnnnnnnnnnnnnnnnnnnnnnnnnnnnnnnnnnnnnnnnnnnnnnnnnnnnnnnnnnnnnnnnnnnnnnnnnnnnatctcttgaacttatttcacctatctaattgaaattgtataaccttcaaagaacatctttctatctccacacctccattccagcccctggtaactactattctactgtcctttacttttatcagttcagcttttttataataactcccacatactagtgagaacatgtgatatctgtctctttgtgcttggtttaattcacttagcacaatatcctctgggttcatccatgatgtggcaaattacaggattcccttgtttttaagactgaatagtttttctttatccatttatccattgctggacacttgggttgactccatatcttggctattatgaagagtgctgcaataaacatgggagtgcaggtatctctttgacatactgatttcatttcatttgattatgtatccagtagtgggatggctagatcataaggtagttctttttttcaatttttgagaaactatcatactgttttccatagcggctgtactaatttacatccccaccatcagtgtacacggggtttcctttttctccatatcctccctaacacttatttttcatctttttttatagtggccattctaacaggtcaggtgataactcatcatgaattttacttgcatttctctggtaatgagtgaggctgagcattttttatgtatatacctgttggtcattttatgtatatacctgttggtcttcttttgagaaatgtttattcctgtacttggcccatttttaattggaccatttgttttcttgctaatagtttgtttgagttccttatacatttagaatagtaacttaggagatacacggttacaattttttctgccattttgcaggctatctttttgttttatccattgtttctcttgctgtttagagctttctaatttgatataatcccatttgtctattttttgctttggtttctatgcttttggggtcttaatctcccccaaaaagtcattttccagaccagtattatagagattatgccctgtgtttatgtcttggaaagggggtcttagaacactttctctgtttgctcttytgtgtttgaatactgcccaggggatactcagctccagtgtcatagatgagcctacacaaaattcttagttcagctaaggcaagtcatgcccaaccaagggacagaacatcctgccttttaagttagaagtgtccaaaaattattaatttgtctcttagtcatctcatctacacacacacacacacaaagtcaaatactcagctaatggttttccaatgttccagtcaccaaagcttcttgtatatatttatgttaaaaaaaaaaagtcaccgtggctaatcacctcatttaaaagtcagattgaacacgtgggcattcacatgtgtaggctgaggtatattggcaaggaattgacactcgtacttccccaaagatctttcgctttgcttggctgactcggcaactccaataaagtgcagccagactccagtaaaataaataaagtgaacactttgcctcctagtacctttgctgccgtttgcatttcaccactcagcttatagagatgaaacctattacttggcaggcaccgcttgcacaaatgaaagatatatttttcttccagatgggacagatcagcaagattcataaaatattaatgatgaaagctttgggaattatatatatccctgaccataggtttctcttgacagtgaagaattgtcagtttaacccatttttttttctgtaagattcccatcaagaattatataaagggaaaataatacatgatttaagattcaggtgagcatagatttgagggaaagattatctttctgtctttcattttctttcgtgttttgtgttcccaatctgcaatacattttgctgagtgatgtagtgtggtcaatttgattcttgaagctgttcatgtgctcatgaaggaaactgcttttatgagaataatacaggaagtatgcatttcttattatttaatagaacatacaatttagcaatacctgacatttatatgattgaaataatttgtttatctcaaaattagaaatttattgaatgtgtattcaaaatatatattaatgtagaatttcactttcacttgttaggttttgttatcttgaaaacttttctgtaaccattacaaatcaacaataatttttaggttactatctctgtagaaggcttggtcacttacctttcttttttttaatgaaaaaatttggggccctctttttgaggcagcaaatcaattaccattaatctgaaattttttaaacatgtattttcattttacacagaaacaaagtttacatttataaaatctaaaaatgataaaaatgtataattatcttattatggcaacctgattcattgtattatattacatatatttaggaacatatatttaagtatctatgagatatttgaatattagaaatttcttgaaaataataaaatacttctattagccaatttatagaaaattctacatgaaacatatctccaattgttttaaaaactctttgaaatattttatgctagcacaattatttgcaacttgactcaaaatatttttcatcatgctatagagcaatagtacaaaaaactaaccattttaacaataatgcttcagaaaggagacagtcacacaaaaatggatccaaaatcaactaaattatatctattataattctatctaatactaattagatatatagtactaatactatatatctagtacaattctattattcacattgaagataccacctaatttgttaaatattaataattagaaaactaaaatattcattttcattcatactctttttctacctaaatagaacacataattattttgatttgataacaaaatatttacaaaaataatatataatttaatttaaccagatgaaattatctttgcttaattactttttatttaattgaatatctggcttaatatatatatctcttctcaggtacatgatatttttcatcagtgcctatgagaaattatcagccaaatataaacttcataaatcactaatgggattctaaagtcctgtgcctacagtgtgttaaagtttctagttgatgatagccatacaaagatgaataagcaattccattttgttcatcagtctttcacaaaattcatgaactagttgtaaaaaatcagatcctgttaaaatgtatcctgaattatatttaaaggtacatcactagtaagtacagtcaaaagaccaattacaagagttctggtcgtgaacattgttataatattttcaaaaccaatgctgtttttcctggttgcctgatcatctgatgatcacctctaatgtttagattctcttcatcgatgtttcaaatgtataatattgaaaacataaactccataaaccaaacaccttgctgtgaccaaaatacacaatgcttgcatgggattcaaccgattgttgctacagccttctgaataacaaatttcttgggatctatagttgggtctctttaagttctgcttttcttctgctccatgccagtgaatgaaatctggttttaggtcctagcctctgtgttctgtgatatgactaactggctgtgaagataacttcatgttaaaaaatgagtttatgtgacatgagaatcccaaaatacctactactgtttcaaaatgtcagtctccaattgcaactattcttgctgtctgtggaagctacggaagaagacaaagaggaaaaatgtggaaattccaatggaggtgttgttgaccacagaagctgaccacggcacatttaagtagagagagaaatgctgatggagatatcaggagagctggaggaatctgtgcctcaagagtatataaatgttcacagttgactcttgtctgaaagaataatgtttacataacaccaaactttgaaaaacaacataattggttctacttagagttacttaaatagcccaaagtagcactgagtttttaaaaatataaatatgtgtttatgtatagtgggaaaagataatacaaaataagaatatatttattttctcaaactacctttgcttaaagaaaatacacataattttaaaggcatgttatctttagagaattttattcgcttatttattgttttataccttcacagttttcttctgaatacccttgttaacacagtctggcagacattcaatagcaaactgtgttccaggcaatgaatttatactgttgtaacaggcacaatctcttgaatgttgtaaccttttatatgtgatggaaaaatcaataacatggataaatgtgtaacagactagcctgtgcacctttttggtgaagtgaagttcagtgatacggactgaagtactttcttaaggaaaataactttatgcttaagtggaatattataaaatatatttatttactaacagacgtcaatagtaatattaaaagagacttatatgtgtgtatctctatattatgttatatataattcaaatatttaatttgatactttaaatgaaaaatttaacttaatacaaaggtatgtctattctgtgacatgcatacacagataaattatgttaaaatatttggtctatatttttctgtcaatttagaaagattttataaatatgatcctaatgcagttagatggaaaatggcaagttattacagagaatactttttattttacttttatcagcaagaaaccagtgggttgtattagtaatactagactttcttttttccagggtatcaacggtttctgtacagcacagattatgacagcgtctttcttaaggtgagattctatgtcattcatggtagtattctaaggtactacactttttaaatgtattatcaaaaatatttaataagtaaaattgtcctggagtagctacacatgcctaaattgaaaatattttctcatcagttttatgttatttcttcaatagtgttgttttcatgataaactcttaacaacatttcttgaacatttctgagtacaagccatgtaatgtgatactttgattaaaacttggaaatgtgttaaccatataagaaaatcaagttagagaacaacagcaaaacattctaatacaactaatacaattaaggcatctctcagagagtgcacacacttgtgcaggtacacacacacacacacacaggcacacacacagagaggatggtaattaatattggtaactttctcctaaaatacaagaacattagaatcttacaattctcacaagccctccagattgttgtgttaatgagtagttttgctctatcttctttattattccaagagttagcaatttttattattgtattataagttaattatatgagatttactcacacatttactactttttcccaccatttcttatcagactttacaccttgtctatctgctaaaagtatatactttatcatttcctttagtaaagaattgtcaagttttctttgtctgaaagtatttttattttactcttactcttgaaaaataatttcccccattgtgaatctagattgtcagtaattttgcttgcaccactgaatagtttattatattgcttcctggattccatttattaatgaaaactcaattgttttcattgtaacaactcagacagttgttacacctgtctgggtaatttgcatttcttcttgctgcttttaaagtcttctcttaatctttagtgatctaaaactggttgtaatatgactggatatattatgtatcccactctagatttgttagccttcttgaaactgtcaatagatgtttccagcaattctggaactcctcagtcagcatctcctttaatgtaatatcttccatttatttattttccatatctcttccttttttcacatcatttcattatttattactttgaatctatatccagttcactgattttatctgcatagctgatatattttcatttaatcttttttaatattctaatttttattcatattttttcaaatatgactttaggttcatgacgtacatgtgcaggtctgttacatgggtgaactgtgtttcacygtygtttggtatatgaatgatcacattcactcaggtagcaagcatagtacccgatttagtagtttttcaaccctcactccctccctcccacactctctgctctagtagtccctggtgtctgttgctgatatctttaggtccatgtgtactcagtgtttagcccccacttataactgaaaacacggagtatttggttttctgttcctttgttaattcacttaggataatggcctccagcagcatccatgttgctgcaaaggacgtgattttgttcttctttatggtgacagagtattccatttgtgttaagaaattctgtttgagtcttttaaaaatttagtcatctttttttttcttgttcttatgttcaatccaagtttctattttatttgtgattctatttacactctgtgttgttcatgatcaatttcattcatggactattattttccatgtgtgtgtttttgctgttgttttaactatgattgcacacacataaaatgttatttatgaaaattctttgaggcgagacttgaagttctactcttaaattttttgctcctgccaatcactaaggggcaatatcaacccaagaccaattttatactaactgctttgcttttggtttttgagcaaacaaatagcatgaattcattcagatctcagatctttaataaggataagttcttagttttgcttttattttctccaggcagcactcaggaatgaatatttctttttagaccctttttcgccatgaggtttgtttcttattttatgagggagagcatttgctattatactttccactatgggtgggccacaaggtttatctcctgcattctgttcatcatgaagcagtcaaaatgtaatctcaaacattctaaggtttggtaggaattttcacacaggaagctggctttggtgattacttcacctctcagggtttctgtttttattattatcatagtatttgtagaattttttctttcatgcaaaatgaaagattcttataatgtacatacacatgtgtgtgtatgtaattttattttaattgtttttcatcagtaactttactctggttagatagatccaatatgcagtcttgaagcagaaaagtaaatgtttttgatttctaaagatgctaatacttgattctttacattttgcggacagtcacgaagaaaaaattatagtgwtttatctttataaacaactgctatgcctagaataaagaaatgttgcagaaaaaaagtgcagcagttcttaaacattttgctttcagaatatcagtttcttgagaatcattaaggactccaaagggctttgttttggcgattttcatctattaatatttgctgtattgtaaactaaaatataaattttaaaatatttatttcctctaccactaagaataaaccgattacctgtaacagagatagtatatttttatgaaaaataactgcattttttaaacaaaacaaaaattaatgagaagtttagcagtgctttgtattttcgctaatttctttcgtgtatgattcaatagaaaactcaatagaagactgctggagtgtcatacctgctactgtatccactctattttgatatcaaacatcatgtagcctttgaaaaccttcactgtgtattgtgacagaatgagaattaagacaaataatatcttagtatcattgtggaaataagtttgatcttgcagttgttctcgaaagttgcttgggatccccaggagaccccaattcacactttgaaaactactgacttaatagcttacaacagtttgccccatgagtctataggttgcgtgggtaattccactgaacctggtaattcaatctgggctggacttgactcatcttacacagcttactaatgtgtttctagtcagctattgggttgtctaaaggctggctgctctagaatgatcttggctaaaatgattaggacctcacttcatgtaaactctgtacctctaccaaaaatgccttggtctgttcccatggcagtcagggaagggtttcacaagggagagttgaagtataaaatgactcttgagtcytaggcttaaaattgtaggctgtcagttctactgcattcttttggtgcaaacatattaaaaagtcagcttgaactcatgagtggggaacagatttcacttcttgatgggagaggttacaaagtcataccagaaatggggtacatacacaacatgaaccatacaagacattgtgtcagtcagtcttccacaacatcttatgttctcaacatggaaacaaggtaaagttttctttcctcatcttcaaatgatttaactccattgtgaatactacagaaatctgtagggacatgttaagaagtaatactgctgtcacctaaaattcattagttttggctctacactgcaagtgttcaggtaaaaccataaccttgggtataaccagaccttgagagacaggatcacactaataaaatacacgataaattgatactgatgacaatattaacattactaatttttaattcacaataaaaaaggtaaatattacttgagatggaattttgtgtggaaatcagcaaaatctctcacatagtcaagtaacaccaagcatgttatgaatatgctgtcattaattcacttttacggagacaagaaataaacaaaatacatatttgagcacatttcctccttacacatagacaaatatagaaatcagattgttgttctctgattatcaaaatagacagtaggagatcagataagtaaaaatttaataacatcaagctaagaaagctgtatttagtgataaaaatttgggggttttgtttttgtgttttctttttctaacagaatggaaaatgcttaaagtatttctctccacctcaaagataatcacaccattaagaggagaaatatcaaaattgtatagcttggctccctttcctctggatcagatgttacatgttcctcaaatgtctagagtcatgcaagtaatgcatatgagtgacatggttcagcagtaaaatgtgaagtacttgtggagagagaggagtgtaggcaactaggataagccttcccaatataaatagtattagcttttacttaggtccagccaatcgctgcaatgtaggaatgaagatccattattactctatatttttattttaaaaacaaaagaaggttgtctcagtaagatgcctgaccagacacacccaggaggaacatctgccaccaagtgactgagacatagggaaaactggtgcactatgagcagatcttcagagggaaggcattgagggtggacagaaggaggacacagaccctgggccaaaggaggaggaggctgggaaccctgaacgggactaccatgcaccacaacttattcctggcccccaacaactcttggggaaggggtggattgaacaggtgaggagcaacctgccctcaccatgaacctctggaatcctggmaacctgagataccacaacacccatggacacttgagctagcagggaaagctgtgtagagagttgataggagcaggactctatcctgtgctgaactcacggggtatggtgtgggaacgtctgcagtaaaacatagctaggtctgctccagggccccaacctggcagagcccacttgcagtgcaagtgatggatagacaaccaaggtgcttcccaggggcccacatcatagctccttcaacagctgactgtgcctgaccatcagagagctccagcagatcggctgctgctaacacataccagctcacctgccccttcccctgaccacagcctcccccatgctgctttgccagcactcacttgcccactgtcactcaccccactgtccttccagcgtgcacacatgcgagtggaccttgcctcccctcctctgccagaatatgtgtgtgcatgcatcccctcacactactgcccacagagcaaacatgtgcacagaagctggcagccgcaaacccaccagcatcccagcccgaccaatgaacatgtaacccaccatgctgccactgctgctggcatgtgcaaacaaacatgaattcttctatcaccactcagacaaagcactttggctggcaccatccatgggattgttatggactgcagtctggaaacagctcagcccctccagaaccacagattcctaaccttgagggtcctgagaacaaagctgggagcctgggatcattccctcaaagttagagcacacagctcaagaatgctgaactgagccttagacccctaaaatcttccagaaagaaatccagtcaactgaaaccaccttagaccacaatcaaacccttaagggcaacaaagaagataaaagcaacaaaacccattcaaaggatagcaacttctaagattgaagaaacatcagcctgcacagatgagaaaaaaccagagaagaactctggtaactcaaaaaactaaagtgtcctctcacctcaaaatgacccacgctggttccccagcaatggttcttaacaaggctgaaatggctgaaatgacagaagtagaattcagatcatggacaggaaagaagattcaggagaaagtcaaaacccaattcaagtattctaagtgatacaaaaatgtaaagagaccaaatttattgactcattgacatccctgaaagagagggggagaaagcaaacaacttgaaaaccatattggaggatgtgatggttaatatcgagtgtcaacttgatttgattgaaggatgtaaagtattgttcctgtgtgtgtctgtgagggtgatgccaaaggagattaatatttgagtcagtggacaaggaaaggcagacccattctcaatctgggtgggcacagtctaatcagctgccagtgtggctagaataaaagcaggtagaagaatgtggaaggactagactggctgagtcttctgacctccttttacctctgctggatgcttcctgaccttgaacattggactccaagttcttcagcttttagactcttgggcctacaccagtggtttgccaggggctatcaggccttctgtcacagactgaaggctgcactgttagttttcctacttttgaggttttggacttggactgacttgctcctcagcttgcagacgacctattgtgggacttcaccttgtgactgtgttaagtcaaaactccttaataaactcccttttatatatacatctatcatattagttctgtctctctaggaaccctaatacagatggtatcacccatgaaaatttccccaacttcactagagaggacacaatattcaaattcagaaaatgcagagaacccttgtgagatactacataagatgaccatccccaagactcatagtcatcagattctctaagatcgaaatgaaagaagaaaggttaaatgcagctggagagaaggtcacttgcaatgtgaacaccatcaggctaccagcagactttttgacagaaaccctataagccagaaaatattgggggcctatattcagcattctttttttttttttttttttttgagacagagtcttgctctgttgcccaggctggagtgcagtggcatgatcttggctcactgcaagctctgccttctggattcacaccattctcctgcctcagcctcccgagtagctgggactacaggtgcctgccaccacgcccagctaattttttgtattttttttagtagagatggggtttcaccgtgttagccaggatggtctcaatctcctgaccctgtgatctgcccacctcgaactcccattcagcattcttaatgaaattccaacagagaattttgtatctagccaaactaatcttcataagcaaaggacatgtaagattcttttcagacaagcaaatgctatgggaattccttgcatcagacctgttgtacaagaggtcctgaaggtagtgccaaatatggataggaaagactgcaaccagatacaacaaaaacgcatttaactacagaaaccattgacactataaagcaactacacaaacaagtttgtataaaaacgagctaacaacacaatgacaggatcaaatccacacatatcagtattaaccttgaatgtaaccaggctaaaggcctgaattaaaaggcacaaagtggcaggttggataaagaagcaagacccaatgatatgctgtcttcaagaaactcatctcwcatacagtgtcatccataggattaaagttaatggatggagaaaaatctgccaaggaaatggaaaacaaaaaagcaggcattgctattttaattccagacaaaacagactttaaaccaacaaagttcaaaaaagacaaagaagcgtattacataatggtagaggaatcaattcaacagaagacctaattatcctgaatatatatacacccaacacaggcacactcagattcataaagcaagtgctttgagacctatgaagagagtgagatagctacacaataacaggaggagggttcaacgccccacagagcacattagggagatcatcgaagcagaaaactaacgaagatattcaggacctgaactcaaccaaatggacctaatagacacctacagaactctccacccaaaaacaacagaatatacattcttttcacgtgcacacgggtatactctgaaattgactgcataattgtccataaaacaattatcaggaaaatctaaaaaagcaaaatcacactaaccacagaatcagaccacagcactataagaatttaagtcaatactaagaagataactcaaaaccatgtaattacatggaaattaaacaacctaatcctgaatgacttgtgggtaaacgatgagattaaggcagaaatcaataaattctttgaaacttatgagaacaaagatacaacataccagaatctctgggacaaagcaaaagtaatgttaagagggaaacttatggtgctaaacagccacatcaaaagttagaaagatttaaaattaataacataacatcagacctaggggaactgcagaaacaacagcaaagtatctcaacttcaaagctagcagaagacaaaaaataaccaaaatcagaactgaaggaactggggacacacaaaccataaaaaaaaatcaacaaaattaggaatttgttttttgagagaataaataagatggacaaacaagtagctacactaataaaaaagaaagactatccaaataaacacaatcagaaatggtaaatgggacattaccactgagctaacaggaaaaaaaaaaatgggcaagatggctgaataagaaaagctccggtctgcagcaaccagccagattaatgcagaaggtgggtgatgtcagcatttccaactaaggtacccgattcatctcattgagactggttggacagtggatgcagcccaaggagggtgagttgaagcagggtggggcgtcgcctcacctgggaagcacaagggctcggggaactccctctcctagccaagggaagccattaggactgtaccatgcactccggcccagatactgtgctttcccatggttttcgcaacacacagaccaggagattcactccagtgcccacaccaccaggatcctcggattacagcacaaaactcagcagcagtttgggcggacactgagctagctgcaggagttttttttttgtttgtttgtttgtttgttttttctccataccccagtggtgcccagaatgctagtgagacagaatcattcactgccctggaaagggggctgaagccagggagccaagtggtctggcttgggactgaactctacctgggacactcaagcttggtgaggagaggggcttccgccattgctgaggcttaagtaggcagttttacactcacagtgcaaacagagccatggggaagttcgaactgggcagagcccaccacagctcagcaaggccactgcagccagactgcctctccagattccctcctctctgggcagggcatctctgaaaaaaaggcagcagccccagtcagggacttacagataaaagccccacctccctgggacagagcacctgggagaagaggtgrttgggtgcacagcttcagcagacttaaacttccctgcctggcagctctgaagagagcagcagatctcccagcacagtgtttgagctctgataagggatacactgccacctcaagtgggtccctgacccctgtgaatcctgactgggagactcttcccagtaggggctgacagacacctcatacaggagagctctgtaatgggctggcatctggcaggtgcccctctgggacaaagcttctagaggaaggaataggcagcaatcttggttgttctgcagcatctgccggtggtacccaggcaaacagggtctgcagtggacttccagcaaactccagcagatctgcagcagaaggatgtgactgtgagaaggaaaactaacaaacagaaaggaatagtatcaacatcaacaaaaaggacatccactcagagaacccaaattaaagtcactgacttcaaagatcaaaggtagataaatccacaaagaaagcgaaaaaccaatgcaaaaaggctgacaattacaaaaaccagaacccctcttttccttcaaaggatcacaactccctgctagcaagggaacaaaattggatggagaatgagtttgacaaattaacagaagtaggcttcagaaggtgagtaacaacaaactcctctgagctaaaggagcgtgttctaaccaactgcaaggaagctaagagccttgaaaaaaggttagatgaattgttaactagaataaccagtttagggaaaaacataaaagacctgatggagctgaaaaaacacagcacgagaacttcatgaagcatacaaaagtatcaatagccgaatccatcaagtggaagaaaggatatcagatattgaaggtcaactcaaagaaataaagtgagaagacaagattagagaaaaaagagtaaaaagaaacaaacaaagcctccaagaaatatgggactatgtgaaaagaccaaatctacatttgataggtgtacctgaaagtgatgaggagaatggaacccagttggaaaacactcttcaggatattatccaggagaacttccccaacctagcaaggcaggccaaaattcaaattcaggaaacagagagaacatcacaaagatactcctcgaaaagagcaaccccaagacacataatcatcagattcaccaaggttgaaatgaaggaaaaaaatattaagggcagccagagagaaaggttgggttacccacaaagggaagcccatcagactaacagtgaaaccctacaagacagaagagagtggggccaatattcaacattcttaaagaaaagaatgttcaacacagaattttatatcctcccaaactaagcttcataagcgaaggagaaaaaaaaccttttgcagacaagcaaatcctgagagattttctcaccaccaggcctgccttacaagagctcctgaaggaagcattaaatatggaaaggatcaactggtaccagccactgcaaaaacatgccaaattttaaagaccatcaacactatgaagaaactgtatcaactaacgggcaaaatacccagctagcattataaaggcaggatcaaactcacataacaatattaaccttaaatgtaaatgggctaaatgccacaattaaaagataaagccttgcaaattggatagagtcaagacccatcggtgtgctgtattcaggagacctatctcacatgcaaagacacatataagctcaaaataaagggatggaggaatatttaccaagcaaatggaaagcaaaaaaataaataaataaataaataaataaaaagcaagggttgaaacaataaagatcaaaagagacaaagaagggcattacataatggtaaagggatcaatgcaacaggaagagctaactatcctaaatatatatgcacccaatacaggagcacacagattcatgaaacaagttcttagagacctacaaagagacttagtgttgggaaaaagctaaatgttgggaaaaaagctgagrcagggcttgcatgtctgacataatgtccagggctcagggcataaaccgctcgtggcatctggaatgagtctagacttgctggctccttgcttctagcttaaactagaagaacatgctccccattatctcaactagcagaatatgtcccatatgcttcaaaggaaatgctaaaccatcacacctgtagatcatgcacttgccctttcgacccccacattctcaccacctatttctttgtttgatcaccaataaaaagtgtgggcttccagagctcagggccttcacagcctccatagtagcattggccccctggacccacattctctctcaaactgtcatttcccattcctttgactccactggacttcgtcacccccatgacctggtgttgggtctgatcaccccaacgcttagactcccacacaataatagtgggagactttaacacgccactgacaatattagacagatcaacaatacagaaaattcacaaggatatccagggcttgaaatcctctctggaccaagcatatataatatacatcgacagaactctccaccccaaatcaacagaacatacattcttctcagcaccacatcccacatattctaaaattgaccaaataattggaagtaaaacactcctcagcaaatgcaaaagaatggaaataataacaaacactctctcagaccacagcgcaatcaaataagaactcaggattaagaaactcactcaaaactgcacaactacatggaaactaaacaacctgctcctgaatgactactgcgtaaataatgaaatgaaggcagaaataaagatgttctttgaaatcagtgagaacaaagacacaacataccagaatctctgggacacatttaaagcagtgtnnnnnnnnnnnnnnnnnnnnnnnnnnnnnnnnnnnnnnnnnnnnnnnnnnnnnnnnnnnnnnnnnnnnnnnnnnnnnnnnnnnnnnnnnnnnnnnnnnnnnnnnnnnnnnnnnnnnnnnnnnnnnnnnnnnnnnnnnnnnnnnnnnnnnnnnnnnnnnnnnnnnnnnnnnnnnnnnnnnnnnnactaagattagagcagaactgaaggagatagaaacacgaaaaactcttcaaaaaatcaatgaatccaggagctggatttttgaaaagatcaacgaaatcgatagactgctagccagactaataaagaagaaaagagagaagaatcaaatagatgcaataaaaaatgatcgaggggatatcaccactgatctcacagaagtacaaattaccattagaaaatactataaacacttctacgcaaataaactagaaaatctagaagaaatggataagttcctggacacatacaccctcccaatactaaaccaggaagaagttgaatccttgaatagaccaataacaagttctgaaattgaggcagtaatagcctaccaaccaaaaaaagtccaggaccagacagattcacaggcaaattctaccagaggtacaaagaggagctggtatcattccttctgaaactattccaaacaatagaaaaagggggacacctccctaactcattttatgaggccagggtcatcctaattccaaaacctggcagagacacaacaaataaagacaattccaggccaatatccctgatgaacattgatgcaaaaatcaataaaatactggaaaccgaatccagcagcacatcaaaaagcttatccaccacagtcaagttggcttcgtgctggggttgcaaggctgtttcaaaatactcaaatcaataaatgtaatccatcacataaacagaaccaataacaaaaaccacaagattatctcaatagatgaggaaaagccttcatcaaaactcaacagtccttcatgctgaaaactcccaataaactaggtattgatggaatgtatctcaaaataataagattcagctaatatcatactgaatgggcaaaaactggaagcattccttttgaaaaccagcacaagacacggacgccctctctcaccactcctattcaacataatattggaagttctggccagggcaatcaagaaagagaaataaataaaggctattcaattaagaaaagaggaagtcaaagtgtctctgtttgcagatgacatgattgtatatttagaaaaccccatcgtctcagcccatggggctggagaggaagaatcaatttcgtgaaaatggccacactgcttaaagtaatttatagattcgatgctatccccagcaagcgaccattgactttcatcacagaattggaaaaaactacttcaaatttcatatggaaccaaaaaagagtctgcatatccaagacaattttaaaccaaaagaacaaagctggaggcatcacactacctgacttcaaactatactacaaggctacagtaataaaaacagcatggtactggtaccaaaaagatatatagaccaatggaagagaacagaggccttagaaataacaccacacatctacaaccatcttatctttaacaaacctgacaaaaacaagcaatggggaaaggattccctatttaataaatggtgttgggaaaactggctagccatatgcacaaagctgaaatggggttccctccttacaccttatataaaaattaacccaagatggactaaagatttaaatataagacttaaaacaataaaaaccctagaagacaacctaggcaataccattcaggactttggcatggacaaaaacttcatgactaaaacaccaaaagaaatggccacaaaagccaaaattgacaaataggatctaatgaaactgaagagcttctgcacagcaaaagaaactatcaccatagtgaacaagcaacctaaagaatgggagaaaatgtttgcaatctattcatctgacaaagggctaatatccagaatctagaaataacttcaacaaatttacaagaaaaaaacaaccccatcaaaaagtgcgtgaaggatatgaacagacacttctcaaaagaagacatttatgcagccaacaaacacatgaaaaaaagttcatcatcagtggtcattagagaaatgcaaagcaaaaccacaatgagataccaagatgctgtttcatgctagtaagaatggtgatcattaaaaagttaggaaacaacagatgctggagaggttgtggaaaaatagaaatgcttttacactgctggtaggagtgtaaattagttcaaccattgtggaagagacggtggcaatttatctagaactagaaatactatatgacccagcaatcccattactgggtatgtacccaaagggttagaaatcactgtactataaagacacatgcacacgtatgtttattgtgggactgttcgcaatagcaaagacttggaaccaactcaaatgcccatcagtgatagactagataagaaaatgtgtcacatatacactatggaatactatgcagccataaaaaaggatgagttcatgttctttgcaggtacatggatgaagctggaaaccatcattctcagcaaactaacacaaaaacagaaaaccatacactgcatgttctcacacataagtgggagttgaacaatgagracacatggacacagggaggggaacatcacacaccggaacctgttggggtgtcgggggctagggtagggatagcattaggagaaatatctaatgtagatgacaggttgatgggttcagcaaacccctatggcacatgtatacctattcaatgaacctgcactttctgcacatgtactccagaacttaaagtataataaaaaaaaatttaaaaaaaacaacaacaaaaaaccctcagagactactatgcacatttctatgcacacaaggtagaaaatctggaaaaaaaattggtcaattctgagagatataacctcccaaattgaaccagaaagaaagtgaatccctggagaccaatgacttccaatataagatcagtaataaaaagcctataaatcagaaaaagcccatgactagatggattcacagccaaattctaccaatgtataaagaagagtgggtactattccttctgaaactattccaaaaatttgaagagaagggactccttcctaactcattctaggaggctagcatcatcctgatactgaaacctggcagagacacaatgaaaacagaaaacttcatgccaatatccttggtaaacacagatgcaaaaatccacatcaaaatactagcaaactgaatccaacagcacgtctaaagctaatccagcattatcaatcaggattcgtccctgggatgcaaggctggttcaacatatgcaaatcagtaaatgtgatttgtcacataaacagaactaaaaacaaaaacacatgatcacctcatcagatacagaaaaaagcattcaataaaattcagtattccttcatattaaaaaccttcaacaaactacgtattgaaggaatatattaaaaaaataagagccatcaaaaaataaaataaaagcccacagccaacatcataatgaaagggcaagagctggaagcttttgggaactggagcaagaaaaggataccctctttcaccactcctattcaacatggtactggaagtcttagccagagtaatcaggcaaaagaaagaaataaaggcatagtaattgaaagagaggaagtcaaacgatccgtttttgcagagaatatgattttatacctagaaaaccccatagtctcttccccaaaactctttgatctgataaacaacttcagcaaagtttcaggatacaaaacaaatgtaccaaaattagtagcatttctatagaacatccaagctgagagccaaatcacgaatgcaatcccatttacaatagccacaaaaagaaaaaaaattacctagaaatacagctaactaggggaggtgaaatacttccacagtgagagataaaatactgctctaagaaatcaaagacaatataaacaaatggaaaaacattccatgctcattaatagaaagaatcaatattttaaaatagccatactgcccaaagcaatctaaagattcaagtattaaactacaaatggcattctttacaaaactaaggggggaaaactatctgaaaagtcatatgaaataaaaaagagcttgaatagctaaggccatcctaagcaaaaagaacaaagatggaggcatcacattacccaacttaaaactatacttatagggatagagcaaccaaagcagcatggttctgctacaaaacagacacatagaccaaggaacagaatagagatcacagaaataatgctgcacagctaaaaccatctgaccttgaaaaaagtctacaaaaacaagctatggagaaaggactccctattcaacaaatggttctgggataactagctagccatatttcaaaaactaaatatagacactttccttacaccatatacaaaaatcaactcaagatgatttaaagacttaaatgttaaacctaaaatgatataaactatagaagataacctaggaaataccattctggacataggacctggcaaagatttcatgacaaagatgctaaaaataattgcaacaaaaacaaaaattgacaaatgggacctaattaaactgaaaagcttctgcgcagtgaaagaaactatcaacagagttaaacaaacaaccaaaaaatggtagaaaatgtttgcatactatgcctctagcaaaagtctaatatccagaatctataaggaatttaaacaaattaataagcaaaaaacaaacaaccccattatgtagtgggcaaaggacacaaacagacacttttcaaaagaagacatacacatggccaacaaacatatgaaaaaatgctcaacattactaataattggagaaatgcaaatcaacctcacaatgagataccaactcacaccagtcgtaatggctattattaaaaagtcaaaaaatgacagatgctggcaaggttgcagagaaaagggaacgcttgtatactgttggtaggaatgtaaattagttcagccactgtggaaagcagtgttgcgatttctcaaatatctcaaaatggtaattctaccgttcaacccagcaatcctattatttggtatatactcaaaggaaaataaatcattctaccataaagacacacatatattcattgtggcactgttctcaaaaggaaagacatggaataaatctaaatgtccatcagtggtagaatacataaagaaaacgtggtagatatataccacaggatcttacacagccataaggaacaacgagtttatgtcctttgcagcaacacagatggagatggaggccattatcctaagtgaactaacacaagagcagaaaaccaaatactacctgttctcacttgtaagtgggagctaagcatttagcacatatggacacagataagagaacaacagacactagggcccacttgaggtgtagggtaagagaaagatgaggatcaaaaaactacctatcaggtactatgcgtattacctgggtaatgaaataatctctacactaaaccccagagacacacaatttacctataagacaaacttgcayatgtacccctgaacttaagataaaagttaacaagtaaatatataaataaataaaattgaataaagtaaaaacacaattgcaaagatttcaagagaaatccagaaacttatctgaaattgctccatttttgcatactgtgtagaccacatcaatgctgctagaacgttgattttccttctggttgctatttttgtgaaccttacatcatttgaacattgcaggtgttgtaataaaattcctattttcatgtctttttccaactgatatattgctttgttattgatgttaatatattcatacatattcataatctagtctgactctttaaatatttatgtaatattttactctcatgcattaaagtgtaagaacaatgtaagcaaatttaactgaaataaataccactataaaaggtcagcaaaaccagagaaaaagaatgcagcagagacggaaataatgttttatataaatttctatgcagaccattttggccatcgtttcacttggtttatcccactgtgaccctgaaaattaaatgtgggatgtgaatctactattcactcagttattattagttcctacttaacctcttaccacactgtgattctagtgcttaagatgcatgtatttcatacataattttgaaacccaagttgactacattttgtactcaaaagaaaaaaaaaattatttataatgtgaagagaaccactgactatgatagattcagtttgagacagaatgtcaatcttaagtgtggcaccaacatgctactactcccatatttgattatatgtgttttatgcttttgttggtgactaaatgtaatggttacatgaaacactatcaccgtagactctaagcacaattttgcattctttcagatatactacatcaaacttcaagaaaccttcagctagtctttgtcctatcaataacaaattaaatcggtcacttggattattttggcattgaatttttcttctgcataaagttgtaattgaactaataatctttacatttttttctggcttgaatattctgtgattatcagttttagcccattttgcataatttaataataaaatgtgctttgaactactgagtaaatgataaacaattccttctggattagaatataagtaatattccattgggaacaatgcataaatatatatactaatcaaatttcagtcttgcctctttaacctccttttaaaaagtcccaatccaatgttttacacctaatagatttctcaacaagtgcttgatactagtaaaccttttcagtgttttttattgttggtctttgatacaagtgtaccagtgaactttttcatttaatgtgttttatctcatgtagaactctgtacatgtagtcatactcactaacattaagccatagtataggcatcatctcatatttaggctataaagtgaagatttctggcatatactgtcgtcttttcaattccacaatcatactgatttcaactccagtgtcattctatacacataaacatcatacaaattgttcacataaatttttttaaccagttggcatgagattccaaatgtacaaacctaagtacaaattttattctgtcacttaagagttgtatctacatgggaaaattatttcaatcgctgagactcctgtgtctctcttgtaaaatggcacgacccacacctattgccatctcttttcttccttcatttataagtctttgtcatgaaatacgatattcccaacacaggaaaaaaaatgtgtttgatgtaatttttacttgatttttaatgtgctctttttaataggcatttgcctaagtcaattgctacttgttgttaagaaacttaatgtttattattaaataactgtttctatactgtccctccaaatatggttatatgtaataaaattaatccccagacactttctcctctgtaataattatactttcacagttgtttttaatgttcttgaattacacacattcatcaacgaataaagagaaaactctgagacaggatctaattgcaatacatctatcctgtaaagttcctcattaggtataaataaagtgtcatcactaatatcatgggcaacagtattaaattagaagagtagctccctccttgttgaagaaaatgaaaatagagaaaataataaattaatttataatggtcaagaaatatttaagcaggttctcctctctacttttttgggggaacccagccgtctgacattttctttaaggcaggaaattgtgactaaggaaagaagctgaaacagaagtttgtattctcattctcatactgtaaaaagattttactctgctggtttttagcatgttagatctctgtccaaccagtttacataagtttgtatgtatttaaatgtactgtttaaaaagcatagtaaggtcagtattttatcagcaacctttctgttacagtttttctcgtgagagtagatccagccttacactcaaattggctgcacactgatgtttagtactcctttctttcccatgactcactctagagtttgactctgtcttttttgatctgatattgacatataacaagttttctatgaaaattagaaagatgtaaacttcttacacagagcctggcacacactaaaagctaaatatgatggttatgtatataatatcggagatcatcaggctttactgcttataacattgtccattaaatagcatcaggcattttactatattttgtctttaatcatttcaatcttttataaatgtcagtcaaaagaccatctcgataataaatactgtaaacaataattagaaaatagagaagacagtgcatactactccagtttgataaaacaataaaatagtaagcacaataattacatgtacagtgaaaatatagataattggaatatgtaatgagatatcttatatcatttcttagtcataatatggatttcccccacttatttactttctcagtgcttttgttttaataaggtaatcctacccccaatctttataatctctaggaaccaggatcaaaacctaacctgatttttccacacaacatagctgacagaatagcaccatagtgtattattaccagaaacaattttcttgatgttctactaaagctttctcaaattttaattaaagagatggctttgtctgtgttctcaaatggtaaatttatcaattaaaattttaatcaaaactgttagggaacatttctgaggtacacctgggcctaatttcttgccttcaatgagcccagagtttatctggggaaaaaaaagttgtgtaaagaaataagagtaagaaaatgttaaaagtgatgtgatggacaaactacaagttagacaccagaccccaaaaaagtgttgatcacttcttacctataggagagaaatcagcaatacttcatagtgacagcatcacttgccctgccatgatgaggagctcaacgtatgtcagcagacaaagggcatggtgttgggaatgctgtcaattactagggcaagagaaggtaataggagcttttaataataatgaaaaagattttgaacttttttccatcagcagatggaatcttggaacgtctcatgcttgggaaggacatggtcagatttgttgtaagaaagactgtgcagaggagtgtggcaaagggatccagaagatgcaaggtattatttagaaaaggtagttgatggaagatttaacagcatgtgtttgatactttcttgactagatacacttgattttcaaagcctggagaatgtatacaacttaggtcaatggaaaatgtataaaatacaatattatgttggtgagaagctattatgatctataatattttatactgatgataaataattactgtatatataaaatatattytttagaaaaaatgaaatgatggatcatcactgttatttcartgatgaatttagcaaagtgaagtgaactttagaaattagttagatctctggaacattatagtaaaagctataatgagggccatggggcattgaaagcttttgaactatttgataaaccatgacatattaaattatgcttaacatatttcagcattacatgtattcacataaactccaaaatgtgactttaaaatggataatttctcattaaccaaactattttaactggaccacaattcttaatcagataaaatagttataattttgtagtgtatattgacctatattttatgttaatgtttttcatcatatgaatttcatgaaaaaccatgtgtattttaaaataaattttttctattctgttctctgggccagaaatatagtacatcatactataacatttgatctaagtaattaaacattcaatattagagtagccaataaaacagaaaattataatttttaaaataaaaatgtaacaaaattactttaaaatataaaaattttaaattatctttaaataatgctttatgctaggatattttaacttagtcgcagccattgtctttgagaaaacatggaatacagcaaaagtttagttatcagaagagccaacagccaggaaaatacccatgaatgtgcttcccagaggtctccaggtagccctttcctcttctattatgacactgtatgttcagtttgcttatgaagtgaggtacactgtgatagtgaaaaattcgttatttcttgaagatttcctaataatgattcattgtagttatgtgttgtcactatttttcnnnnnnnnnnnnnnnnnnnntattttctatgaggattaccttccaccttagtaaatggtacgatacacaaatgcttcactgttgctactttaattgaaaaggatcccttttagtaatcttctggactctagagaaattatacacacacagattggaagagctgagaaagctcatttaattaagctgtcaacagcaatatctcagatctgcttaaatttactgggggaagatctatttgaaatgcagaaaataaacactgaactacttgtaatgttacagtcaatacacaagaatatattacaagactaaggggagctggaagtatctctcataaatgagactactttttgacccatcaattttactaatatatttatatcaaaaaattaggcacaaagatatcttatatgaattttaattgcatcatttttgtaagatagtatttggaactaagggagtgggttaaataaaaacatgtttcaactagactattcagcaatttgaaaaaataaagtgaatctatttgtgctgatatggaaagattttcaagatatagtgaaagaaacaaaaacatgatatggttcaacgtatgtgttatttttaaataggtgtgtgtgtgtttagtatttgtgtgtgtgtctgtgtgtgtgtgcatgtgcatgcacatgcagagaaaaggtcctaaaaaaccaaactatagcagcaatggtaatcagtagtaggaattacagtgatgggagtagaggagaacattcaactgcttctattttttctacattcttgcattgcttatgtaattaaaaataaaagtaaaattgttcttattttatatccccactccttatgaataggacttggacacttactttgttaccacagtatttttaaaaatttcggtgttagcaagaacatgaaatttcaggacaggtgacacaaatacaccatcataactgcaggatgtatctatagtattataagtattaatcataatgtatcattgtacattcactaatattgaaccatttagcagtttaaaaacatatatgtatgtatatatcaggaaccctaagcattaatattgagttgatgattaattactttcactgtttgaagagagacaacatagcataatgtcttacaccacagtctggggagtcagatacacctcgtcccaatagttatgaaatcctggaaaagttcattaaacatccctgaaagcttcattttttccataataaataaatagatatgataatatctagtaattggagtcctaggaggattaaaatagataatgcatgtagacagtcccacagcctttcataaaataagttcccctagaatttagaattttagtgtttcttcatagcttttattaatagcctattttccctatctttatgttataaatatttgaaacaacatataaaaaatattgttttatgagcttttcaacaatggataaatttttaaaactgtttaattctctcatgacatctttagttattgaatatagaaatttaagtattttagtatgagactgctagggaatagccatagagaaatatactttatgtaattctttcattttagtttattatctacataatgccatgaatcaatgatgtttcgattacacaagggaaataatgcaaaatagattacaagattgaacataggaaaattgattttcactgttgaaattattaatttctttctaaaaagagtttttcattgcagatttttattatgctctcaaaccataacttatttcctaatcaataagtaatttataccatggggggaattgaaaaaaagataagctgaaatattggtataaaaattatatttagggacctggtaataaatctaggttatttctatttttaaattcagttatttatttataaaaatcacttgataatttactttaaggaatctgtgaccaagaggaaaagacatttgaattctggtttcatccgaagttaagccaaatgaatcaagattgtcatatagttgttaatataacaaggtttaatcctaaacttaagaggctgaaaatagaaaaaaaaaactagttcgggtattagaaatttttaaaatgtgataactcgaataaagggaattgacactttaaaatgcatttttaaaatgttaattataccattactataaatgtccctagaacacagatacttattsttcacatttgaccatttgactatggaaatgactgcttcaatctcattgggagtaggctgtaggatagttaatgacatttttcttcttttatctgaattatcgccaatgacatctttcttcttaaacttgaattaccaccttgagttaacctgaaattacttgtcattcatgcactatgatgtacagttttgtggcctgatttgtcaattcagatgttagagtgcaactttaagagtctttatataaatgaaaattatatcttctataaaatcaatgtaagagcagtaattttacaaaatagaaagggaaagaaacaaaaccctgttaggcttagaagacaatttttaactttagaactagtcccttccagaatttttgctctatattttttgcataattttgataatatatacagaattttaggagtttttcaaatgcattgttccaaatataagctatatgcatatttttgaaatagaaaaaaaaatgtattaattgagaaaagacaaaaggaagagtcaaaagtagaaccatcattctattctgtattccagtttaacgttatttacgcatatacagagtagaatgatgattacctgaagctggaaagaagggatggttaatgggtatatgcatattttaaaaagtacaaaatatagaaaggtataaagaaaaaagtaacatccataattgtacaaaatgcatactatcactattaatatgtcattgtagttctttaatctttctctgtatacatttttttcatagttaaagttttacatattaaacatataagaacatttagaggtcttagatgcaagataatatgtggaggttttttgatacatattatgcttgttcaggaagaattttaaagatraagaaaaaaatcatttctcaagtttctctacatggaagtgacctttaaattgcccaactcagctctaactttctaaatgggataaacaagaacaaacacttggtaattattcttgtagactccaaactatgcaaatattatagtcaatttcagtaagttcatgaatggaaaaaaagctagttactgcttcaagtggctacaaacaacagtattatgtgttctatttgaagcttggatgcaattttattatatttatataataataaatatttgtaaaatataaacatatatgattacgtaagtatttatataatatatataatatatttcgtgattctacaaaatttgaagttacaaaacaggatccaagcttaatataaagtcttaaatagtacttaatataaaatctagcttcaccacttggctttaaaaacatgaggatacctaaatcctactggtttctggaatttggaatcaaaattaagtaagaaaaaaaactgcagtcacttttcaccatagtctctccattcttggttcttaattcatctctaaaacgacttggtggaaattttaattattttctaaagagaaaaataaatcaatactttatttctgaagaccttacataccagaaaaaaaaattgactttgcctctgcaaaataaagagaacttttgtgaactacaattatggaacaataacataacatttcccttcaaaaatttcaaggtattttcttattatcttctcatttaataaaattattacagaatagaagtctggaaccaggctgttcattttgtttatcatgagctctataatgtattaacttaaactatttctgctcagatggtggtgagattttaagaaaacaggaaaaatcaacaactttataatatagaaatgttacactctgtatgtcactttgtttttttgctgtactcttaccctcgggtctttcctactcttatcttactccctgtctgtcttcatctcctctatgtaatattctctgaaaacagccaactctcaagtagaaaagtctcttatttccctattttatgtttctattataacctgtgcatttttgtaacatcatgcctctaacaatttatggatctacttttgggcacatttaccttccttttgccttgcactagacattagtgcaagaacagggacttattttattttagagacagggtctcactctgtcactcaggctgaagtgcatggcacaatcatggctcaacctcgaactgttgggctcaagtgatcctctgtcttagcctctcaagtatctgggactacagctgtgcaccagcatgcctagcaattattttttatcatttttcatagagacaagttctcactacgttgcccaggctggtgtcaagctccgggcctcaagcgatcctcccacctcagcctcccaaagcgctgaaattacagacggtgagccaccaggcrcagacagaacatggactttaaattaatctttacttttctttctagcacaatgccatgtgcatagtagggcttcagtaagtggagatagaactaaggcaatacttaatgtcttgggcaatacagactgagtaaccatttaaaatgttttttaaaaattcttcataacaactatcaggaaagtattaaaagcatttctaaccacaacatgtgtttttactgcatttcctctgtagtatttttctgttctagttaagctgcatattaaattgcagtcattgtgcatagcacaggtatctggtacctagtataaactcaataaatgtttgagtgaaataataaatgaatggtaatgatttatcaataacaaaattcttattatttttagaatttaataacaagcttaagaaaaacaacacttaaacaggaaaatgattcgtaatctgagcattttacttcaatgtaaaaatatattaatatatgcattaaatccacccaaatttgttatttggtagtactgaattcaagttagtttacctgatctattactgtatgaaaatgtacagtaaaaatgtgtggcaatattattgagacaatatgttattgccttttatactatactagtggttgtacataaatgcttataccatcctttaaggaaaaataatcatcttatgtattatgtcttttttattattattatactctaagttttagggtacatgtgcacaacgtgcaggtttgttacatatgtatacatgtgccatgttggtgtgctacacacattaattcttcatttaacattaggtatatctcctaatgctatccctcccccctccccccaccccacagcaggccctggtgtgtgatgttccccttactgtgtccatgtgttctcattgttcaattcccacctatgagtaagaacatgcggtgtttggttttttgtccttgcaatagtttgctgagaatgatggtttccagcttcatccatgtccctacaaaggacatgaactcatcattttttatggctgcatagtattccatggtgtatatgtgccacattttcttaatccagtctatctttgttggacatttgtgttggttccaagtctttgctattgtgaatagtgccgcaataaacatacgtgtgcatgtgtctttatagcagcatggtttataatcctttgggtatatacccagtaatgagatggctgggtcaaatggtatttctagttctaggtccctgaggaatcgccacactgacttccacaatggttgaactagtttacagtccaaccaacagtgtaaaagtgttcctgtttctccacatcctctccagcacctgttgtttcctgactttttaatgagtgccattctaactggtgtgagatggtatctcattgtggttttgatttgcatttctctcatggccagtgatgatgagcattttttcatgtgtcttttggctgcataaatgtcttcttttgagaagtgtctgttcatatcctctgcccactttttgatggggttgtttgtttttttcttgtgaatttgtttgagttcattgtagattctggatattagcccctttgtcagatgagcagattgcaaaaattttcttccattctgtaggttgcctgttcactctgatggtagtttcttttgctgtgcagaagctctttagtttaattagatcccatttgtcaatgttggcttttgttgccattgcttttggtgttttagacatgaagtccttgcccatgcctatgtcctggatggtattgcctaggttttcttctagggtttttatggttttaggtataacatttaagtctttaatccatcttgaattaatgtttgtgtaaagtgtaaggaagggatccagtttcagctttctacatatggctagccagttttcccagcaccatttattaaatagggaatcctttccccatctcttgtttttgtcaggtttgtcaaagatcagatagttgcagatatgcagcattatttctgagagctctgttctgttccattggtctatatctctgttttggtaccagtaccatgctgttttggttactgtataagagctatctatgacaaacccatagccagtatcatattgaatgggcaaaaactggaagcattctctttgaaaactggcacaagacagggatgccctccctcaacactcctattcaacatagtgttggaagttctggtcagggcagtcaggcaggagaaggagataaagggtattcaatgaagaaaagaggaagtcaaattgtccctgtttgcagatgacatgattgtatatctagaaaaccccatcgtctcagcccaaaatctccttaagctgataggcaacttcagcgaagtctcaggatacaaaatcaatgtgcaaaaatcacaagcattcttatacaacaataacagaccaacagagagccaaatcatgagtgaactcccattcacaattgcttcaaagagaataaaatacctaggaatccaacttacaagggacgtgaaggacctcttcaaggagaactacaaaccactgctcaatgaaataaaagaggatacaaacaaatggaagaacattccatgctcatgggtaggaagaatcagtatcatgaaaatggccatactgcccaaggtaatttatagattcaatgccatccccatcaagctactaatgactttcttcacagaattggaaaaaactactttaaagttcatatggaaccaaaaaaaagcccacattgccaagtctatcctaagccaaaagaacaaggctggaggcatcacgctacctgacttcaaactatactactaggctacagtaaccaaaacagcatgtattatgtcttaacattaaggtggaaacatgattcccagtgttcttcaatattaattgcttaaccaatttttaacttgactttgaagcacctaatgtttatctctctgataaactctgtgtagactaggatgcatacaacatcagagatatatttacaaaggcctgtgtttaaaccgaattgccatttatcatacataggtatgacagcatacttgctatctattatactgggrcacaccactaaaactatcttagttcagtttgtatttatagtgtaagaataatcacgaatatattcttacctacctcatgagttttatggaggatttaacaaagtatattttatagccctttgaaagacttaagttattttcatcatcattgtcgctcttctcttccccacgacaaatcaaaacagtgttcacagttataacttttctcagaacgagttaattcctgtactcttgctgacatagttagttcaatgtttgctactactgattctattctaaccaggccctttttcagctcacagaaaaaaatttatatatatatttaagagaatgatactgtaaaagagaagttggtaaataagttacaacataacttgtctcaattagctttaatattggaagagtttactgtctcttcccaatcctcatctcaagttttattatttctgcaatcagtggcaggaaatctcaatcctgtcaatgccacacattttctatttatgttgaagcttaaagtgaaacttaatgtaaatcttgctgggcatcattgtaggatacttagtctctctctctctccttatatatgtaatatattttctatttcattaccacctatactataaatgaacatacaacttgggactgtaaaaaaatatgaaacagcaaaacaattacatgtgctcttaccagtatctgagacttttgtacccaatgtaattataatgatgtttcggaaaaacttttcatttttctggctttctgaagattttgctatgtcagcaacattctttgtgctcatcagaaagtaccraatactgccctgagggcatatgcagccttccacaaaacaaagtaaaaaaacaaattggacaagcatttaaaaaagcaaggaaagcaagtcagatacatacagtggcacatgtcagacagatgaagagttgactgcaacacttctttcatgttttccctgacgtgaggttaagtgttgaatataagcccttatgatttggggaatgtaatttactgttgtattctgttgattttaatataaatgattaaataaaatgttacagtttagtgccttggggtagattaacgttgccactttcatttagatgggtagaattttgtttttcttctttcccacctctacttagggccacagaataatttgcactgaggaagtgcaaccctgaagagttgaaggaaaagaactgagatcactaatgtttggtggtttgttgcatgtagtccaagtaacactccagaaaccggaggaatttgtgattacatgcacagtcatatgcattctaagcaaagcactctacagtgtaataattcacttgtcatttcatatcagcatcaattccttaataaatgagcatttttcttgagttgatgaaaactaacaagttcccacacactatcttcccaagaagaaatgtaataacatttgtacaactaatactttatctgccttcatgagcaatgattagaggtaaataatagagattcattgtgttccaatgacaaacagttaaaaatgttatttctctacatatatatgtatatgtacaaggcagtgaagataagtagatggcccagcagattccaaaaatatctgtccctaaattgcgtggcttctcaaactttgcaccatatctgaattttgatattagacagattaggttacatgtttgaggttcccccagtactcagttttgatgctcatcttctaactgtacatagtgtcaatattttttcgttaccttttttaatatctttaaagatgtttacttatagcagttaaaagatatttatatttattatgtaattaaactaacaagtggtattatcctcacttctcacttaaataagttataaacgaataaagagaaatgtatggttccttcttagtagacaaagttaagtttgatgtgctcatttgcattttttcaattaaagagccccaaaataacattacagatctgggtcatatcagggaaactcttaagcaagttttcaagagtaccatgctgtagataataaatacaaatcttcatggctggtagtttgtcttatagctccgagttcgagattcctgcaatgtaaacacatacatacacacacacactcaaaccacagtggtagttgcaatctttttaaacactccgctgagtactcaagtgatataatacgttttttttaaatgttttcaaatttaagaagatcagaatccaaggtgaaataaaacatacagataacaattctaagaagtagaaagtattaagaaaactaagagatgtacagatatgaactcaatggtatgagttcaaaaaagtgaacaacaacttttgactgaaattaggcttcagaggcatcagtaatacggtaacattttggtgacttaaaaattaatttttaaaatgagagaattgataagagagcaaatccatggatattaaaatgagagacaaatgtggagaacattactgttctgaagctaatgcacagaaatgtagcacatctaaggtggaaagaaattgtgtagaaaaacctgtctgcataccaaaaaaaaaaatttacacataggcctttgagaaagaatatgcactgtgttgcaccaataacatccttctcagctttatgtgcttctaagtagtttaatccctaaatttttctaatcagaggtgggaaatccagaactaacacacagattggtttttacttctgtgttaagtggccttaccttgaatacaggactgctaccactcaattctgaattgcaaaggttagtccaacagaactttcctaggtatctgctgcattttcccgggagacacattcaggcacagggatgataacgttggtatcacgaaaatgcagtttccttggaactatcctgtctgcacaaaatattagtttccacagcttaggtctggcttcaaccagggcttttgccaaacaagtccaagtcctggcaaggtcattctatcttcctctggttccatatagatatttgaaaatcttctggctcttaaatttcactgggataggtcatttcaaccttgtgacaaaacttgatggcacaggaacatcgcatttgtcttttagagtagtgtcctaataaactgcattagtgtttccttctagaaaaaggattgtcccagttgagtgcatttcgttgatatgtgatggcaattcatcaaagatttggggcaccattaccaaaacgggtaattacttttaagttatgcttgatttctttttttcctgttcatcctacaagcaaatctcagtccttgcctattctatttgagccacctagaagattatgaataattccactggcgttcaatgtgaaataatagtagtttaggtgctgtgcatgagaaagcaatgtagcccatttatttggaattgtatacttactaccactcacctaccagcttcacgtgtccaaaacacagggatgctcamttgtgcagaacctcaaagaaataaaagtaattggtcaatagtccttgaatgtgattacttgctttgcatttacaaaatatgtgagattatatacaagcaaggcactaaatgaaagcactttaaggtcgttaaaaatcagaggggaccattggagttgacagctcagatcccctgagtcaccatcttgaaactctctacatgaagctgctaaggatttctatttcttcctccagttattgcagcaattgctaaagcttctgtctcaagcaatcccagacttactgtggtggcaactgtgcaatgtgcttcttccagccaggtggatttgggcaaaggttatacttaatctgtataaacttcagtgtccttacacaaaggatgccagacctctgccttccgtacagtcaagatgggagatgctcactcacagtgcattcacagctggtcctccagttcctcttcaaagcccagctgattggcatgaccacagcacaaacagcttgtcgggaggcagcaaagggagacagtgctagaagcactccagtttccagcacactgggccccagttcctttttttcatttcctagcggaaaacacannnnnnnnnnnnnnnnnnnnnnnnnnnnnnnnnnnnnnnnnnnnnnnnnnnnnnnnnnnnnnnnnnnnnnnnnnnnnnnnnnnnnnnnnnnnnnnnnnnnnnnnnnnnnnnnnnnntaatgtaaccattcttactattacaaaacagaacaaactttgtttatttcacctcagaagtgaaaaaacagaagtaggacacagaggccgggtgtggtggctcacacctgtaatcccagcacttcaggaagctgaggctgatcactggagctcagaagttcaagaccagcctggacaacatggcaaaaccccacctctccaaaaaaaaaaaaaaagaaagaaagaaaatgaaaaataaagaaaaattagccgggtatggtggcacatgccagtagtcccagctactcaggaggctgaagtgggaggatcatttgagccctccaacccagcaagagatcccgtctcaaaataaaaaataataataataataaattgttcaagccctccacgtccccaagtactccttggcgctcctcattgtcatttttttcataaaatgcagagtacaaataaaaactcagcaaattccaggccctgaaaaatacatactttcgagggggcattaggtttcttcccccaattcttgccaacagcagggtgaaaacagaccgacttctgtacaattttcacagcgtaaattatgaggtcaggggaaagcctggcctgaaaggacctccccctcgagctctgaacagggctggctgasgttcacactaacacgcgatgttgccatgacggtttcttactgggttaactgagatcatttgcaggcagccttcttgattcacatcgcagcacagcaaggcaggattgttacctttcccgcattaacatcctcaagcaggcatctgcttgaagctcctaggctggaaatggatcaagatctctcctcaagggcggatcatcccacttctggtttagggatggaacgtccaaaactagtttcccagttccggtttaggggttgatgcttcaaaattgtgatgaacaggtagggaaaaccatcagtaatgtaatgccgttgccaaaattaaaggaagtattaaccggaactttgattatggcagtgagaactcaacaggaaacattgtggcaggtgagatattgaggaaaagagggtttggcatgtttctaattatgagagaatagaagctataaacttagccctgagaaaactgagcctaccaaaaataagaatctggaaggagaagcaggcaggaaaggaaaattacagttttagatgcattgtgttttattggtcagcagaaaaataggtaaagagaatagtcattattcaaaaactgagactgggattcaggaaggagtcctagctgaagctctaaatatgattgtaggagaagtcatgtaataccaaaaatgttgtaacaaagaaaaagaagaaaagcttgaatagaatgatggaaaatgataatatttatgggagtaggagagaaaagagtttactaagaaagtcttttttttttttttcactaagattctgtggacctgactgacactagaaaagccgtatgttctttttgttggtggtttgtaaacagtaggtaaaattcaggtaggaccagtattaaatggtacgaaagaatagtacacgttcacagatttataagtgaatatagctctatttatatatgtataattgtttatttatatgtataggaatatatgccacattatgtataaattaaatgtaaatgcatgaatatataatatgcattttgtatgttagtatgtttatccatatattcatatataataatcttttatgaggggaagtatagagtgaaaggatttatttctatttaaaacattacttggtacaagaaattagccgggcgtggtggcaggcgcctgtagtcccagctacttgaggagaatgtcgtgaacccgggaggcggagcttgcagtgaaccgagatcgcgccactgcactccagcctgggcgatagagcaagactccgtctccaaaaaaaaattacttggtacagtatcacttcaaaataatttcaatgtttatattttgaagtattactttcatgtaaatgaacattcatcattcatctctttctgaagagacaaggtcttacttctctgttgaagaagagacaaggtcttacttctcttttgcccaggctgtgcagtagtgtgataatagttctttgaagccttgaatgcctgggttcaagcaatcctcccacctcagtctttcagtcttccaagtagctaggaccacaggcrtgtgccaccgtggctaattttttttttttttaattttcgtggagatgatgcctcactacgttgcccaccctggtcgcaaacacctgtcctgaagcaatcctcccaactcagcctcccaaagtgctgggattatcagcacgagccactgcaccaggcccaccacccaggtggtggtggtggtggtggtggtggtggtggtggtggtggtggtggtggtggtggttgttgttgttgttgttgttgttgttgtttgagacggagtktctctcttgctgcccaggctgcagtgcaatggtgcgatctcagctcactgaaatttctgcttcccgggttcaagcgattctcctgcctcagcctcccaagtaactaggattacaggcgccccaccccaccactcctggctaatttttttttcttttttgtatttttagtagagatggggttctgccatgttggccaggctggtctcgagctcctgacctcaggtaatccacctgcctcagcctcacaaattgctaggattacaggcttgagccactgcgcctggcctcacccaggtctttaaaaaagcatatgattctgttcccaaacaaaaactgcttaagccttattgaaccagacatgcaaatgctgcatgtatttggtacagagaagtaaggatattgttatagccttgcttccataactgtgttctgtaatcaatagccttggatcagaaacttgtgatgaagctgtttttgaaaacacaacataattagtaaaaaaatatgctcaggatttcccattgggtgtaacagaaataaaaagtatcgtgggatatgccgttagcaagcaaatgtctatgacattaagggtatataaagatgatgtatcatcctgagaaatagttcactcaaatcatgataatataatatgagttacgacttttcaaataaacctaatctgtaacaatcaactcatgaccttaaaagaaaaacgtacttgtcctttgtaatattattccaaaacaaagaaaaaattctagcagataaaatgttatttgaacatggaaccaagatctcctgctcaagtaactcatcttcatttgtgtgattgctattttcaggcagtagcatgtgacatggaagtttatattatcagggtgtgctcacctggttgcaaatttgagaccaaagttttactttaacacttggagctggtaaaggatggtgagtttgtgtctgccatgttcaatatagtgtttattcctagtaatcagtattattcgcaaattatattaacatactttttttacactgggaccctaagttactaatgtttttacagtgtctatggatttaaaatataagtttaaatggctacctattggccctatcctactacctaggaattaacttgcttcaattctctcatcccgttttctactatactattataagccaacaacatctctctcatgtaatgtggttctctcctctgttgtaatattctgaattatactggttgatggtcaggcagaaaatattctttcttaatctctacctatcatatgtgctttgttgaccaaaactcacaccaaaattaaaattctaaaagataactttggattttttatattctctgtctttgctaatgtttaaactattgaaactatgaaattctgagataagaatattaatttccttcactgtgtttgtgaagtgaattcataaacctgcgcttatgtctctaaaagttcttgacttatgcaatttactgctgtgatatttggcaatttttggcctcttgatctatattgggctgtgaaaattaaaggcccctattattaggaattttgacttcttgcatcttctgtgtttctgatttagaaagttgctcattgtattatatttccctttgtgattgtgttggtgtgttttctgttgctatctcagaatacagagactgggtaatttatacatacagaaatgtatttctacagttctgaagtctgggaagtccaatatcaggtagcagcatctgggtggcttctggtgagggcctcatgctacatcacaacatggcaaaaggcatcacaagactaaaaagacacaagagagtcaagctaacttttataacagacccactcttgtgataactaacccctcctgtgataacccactaatccattagcccattaatccatgaatggattaatccattcacaagggcagaagcctcatgatccagtcacctgttaaaggcctcaccttttaatactgttacactggggattatctttcaacatgggttttgtgtgtttgtttgtttgttkgtttgtttgtttgttagagacagagtcttgctctgtcactcaggctggagtgcaatggcacaacctcagctcactgcaacctccgcctcccggtttcaagcaattctcctgtctcagcctcctgagtaactgagattacgggtgtgcaccaccacgcatggctaatttttgtatttttagtagagacggggtttcaccatgttgtccaggttggtctcaaactcttgacctcgtgatctgcccgcctcagcctccaaagtgctgggattataggcatgagccaccatgtctatcctcaacatgggttttaaaaaagacaaacattcaaaccatagcactagtagttttgcagatatttttcttatattcattttggtatttaggaactcttgcagttttgtttaagtagttaccttttacaatcatctttatttcattagtcctgttttctaactttgcttctgatgtctgttttgctttaaataatagtctgtgacttacacctattatctatatggtgtagatatacaaacttagactacttccccctttctatcttcttgtatttttaattgggtattttttgacattatcacaatatataacatttatgcattattcttacaccatattccctatgtctgtttaaaattaaatatgcaatgaaatatcaagtgatcgagtgatttttctgaatttcttcagtaattcttgagtactttaccaagaattgataaccccaagacatatgtgataccactttaaagataaaatattcagcaagcctctaagctacacaaccaactcatttacatttgtcaaggcatttataatggaaagaaaaccaggtaggattagatttttcagcagtaagatagaaagcaagacaataatggagcaacgtttttcaagaaaataaaggaaagaatgtgtaggcaaaaaatcttataaccagaaatatgcttcttaccatgatggagaaataggggtcagatttgcctctatccttaaacaactaaaagaaaagcagaattaataaaagtaaaacaaaatttagacattataaaagaggcagaacaaggcagtgattcctgattggggggatggggtgggaaatgaggtcattttcgtagcttactggctagaggttctgggttgcaatacaaggagagtgaactcaaagacacaactgatttctctgagttgaagagacatagctaagatatttggattctgcagtggctgtaattcacaagcagatactagagaggagaaagctgcatggaaaacacaactgcagggagggagagagagagaaagggattattttatgtctgagcattcattatggcatgtgtgtgaagaaactattcaaggctactaaagaatcactggaaaggaacagttgcaatgtcttctggaacgcacacagaaaagaagagtaattcttatttctgagagtaattattctaaaagagaattattctaagagtaattcttaactgaaatgaaaaagtttgtaatatgcaggtcattagatagagtactcagaagggtattgccttagctgtaaggcaaaattagccctagacttaaggtttctctgagattggcactccaatagcaaaagctgacaacaatattggaaaataaaaaagaaaattacatatcaatatttctgaagaacataaatgcagaaagaaaatcttagcaaatcaacagtatataaaaataattatataattatttaatgtatacttctatttggtttaaattacaaaatcagcaagtataatccatcgtatagcacaataaaggagaaaaaagctccctcaattcaacagatggagaaaaaatatttgacaaaattccacacttattctcaatatcaaaccttatcaatccaggaatagaagcaaatgtcctcagtgtgataaggtgcatctgtaagaaaactacaactatcttcataccttacattgaaatacttaacgctttcttcctaacatcataacaaagcacaaaagtttgttttaataacttctatttaacatgttactggaagcccatttacttattgccattgaaataaggcagcaataacagcaacaaaatgttgaagtcttagagattggaaaaaaatattaaaactctttattgcttgtcaatatcatgatggttaaatttaacaaggtcacaggatccaaggcatcaatatagaaaaataaattgaatttctatgtagtagcagaaaacatgtttacagaaagcacttgttataatagaaaaaagataaaattattaataataaattttacaggcatgaaagatgtcagcatcactgaaaaataaaaccattgctcagacaaattaaagatgacctgaataaatgtaaataaataccatgttgagaaaaatgtatttttagattcaaataatttatttgtacaaccagcaaattctcaaattctaaatagtttttcagtagaaattggttagttgattgtataataatttacagactcaacaaatttttaataaaaattctagattgtttttgtcaaaattgacaattgatgataaaacttccatagtaatgcaaatgactcacatcatcatatttcagatagtaatccagatagtatgatattgacataaagaaaaataaatagagacatatacctaatagagatttcaaacatataaccacacatatatatccaactgattttcaacaaaggcacccaatacaactgaataaatgggatagaaaagggacttcatcctcttcttcacaccatacacttaatttaagatggttattatacctaccctaaaaactaaaactataaagcctctagaagaaagcatatgagaatatttccatgatactaattaggcaatggtttgttagaatacacaaaagcaataccataaaaaattaatgaacttgactttatcaacaacattaaaaatggctgctcatcgaaaaatactgttcacctttgataaatcattagagtctgttgaaaccaattagttttttgtttttattgtttttttctgtttgtttaaacacatttttgttttaaagtttgtcgtatgatgatatttatactttatttgaattctaccagacaaaaaaagagaaaacttattcttgtttaaatggcacattcattataaattataattaacatatgagcccattagaccttttggtaaatcttatgatacactaccagatcatggtgatcttatattttttatatcctgaaatatcttactatttcatgttaatagagagtatttcatcacatataaattattctaactgtgctaaagcatagattgaaataattagaaaatggaagaatgatggactcatctaggtggaagatgcagtattgaaataaagccccatttcaggatagtattcttcactattggtattgtgctgcccaaaatattgcagtctttcatgtatgtaagtaaaattctaaagacattatcctttaatctgtatatttaaccattcattgaacacagttgaaaatgcagaatttttaattttcctatgataatgataaagagaaaaatataaacagaggaagatactctttatattagtcataattattagaggaattatatgattcacaattattagatgaatcagattcttagatgctgttaaagaaagaaaatgattcatcatgacccttattactgataaagtagactttattcaaggaacttcatggaggctaatgcaatgggttttgtagtaggggacagagattgggctaaactstgaatacaaaaggaaaagtagaaggttatagccaaggagcaggatgtgagtcagtgkatggaaaaatcactaagagggtagagtaattatttgcaaaaatgacccagtaagtttcttgcttaaggcaagatagatttgtcagtcattacttgagggatggtggtggatgaaaaatttgatcagatgttgagagggatgaaatatggagagcaggggattttggctaagccgactctacagggtaagtgctaaaactaggctcttggaggatatgcccaacatggggcctacttcagctcagaggagactgattaaagtttagtcaaggagagattctttgtcagtccctcctcttgttcaagaaaagaaatattcttttttccattgaacaaaacaagtctgtttctttttgagttatcttttgctcattgaggaccagctgaaacatctgttgggatatggtagtataatatatttgctggatgggttagcagtcaggaatttaatgaggggaatttctatgaaaattaacaaaaaaattaatggttagaaacccagtttctgattccacagggccgccattcaagaagacatcttgatttgagcttgaagaatctttagatagggaagtggggatggcagcggcaaactgacaaagcttctgggtttgcaggttgaatgttttcagtgacagcatgaagtgtttccatgaacattctgagtggcccacacagcaacaagcacaaaggctgtccatacataatctgttacagtgatttccatgatgtttatatcacatagtcgagcttcagcttgcagagttttgaaaaaagggcagttttacatctcattgactccaagtcaggagggtgagagaaaattggaagttgtagacggatactggaaaaaagctagaataatcgagaactcacaagagtgcactatatttttccactggaacataaaatgtatctctctagtcacacttattttttatcaaagataaccaaaatgaggttattctcttttaaaagacaaaataaatctggtctcattagatttgacctgattatttacataaggaaaggaagaatggtaattgaccacataggtctttttgagttttctttgctggaacttttcataaggaatctcaggttataatttcaaaaaccttttgaagctaagaagtccagccaagaactagccatcagacttcacttctggtacttacagatttgaatgaattcctgtcttcttgaggttcccaagatagcccatcttccctgggcctgctaggaagtgatcttccttactcatctgwaaggctaagaaccctagaagccaattattattgggccagctttttcaagatagctttgtaaaaattgttccttattataaagttaacctcagttcctaactcagattctatacacatcattctcaaatatgacattgcagtcaaaaccttataaatataaccaatgtttccaattgtgttctgttacaagaacagattcttattaaattcatgtaaataactatattgccaggaaaataagaatactcaatagtttacaaattctggaaggatcagggagaaaatattatatgtacaaaagtataatctactgatttttacaagtgtaaatgttactgagtaagcaatggcttctctgcccaatgtggcacaagtctttgagaaaataaaggttttatcatgagtttattggcaaggagacacaaggcagtgaccaaatctgtctcttcaggctggtgactggggcaggttttataggcagagggtaacgaggtgtgatctgatttgatcttacaacgagatgatgccatgaggcatgatccgactggattgtgccatggggtgatgccaggacttgatctaattgaattatgtcatgagatgtccccttcttaattcagtccctgtttcttggtcctagaatttagtttctgcctacagttacacatgtggttcatctgagcataagcagtttacataaattgcaacccagaacccatggcaactgaaaaataactcaccattttattattcaaagttgaaccagattgggctggttctgtggttccataaataagagaaaaaggaagggagtgcttatatccacaaaataggacatttaagaaccaacaaactgtcaaacaaaaccataatcactcttcttcacttcattattgtccatcagaacaaataattcttgttctccttgctcttgggttagaaatttcatgaacccattggcttstctactctagttctgaaaatccttaattcagtactatggtctctaaattaatcaacaccatcatgaagcattatggcttgtagctgattgcaaatattttcagagaagaatcagaatatatgtgaatgacaaaaaatttaaaatggaaattaacatataatgagagttcaacataaaaatgatgcaaatgacaagataatttggctatttttgaggcatacaataataattagrgccaccactgatgacattaaactaagagatattgtggacagcagggatattgataaatttctaggaaatttatatgatttctaaaatacctaataatgtttgcccatacaaaaatataatctagggaaagttaaagtatcttttcttatttgaaagtgtcttttcatgcaatgcaatgtatcaattaaataaaccaaattatttttagtatttctctttacaaggtgaaagaacaaattttttgacattttttagggtccctttgagaaatttcaagatcagttcaaaaacaagatttcacttaagatttgttttgaaaaggcaacactgtaaaacatgtaaaatactttagtgcttttaaattgcaagctctcagttctcttaaataatcaaggccaatggtaaaggttaacataaacatagaaaactgtcttgataagacacaaaatcttggcttcctaggaagattacttaaaaggtaaaatgaacaaaaaggccttttactgtaatccaagaaaactggcattttccacagaaaaaaaaatctagttttgcattaataaagcattgagctttctccctcttcttcttcttcttcttcttcttcttcacaaaacttcacaacttcacaaaacttcgtaatgacctagatatttagtgagtatttattacttaatacagcttagaaaaacattaaaacttcaagttaacaaaaataatttggaaaccgttttcagcaactatattgcaacaccaggcaaagctagccataatctcaatttacttccctgttaactgtttttacagttaacatcatcatgttaggcaagcatcacaaaagcaaaaaccaaagaagttaaacacacaggtttttggttttatggctgtcttgagaaatatgaagtaatgggcatcaaacaactcttctttactgcatctttacttgtacacttattctaaggtcgaactgataatttttttaatcctaagcatctagaagacatattacctgattcaactagtaagcccaagtggaataaaaatgtgtattcatattatactgaatgttgatatatcagaaaatgtagctgtttttacgaaacaaacaatatgaagctagtattaattgccaaatatacgtccatttcatgtgaatttgaaaagcatttgaattagtttctgagagttttagaaatatttaccttatataagcacacatttatcactgaaaattggaacagaatttaagaaattttaggccaggtgtggtggctcacacctgtaatcctgacactttgggagacaaaggtaggaggattgcttgagcccaggagttctggaccagcctgggcaacatggtgagaccccatctctaaacaaaaattgaaaattagctgggcatgattgcggacgcctgtagtcccagctacttgggatactaaggcaagagtatcccttgaactcaggaatccgaggctgcagtgagctgtgattgcaccactgcactccagcctgagtgacagcgtgagaatctgtctctaaaacacaaaaagaaagtactaagtaatttgataataccatccacagataaatctcatatatattatgatatataatcatatatattactcatacatatatgtaatatatattctatatatatagaatgggatatatgtatattctgtatatacatagaatgggatatatgtatattctatacctatatgtataaaatataagaatatatattgcatatatatctgtatataaatgtaatgtatacatatattataagagatcttaaaggttttattctgaaactttagccaggagttagacaacacagtaatactctcttatttcctctactttatagttttattcattgtgtttctgacagatggaacaagttaaggttaccttctcaatatgaggactaaagcttttagccaatatttgtggagaagacacatttaagattttcttttgyccatacatgcaatgttatggaggctgtgaccacattttaggcaagaaactgaaagaacatcaagcacctatctggatgtctccaaagcctcatctggataaaatatccaatctatttttcaatcagcctttttttttcctttttcaacctcagacaattgcttttggggtcctagagtcccttgaaagttatgatggaaataggrgacctaaagttcaggtgactgaagggctgaagcaggaaggaaaaacgtctgggaggacaggtagacagaggaaagaggtctgaagaggcacatatcaaaagattcaagaaagctgaagggaagattgaaggtagtaaaaggatgaaggaggagcagaagcaatgggaaggaagagatctcagaggactcacttcgggaaaatcttcagtttcccaaagagatcctgaagtctcaaattatccttaacaaaaccatgaccacaagaaaggaagtggagtatacgatcagtgagagtttaagaagggggtttccgttgactaaaaagttaccgtgggagaaataggatcaaatagaacagagttgcctcacaaagaaccaaggaaaatatttcagctcagggattcaagaagtaaattcccactcaaagacagaaacaggaagtaagatttacaattcagccagtaccttcctaacagagaagcatgtgactataccaacttcttacaaaaagaaacaggactaactcagcctctgtatagtgtactcaggctctctcagccctcactgtgcttcaacagacttatcatttggagcactggctcaggagtcgaaatcaccaatggctcatccatcaatcaaccagaagtgaagacgaaagcttcaaaggtaggtgcttgggattctgggtcagaagattgggaatccaataatgaatttgatcctatacaagtcatagcagcaaaaactgttaaagaaaaaattataacactggttaaagatggcaatttagactttattcaagggatttcaagggtctactgccatggggtattgaagtaggagaaagagattgttctcaatgctgaatacaacaaagacaagttggaatttatagccaaggcaaaagaatgcaagttagtggattgaaaatcattaagagggtagataattttttgctaaactggcttgaaaggattcttactgatggcaggtcagggtgatcatatattacctgggagatagtggtgggtgagaaatttgatcagatattgagggatcagatatggaggatggggaattctggctaaactgatttgacaggataaggaaattgtcctcccttcaacaaaattatgagccattgaaattcccaagtgtatagtgtcttgatggtgcaaacgcaggaataatccaaactagtgataagcatgagcctgttagaaatatactagaaatatgaaaccacagcttacaagaaggatatgttgcaggttctggcatgatagttggggagcagttgatgaggcatcgtagatttggtagacatatactttcaaaattggaaaaattagaaagaaaatctgggttagctatgtttagatgcttaacattatttctaataaagttgtttttcaacatattcatgtttactcctactattcataaaattacttaaaatgttatcaaataaaatttaataaaaatgctttattagatctggaaaatataaattatttacttctcttctattttctggagtagcttgtgtagaggaggtatactttttccttaaaatatttggtagaattcactagtgaagacatatggacctggaatgttttgagagggatgttttaactgcttattcaattttattaatagataaataatttttctgtgttgcaaggaatttctccattttgtttaacttgtcaaacttattagcatattttttcaaaatataccattatcctgtagaatctttagtgatatgacatgtgtctcattcatgatattaataatgtcttttttcttgatcagtatggctagaggaatatatattttattgatctttttgaaggaccagcatttgtttctattttttcttattcattgatttttacctttacttttgtcatttttattttgtttactttttgcctaatttgctctttttgtagcttactttggggttagtttacccttttttctaatttcttttaaaattatttgtatttataattgacacaattttacatatttgtgtggtacagtgtgatatttcaatgcatgtgtatacattgtacaatgatcacattaaggtaattagcatatctgtcactttaaagttttttcggtgataacattccaaatcttctcttcaggatatcttgaaatatacactgctttgttattagctgtagtcaccctaatgtgtaatagactgcaagaacttatacttcctgtctaattgtaactgtacctctcaccaacccagcttccatctcccctcccagcctctggtaatcactattctactctctgcttttacgagttcaacttttttagatttcacaaataagttagatcatgcagtctttgttttcctgtgcctggcttacttcacttaacatgtgcattctggtttcatctgtgttgctgcaaatgacaggatttcattctattttatggctaaatagtattccattctattttatggctaaatagtattcattctattttatggctaaatagtattccattgtgtatgtatatatatatatatatatatatatatacacacacacacacacacattttctttacctattcatctgcatatggcacttctgttgattccttatcttggctattgtgaatagtgctgcaatacacaggggagtacagatacttctctaacatatttatttgtcttcctttggatatatatccagtaatggagacacattgtgaacatttgtatataatttcgatttctttaaatgtattgagacttgtcatccccaaatcaggtctgttttagaaaatcttctatgtgcatttgaaaagaatgtgtattctgcttgatatggtttggctgtgtccccacccaaatctcatcttgaactgcaactcccacaattgccatgtgtcatgggaggcagccagtgaaaggcaatggaatcatggtggcaggtctttctcatgctgttctcatgatagtgaataagtctcatgagatctgatggttttataaagaggagttcctctgcacaagctctctttgcctgttgccatccatgtaagacatgacttgttctttcttgccttccaccatgtttgtgaggactccccagccatgtggaactgtaagtccattaaacctctttcttttgtaaattgcccagtctcaggtatgtctttatcagcactgtgaaaatggactaatacagtaaattggtagcagtagagtggggagcgctgctgaaaagatacccaaaaatgtggaaacaactttggaaatgggtaacaggcaggggttggaacagtttggggggctcagaagaagatagaaaaacatggaaaattttggaacttcctagagacttgttgaatggctttgcccaaaatgctgatagggatgtggatgatgaaatccacattgagatggtctcagatggagaagaagaacttgttgggaactggagcaaaagtgactcttgttatgttttaggaaagagactggcagcattttatccctgccttagagatttatggaactttgaacttgagaaagatgatttagtgtatctagtggaagaaatttytaagcagcaaggcattcaagaggtgacttgtgtgctgttaaaggcattcagttttataagggaagcaaagcataaaagttcagaaaatttgcagcttgacaatgcgatagaaaagaaaatcccattttctgaagagaaacgcaagccagctgcagaaatttgcataagtaatgaggagcagaatgtaatcaccaagacaatagggaaaatgtctccaggtcaagtcagaggtcttcatggcagccccttccatcacaggtctggaggcccaggaggaaaaaatggtttcataggtgagacccagattcccagtgctgtgtgcagcctagggactaggtgccctgaatcccagccactctagccatggctgaaagggaccaacatagagcttgggccattgcttcagagggtgcaagccccaagccttggcagcttccatatggtattgagcctgagagtgcatggaagtgaagaatcagggtttgggaacctctgcatagatttcagaggatgtatggaaacacctggatatccagatagaagtttgctgcaggggcagggccctcatagagaacctctgctagggcagtgcagaagggaaatgtggggtcagagcccccacactgagtccctactggagcactatgtagtggtgctgtgagaagaggaccaccatcctccagaccccagaatggtagatccactgacagcttgcactgtgcacctggaaaagccacaaacactttatgctaacccatgaaggcagcctgaagggaggccgtaccttgcaaagccattggggcagagctgtccaagaccatggaaaccaaccttttgcatcagcatgacctggatgtgagaccttgagtcaaaggagataattttggagccttaagatttgactgccttgctggattttggacttgcatggggcctgtacccctttgttttgaccaatttcttccatttgtaatggctgtatttacccaatgcctgtacctccattgtatctaggcagtaactagcttgctttgattttacagtctcataggctgaaggtacttgccttgtctcggatgagactttggactgtggacttttgagttaatgctgaaacgagtttagactttgagggactgttgggaaggcragattgttttggaatgtgaggacatgggatttgggaggtggaatgatatggtttggctggttccccacccaaatctcatcttgaattgtaactcccacaattcccacgtgtcaagggagggaccaaggggaaggtaattgaatcacagaggcaggtctttcttgtgctgttctcacgatagtaaataagtctcacaatatctgatggttttataaagaggagttcccctgcaaaatctctctctttgcctgctgccatccatgtaagatgtgacttgctccttcttgccttccaccatgattgtgaggcctcctcagccatgtggaactgtaagtccattaaacctctttctgttgtaaattgccctgtcttgggtatatctttatcagcagcatgaaaacagatttatacactgctattgttgggtggagtgtttcataaatcccaagtagattaatttatttgatagtgttttaaatatttttgacatttactggttttgtatttgcatgttcagtcaattattgagggaggaatatttaaatagaggacttcgatattcatatattgaaaatgaatgaatttatttattctctttctttcctttcttcctcctttatttattcccttttttatcctttcccttatgtcagttttgtttaggtattttgaaactcttatttattgcatgtacatttatgcttcctttgaaaaattgatactttcattaattactaaatgtttgctttgtattatattaatatacccagtccagctttcctttgattaatgtttatctctatcttttcttttattattaactcattttttgtctttatcattaaaatgagtttcctgtagatagctatatcagttgtctattgttgccgaagaaaacactctgaaatttaatgccttacaacatttatgatctcacttttcctgtgactcagaatttagacagcagtttggctggatgtttgtccctctctctgtgctttatttgtattatttctaccgttgtatcttttctcctgctattctttatctactagccagtgtatttgcatttcgcacataaaatttttcatccctagaaattgtttttgtttttatttaaatatttcatttctctccttaaaattatcattgttcttctattttgagcctatgggacatatttatgatagcctttttaatatcctttttcttttaattctatcatctcagttatgtcttgatttttttctctctgattagtttcagcctagttatagaccatattgtccatgatttaaatggtaatttttgctggatcctggatattgtgatttttatgttcttaagttctagacattgtcctatatgtttaaagagtgctgtactttgtactagtatggagttaagttatgcaaaataatttgatgctgttgatgcttgttgttaagctttcattaggacaggcctagagagtattggcccaaatactaaggtaatatgcttctgagtattctttttgttgttgtttgttttgagacagggtgttattctgttgcctaggctggagtgcagtggcacaattacagctcactgcatgcaggcttgacctcccaggcttgagtaatgctcctgcctcagtctcccaagtagctgggactacagatgtataccaacacacgaggctagttttcttatattttgtaaagatggggtctcactatgttgcccagggtggtctcaatgtcctgggctcaagctctcctcctgcctcagccttccaaagttttgagaatacaggcatgaggtaccgcagctggcctctgagtattctttttaatgtccagttttttaatgtccagtccaagtttgctggctgatggacgcacaaacttggcttatggacacacaaactatctccaacactgtataagcttcaggaactgtttggcctactacttttttatggttctttctctagtcttatgaagtttcatgacacacatgacataccagtatcaactcaaagatttgaagagccgtctgcagaattctgagtctctcttctgtcacttgttctcttaaatattctgccactcaaattctaggtacctttatctcnnnnnnnnnnnnnnnnnnnnnnnnnnnnnnnnnnnnnnnnnnnnnnnnnnnnnnnnnnnnnnnnnnnnnnnnnnnnnnnnnnnnnnnnnnnnnnnnnnnnnnnnnnnnnnnnnnnnnnnnnnnnnnnnnnnnnnnnnnnnnnnnnnnnnnnnnnnnnnnnnnnnnnnnnnnnnnnnnnnnnnnnnnnnnnnnnnnnnnnnnnnnnnnnnnnnnnnnnnnnnnnnnnnnnnnnnnnnnnnnnnnnnnnnnnnnntgggtaaaaatgttaatactttcagttaccaatttctagtgactgaagatggtaaagttttcaccttcagtagtagcaaatgaggtttcttactttttctttcttttccatttataattaccatttcatcattaatttatatttattcagtattttactatcaatcatagcccataaattttaatcttcagttttcccaaaattccttaatggaagccttttcaagccattttctatgtcctttagatatgtctccactaatcttgagagctttcttgcttcatatcacaataaaaatatggactaatcccggagtctgttctccctacttgaaatcagctattttgttttccttttcatagtaattttgtcagtctggttttgggtgtccgagtgtttttttgttttttgttttttgtttgttttttggcggctggggggggatttttttaaaaactttcctaaaccaaggtgtagaaaataattctatgtttgaggtgggggaggagtgtgaatggctttattagcttctttaatttttaacggcctgcagtctagcatagtttgtttaataaatgacatttattttgttctgtcttttgatcttttgtttgctctggtttgggcttctcagcctattctgctgacaatgggtgtaaatgttctcaattaaatgaaaattaaagtttgtgctaattgtctgtatcatagttactctgggggtatacaccatggaaactttatttgtattctgtattgtgaatggatttgagaggattacaatttgcagaatttggatattagaatttagacgactgtcattattctctaaggacttctgtatttctttgtcaactcttgggaattatatcctggggttttgttgttgttttattctacttcaaattattgtagacagaactaatggtagcagtggcccatcaagagtggctgctgccaagatgccagctgcagcagggaggctggcctgggcctcccatgccactgctcaggcaggagcctcgccctccctaggagccactgcagctgccctcccaggtgcagaatccagacttctctgcggtctgcacccttgaggaccctggaaggaccccatgccaccatctacacaggctcaggggtgcctgcgtaggcactggcctccactacctggcctcctcctgctgtctagacagtccctcctaccacatttgtggcagtcaacaaatgcatcttggggactctggggtctgcgggtccacaaggtggctactggaagcctctgcctttttcctgtatctcccctctcttttctggatttcctcatggttcccactgcaaaatactgaggtgaccactcccagaaggccctccaaagtaccatctggtcccacagcccatttttgcagccccctcctgacatcaggggccacctgtgtgattaactcatccccctaggaccagctgtcccttaaccaaatcaggagatggagaatcacacttcaccaaggcccctccagccccactgatgaaggcagtgtgactcccatccaatccctggtctaccatggatagctcagtgcagttgagaggctggacccaatcccttgtaagccttgcagtatgcaaacctgaaagtgtttcctcctcccttctctcattttatcatgaggggctcattttgtcctccaatggtattgccattcttccaactggtcctccaatggcactgccattcttccaactcctccccatccctggccctatataagatataaagctcatttccaaaattctctgccacttgcaggattccctgcttttcagtggtggtcaggatttgactcaaaagtaacacgacatccttccaggagagctcaattacttaggttaagttctagaaagcctctatatacctgtcaggaccatttgaaaacttgccaagaccccctttaatttgaaaaggggacctggaccttaatggggccatattcaccaggcatctgttattggagcagttgagactgggacctgcctaaaacgaagatttttaggctggggcaagcttaagagagaacccgcatagggaagagcaaagggggttgattcccctgctggaggcacctctggggtttgcttccctatttccctgggaccgtctcttgcagcctctcctgagatggccatctaggagggcttaatcaatcctacagtctcggcaaaggtccgaattgccctgcaaggcaaagaaggccagcacatgggaccttggaccatttgccctcacattcacagaaaagctttcttcctgaggccatgtttctgttctgtgcttcaaagtgcttgacactaagttggcaacaaaggaaatgacaaaaacatgtttgccacaaatttatgtacagataccaacacacactttgctttgtcttaactttccattttatgcttttgatgactgagccaattccacattcttcccagtaatatctctagtttgcaacaacatctttaacatttaacattgtatataaagaagagatgggaaccttgacagccacaaaagagagaaagaaagaatgataggaaagactggaggtccaagtgccaacaccctaatgggcagtcagggactggagttagtccaggggcctttggataacaccaaggtgtagccttggccagatacccttagttgccccaagatttcctttcagtcctatgtgacagctagatatgcatgaaaggacactggattgaaacaaagccaacattctcaacacccagtagaggtgatagaggattgacagtgtcatccccagaaagtctgttctccatgtcttaagtcctggtagctgtgctagtcgcttttaactgactgacaaatgtccagtatttttctttcattttgactgttgtggaagttagagactccaaagaaagacagtaagagcagatccacttttacttacctttccgcagaccctggatgagcccccaaaatgttacaggatctttggggtgttgcttttctggccagaaacgtatgttgctagtggcacctttgtctgccctttgaaaaggtagggccacttctgaagatggctcgctggtcaccacccctgccatattgtcatcaggatggtgaaaacttccaaggacctgctctgatgaaatctcacctggaaactctgctgctagaactgtgaagtaaactttttcctttttgtggagaatggggtctcactatattgcccaggcaggtctcaaactcctgggctcaagctatcttcttacctctgcccctctaagagctgggatttgaggcatgagccaccatgcccagacactgagttcccccaaggcacagcatctcagattcatgcctgtaatgtcagctctgggcagtgctgacatgccagctgcttgtcatctcagcaccctccaggctttaagcgcccacgagtgcgggaaggataaccaaggagggggctgagggtgtcttgtcactggcctgcaggtgcccattggtgcaagcagcctggacactatggacagtagtgggaggcagacagacttctggggggaaggggggtgggtccccagtgaagccccaccttcaggctggtgaaggcctgaagcctgggggccaggctgccagtcctgcagaccagactgggaacttgtggtgccttttctgggcccgcccatggctgtccatggatcagttggcatgcgcttcctcctctctgaggcccataaaagccccgtgttcagccagagcagaggagaggatggagagatgatggagtggccacctgcagnnnnnnnnnnnnnnnnnnnnnnnnnnnnnnnnnnnnnnnnnnnnnnnnnnnnnnnnnnnnnnnnnnnnnnnnnnnnnnnnnnnnnnnnnnnnnnnnnnnnnnnnnnnnnnnnnnnnnnnnnnnnnnnnnnnnnnnnnnnnnnnnnnnnnnnnnnnnnnnnnnnnnnnnnnnnnnnnnnnnnnnnnnnnnnnnnnnnnnnnnnnnctcctcttcatcttgctcaccctccacttgtctgaatacctcattcttcctcgatgcaggacaaggactctggcaagatgccaccagtcacagaggtttctgatcagaaaagcaacactctgaagatcccataacagaactacaatattgcctccaaagcattatttttaccacttctcatactatttgaaatgtcatatatcacccaaatcctcaggatatacatttatgtgcatctatgtgtgcatatttatacacatatttacaatttctacaaatttataagaaaaataacccttaagaaaaatatgatcaaagaaaatggacagtaatatgtatagcactttcataattcttttttagaaattatttttagacttataattattaagtcatatattaagtcttatatattaagactttcttctaattcctaatatttttactataatttataaggacccacaaattctcccttgcattaattcattgaagagataagatttgccagctatgttctaggcatagttctaagattataggggacggacatttttcactttctaaagtctcccttacacataaatacttcatcataaagataaacccaaggagatccattacacaactctaagtagctctgttttcaggttatcaatgtgttgattttacacaaaatgtgatttttctagtttgttaagtgcttcagatatgtttatacttttttataaaataatgaataatgtaaaggaatctttggttggaaaatatcagaaaatagaagagtaaaaatttttttaaattaggttttcacgaatctttctgactctcattttgcctttgtgtagtacatgaattatttcaaacagctaaactactaagtagtagatatcaaggaaatgttaatataatactataggattcaccctgatttaacaagaataattggaaaaataagcaaagcaattgtaacccagaagttttcaaacatatgtttggatttaccccacagccttaacttctttatcacttttctttactccacccagattcccagttaaatattttcagttgacacctactctgagattaatattaggcccataattctgctttttctcattttcgttatactacaatatgagaggtaaatgttaccttaaagttatacctcactgatgacagtggacttgactgtttttctattgtgcttttgtactgtttctcatcagaggcctgttttatttacattattatgaccaaagttcatcttttttcgtcagtaactatgagacttgctttttatttttatttactctacattaatataaaccactgcattgatcttatgttaacatattaattaatgatctgtgccaaccttatgtttgaaattgggaacagaattttaattcaaacatttgaaagatgaaattttacaaggacctgacttttatatatgcgataaagaaatatttgcatccaaaaccaactgctagtaattctgtgtctcttttccacagaagagaatgtttaaatttcatcaaatgaaacatatttttgaaatacttgataaaatgagatgcctgagaaaacgttctacagtgtcattcttgggagttcttgtcatttttctcctttttatgaacttgtacattgaagatagctatgttctggtaagtttgggaggttgattgtcttttcttcaaaataaggcataagtcaaacaagaattagtcccattgtagcctaacttcaatctcaagctattggagaagacttagtttgagcaaaattataacatgtatattgtctattttttgtattaaccatacatcaacattacacttgttttgaattatgttccaatatttttaatggtgtatattttgtgctccaaatatgtacatgtaattacaaataagttagctatcatcactatgcagaataaatatgtggagccattaagattttgggttttccatttgaaatgcatagaataaacaaaatctgcttagaaagtataactccttgcttcctctacttttctatattatcactgaaattttcaaaattccattgtctaattaacaatgctttttaattgtgctatttgtataagtaatattttattacaatgtgtaacaccttatctgaattttgaatagacctagatggccactctgttttatatttgtacccactgaaaagatctcaagagataaagatattgatgtgtaaatcattcagtagttaaaatgagataccaaatattggtaggtgattacatataaataggtttttttagggaaaatatgacaatatgcaaaagcgcttattctgactaattatgaaaaattaatatgttagtttcaatttttttcttattgttatcatcacatcatttcatgtctgatgagattaatacagacattattgctattcactttttctatcttaatggagcctaaaatatctgtcctaatttgtatgttattattaatatttatagatttcagaaaatcaaaacctgattacagtttatatatttcagaaatcaaaacctttacaactaacaggaactaaaaagtgattttcacatgcaaaaatgctaaaagtttaaattagtgtcttaacaagagagagagtatttccaaaaaaaaatgctttagattatttattaactattattttccagatactatgctatatcctatgagtcaaccatatgattttagttggtacagatattcctaagaagtcctctgtaaaacatcttgcatcctttatctctgttctttgatgctgaaattgtaccagaatcctagattttgactctgcctaggctttttgtcttcaaatagtgattctgatgttgtggacccttaatgtttctctccacagtctatgcacaatggctgaaatcaacaaagattaaacaggatttgagtaggtatgatttaggcaaacttagaaaataggagaaacatactaatgttatgcatttttgaatatttttaaaacctattagttatatgagatataataaggacaacagaacaaggcccatgtgttcttgctatttttttcttaagataatgaaagattgtaagttaactagagattctcttgattaattattcaattttataataaaaatttatttcttgattctgtgtctactggtagaagtaaataaaatcttgtaaatcaaacacatgttattggttggaggcttgctatgttcaattacttgctgaatttataagacagtttccagtgcaattttaatctttcactttcaacaaacccaaaggaccattgaatgtgcaaaacgcccttatgtcttttgaaatagaacctgtttaaattcaccataaaatgagtaagaagtagtagagtatatgtcaattagaaaataaaatgctatgttcctgttttgcaaatgtttacagtgctatctaaacattggtcctagtcatcaaatgtagataatatgatttaatgaagtagctcttctactaaagctactttctcaatgagatttctgtgattatattaggaatatatctactcaaatttgcaaatcagtccaggtgcagaaaacagattgcttcttagcttttaaaaattattattggccgggcgcggtggctcacgcctgtaatcccagcactttgggaggccgaggcgggcggatcacgaggtcaggagatcgagaccatcccggctaaaacggtgaaaccccgtctctactaaaaatacaaaaaaattagccgggcgtagtggcgggcgcctgtagccccagctacttgggaggctgaggcaggagaatggcgtgaacccgggaggcggagcttgcagtgagccgagatcccgccactgcactccagcctgggcgacagagcgagactccgtctcaaaaaaaaaaaaaaaaaaaaaaaaaaaaaaaattattattttaaaatacttacaaaagttggaaaaaaatgagttaaagcaattgctaaattccaacactcatcccttgttctaagtttgatgatagcatttttattatttaacaatttactatttactgacggatgttttttaaccaaatcgcattttagctgaattttgcttcaaggctataagttgaaaactttttcaatgattaatattaaattgcattacaattattcttctaaaaatgaatagtatccatgggaaactggccccctccaagaatataatgcaatttctttttaacacatctcccttttgatctttttacctgtgtttatttcttttttaataaaattatctgaactcatttttcttctttcttcccgattatcacaatgtatgcaatttgctacgcacagatattagtagatctttcttttttgtcttccttttttaaaaactgggaaatagtacttctaacttagagatatcaggtgaatagttagaagtagtaaggtctctggagttagttaacagattctattctcgtctttttgttagaaaatccatttgtggcctgaaaccctaggcatattagcagtttagcatatttgcttatgtattagagatatatgtgcctttaagtgaaaaaggaagctgcacttagtgtaagagacaaacaccgttacaaggcaaactaagtagaagagacactgcatgcccaatcaacttagcttcttggctttgagcatcttcaaagtagccacaagggtatatatttagtctgcagctagttcattgaattgcattcccatccagaaaatgattgtcataaagctttgtcttattactgagaaatatactacagcatagtagctacagaaagaaggtatccagggagagcctggctgttcaggtaggtgactctggaaagcagccaacaaggctgactcaggtgaaagttgcattatttatttatgctgaaaagtataaaaaagcttgttcctgagaatttaataaagtgatttcatgtaagttccatttctttttatattctgttatgtccttaaatcaggatgaatgtactccatcttataacacaaaatttctagattttatgtgttaaggatagaatttttaaagaggtattcaatatcctgcacttaccttagaatgtaacatcacctaagaatagaatggtaaaatgaatttagtgctgtaattactgtactttttacagaaatttcttccaggcattattaattatgtacatcactacattactattaaaataattgatactaaactgagtcactagttacattttggcagttctaaatttattttaaactttaatgatgttttataggtatgcaggtaaacaccaatgaaaatatttatgtataaagaacttaaaatcatcagaattcagtggatagccaattagtatatttctaagtaatttagcatctaaggtttaatctcaagtannnnnnnnnnnnnnnnnnnncacttttacacattgtgaaccttataaaggactaaagtatttcttggtccaaattatcaaaggcagtatgaaatagagaaatacactattaaagaccaaatttggatttataaacatacttggatatacagaaaagatattcagaatgaatcttgatttagtaaggaccatattggaagcctctagttaaggtccctactttcagtttttattctaagaatagtcacgtctggccatagattagaaaatctgagttagtcatctttttcattgtcactcgagattgatgcgaagtagaagtattgaatgtttcagctgtaaaacttgtatctgagctttgtctaattttttagaacaaggctttaattaaccttttaatgaccacagcaaaataatagcaggaccagagttatttaatccatttactttctctacagtcttatagctagcacatgcctagcttgactttctatactgaataaaataaatccacataaggccaggtgtgctggctcacacctataatcccagcactttgggaggccgaggtgagtggatcacttgaggtcaggagtttgagacgagcttggccaacatggcggaaactcatctctactaaaaaatactaaaattagctgggcatggtggcgtgtgcctgcaatcccagctactcgggaggctgaggcaggagaatggcttgaacctaggaggcggaggttatagtgagcagagatcatgccactgcactccagcctgggcaacagagccagactccatctcaaagaaaaaaattaaataaataaataaaaccacatagtagagtgcacattttgagaaaaaaaaagagagagagagagaaatatttctttctaattaggttgttctcaaatgtattctaccaattctagtaaatcacatatgagtcaaacaaatagtcattttcctaatagtgtataaccagtaaaggcttgatcaaatgatgattagataatcaaaatttaccatttagcttatatcaaagaagggcaattagtgggtaaaggatatattttaatctgaatatgaatatgttttcttgaatataaaccttcctgaagatttaatgacatgcaaaatccatcaccaaataaataaaagggatctaaaatataaaaggatcgggcattacatccaatagaatcacacacacacacacacacaaacttaactatcataagaaatattagtcatagatatctacacattaccttaatttggtgctaatgtatcctatttgaggttactttaggacatatgaaaaaaattactgccatagcacccataactggcccttctcaacagctagatagtagccacataagtgacttatttaataaagtatcaaaaatccaaatattgtgcccactactgcatcttcctaatcattcctaaagtttcacaatcatggagacactgtgtgatcttttatttgagactgcttgaggaagagtaaatcaggcaatatggtgggaactagccttagattaaactataaaatagattactgtcaattttgagatccttaaatgattgtcaaaaatttgaaaagtagcataaaggcagtgggagttttcatgtagaaattctttttttaagagattatcattattaatgtgtcctatagaaaaacaaatgtaattgtggtatacacagcaaaataggcgagcgagctactggagcagaacctccaggtaaaaaatgaggtgagtgatgatgagctacagcttatgacgtcagtagttgagatttatataaccctgcatactatatattgtagtcgtacatttattgtgtaaaaaagaaactttatttaatccatgaccatctattatttatatattttccttgcttctttcttggtatttaggaaggagacaaacaacttataagggaaacatccacacatcaactgaattcagaacgctatgttcatactttcaaggatttatctaatttctcaggagccataaatgtcacctatcgctacctagctgccacacctttacaaagaaagcgtaagtatccttaaacatttaaataaagaatacataaaatattttgcattaaaataatgatagtttcacatgtatagtaaaaaggcttaagggctttactaatataataaattatttgggcaaaacttcaatgtttcttcacaaattgccaactactatactcactgacccagtacacttaataacaaaaaaattaaataaaatgcctaatcgtaatgtgagtctcttgagattttgttgtaggatggtatagagtgactagaaaaaaatcaatttactttaaaatttagaagttaacttttaaaaattcctatgttcatattgctacattttctaacctcttaacagtttggttttatgacttgccacaactttttaattaatgaaactcagtgttttagtttcctaggtctgccataacgaattaccacaaagtgactggcttttaaaaagagcaatttattctctcgtggttctggaagccagaggttraaatcaaggtgctggcaggtccccactccctctgaaagttctaagggagaatccttgcccctttcagcttctggtgactttgcttctggtactctttgactttggggcatcactccaattcctgcctccatcatcaatggccttcttctctttgtctttctgtgtcttttcctctttttataaggacacaagttattgaatttatggtccacatctaaatccagaattattgcagctcaagatccttaactaattatatctgcaaagatcaaatttactaataaaattacattctgaggttccaagtagacatgaatttttggaggaaactattcaacacactgcagtcagttaaaaaaatatatttggagccaagaagtaacatactatatttctaagacaccatagcttacaaaaagtaccattatctaattagcataccactaagaaagtataagcattaccaattttaattataacgctgttgattttagtatgcagcctgatttttaaatgtttcaatgtgtaaaatataaatcttaggctgggtttggtggctcatgcctgtaatcccagcactttgggaggccaaggcaagtgtatcacttgaggccaggtgttcaagacaagcctggccaacatggtgaaaccccttctctactaaaagtacaaaaattaaccaggcatggtcgtgtacacctgtaattccagctactcaggaggctgaggaggccaaggcacaagaatcgcctgaacctgggaggtggaggctgcagtgagctgagttcgcaccactgcattccagcctgggcaacagagcaagactccatttcaaaaaaacaaaaacaaaaacaaaaaaaccatgaatcttagaataaaatacagtgctatcatgatcttaataaattatgtgaagaccacaaaaattgacctctcttttaagacttgtttatgtgagtgtatttgttatcactaggttgaggaaattattaaattaatttagatttctttatatctcatttcctttcattctaccatttgaaatgtctactgttcttaggcttctttctaattgtctaagactgccattcatttttcatctctgttacaccacctttgcttgaacattactgattaccttttcccatgctaaatttactaatgtttattggcacacatgccaactgctttctaccagaggcaatgtaacacagaggataaaagagtgagacagtttgaatcctgttgcagcatcacctactaagtgtaccaccttgcatgagtcacctcatctcaccgtgacttagtgtccctatctgtaaagcagaatgatggtaatagcaaacctatcccaaaagaccgttttgaacatttaagatgcatattacagataaaatgcccaaactcctgcctcttatgtagacagcattccataagcattggctattattaatgaagtttggtggcttcaagtttaatggtactagataacatattgtgtttcaatagaagtctgagttgtaagccaaggtatttaaacgaaatgtgtaaatcacaatctctctgacaaactgtttttggaatggggcttttttcaatatcatacaaaccgcattatacaggtgctatattaaaacgatgatcttgttgtatatagatttccccattttctaaatagtggcttagaaatgttattcaattctgattaatatcagaatgagctttaaaaagtgaaaatatttcaatagaaagacctctaacccttctcagaggtgagctgtcttttctcagggttttattttattctctaaacatatctaattcctaattttagattataaatgtctgaataaaaagttattcaggcaaaattactataaagtgtgtttcaaaattttttaaagtggtgcttatgtcttggaacaatgtarcattaaagttttttgaatgtgtcttataatattgtttgctttctaattaatatactatgtacatttcaagataaaattgtgaagtccaattacgaattctagtacaacataatgacagcaaaaaaaagaaaactgaaaatatgtgatgtgttctataaaaaatttaaagatgattgaaagacttacttacccttatttttcttttgtatcatttgaaactagtttgtcagccttaactgtgaatgcccttctctttttgcaaaagagaaaaagcattttttttactttatctttaaaaagtaacttgtatgttatctaggtacctgtctaccttctctaatgggygtatatgagaatattaagctgcagaacactttaaaccatgtttttagaatttcatcagtaaatgttcacagcaatagggctcatacattattgtgattaaggtgctatttatttttcatagaaaatataaattatgtattaagcacttacagcctttatatatttagcttattactttaatcataaaatgttctgtgcatagtcatttactagatttacttaatatgtagtaagtagcaagtcaaaggaataaatatcttctctcttttactttttccatatttctagttcacatttgtattgcttctgaattcttttttgcagggtatcttacaattggactttcttcagtaaagcgaaaaaaaggaaactatttacttgagacaattaagtcaatttttgagcaatccagctatgaagagctgaaggaaatttcagtggtggttcacctagcagactttaattcttcctggcgtgatgccatggtccaggatattacacagaaatttgcgcaccatattattgcaggaagattaatggttatacatgctccagaggagtattacccaatcctagatggccttaaaagaaattacaatgatccagaagatagagtcaaatttcgttccaagcaaaatgtagattatgcttttctgcttaatttttgtgccaatacttcagactattatgtaatgcttgaagatgatgttcgatgttcaaaaaatttcttaactgccatcaagaaagtcattgcatccctagaaggaacttactgggtaactcttgaattctctaagcttggctacattggtaaactctatcattctcatgatctcccacgtttggcccattttttattaatgttttatcaagaaatgccttgtgattggctattgactcatttccgtggtctgttggctcagaaaaatgtgatccgttttaaaccatctctctttcagcacatgggctattattcatcatacaaagggacggagaataagctgaaggatgatgattttgaagaggagtcatttgacattcctgataacccccctgcaagtctgtacaccaacatgaatgtgtttgaaaattatgaagcaagcaaggcttacagtagtgttgatgagtacttttgggggaaaccaccttcarcaggagatgtttttgtgattgtatttgaaaatccaattataataaaaaaaattaaagtaaatactggaacagaagatcggcaaaatgatattttgcatcatggagccctrgatgttggggaaaaygttatgcctagcaaacaaaggagacaatgttctasttacttaagactaggagaattcaaaaatggaaactttgaaatgtcaggtgtaaatcaaaaaattccatttgatatacattgtatgaggatatatgtcaccaaaacacaaaaggaatggctaattattaggagtattagcatttggacttcttagccaattaaatcagtatgttcagtttctgaagcagttcttcctgcttcgtcttttgctacctttgtcttttggagggaaagcaatggatgggatatgttaaaagaaacattaattacattggcagttttcatttatacattgttgacataattttactcttaatacacacttgtatttattttaacgtctgaagttgaatatcagtctatagctaatgctactttcatttatatttttaaatgttcttagttttaaaatttcaactgattgtcgaaagggtaatatgaaagattttaaatgaaaaaaatttgttggatgatgatttttgaaaaatagtcaccaactgtatatacttcctcaagaactgataattcattatatcatcagatagcttttattaagcatctgtgggaatatacagttgggtggaatgataatctggtttattttttctgtaaacttaagtttccgttgacttctgtacatctacaatgaatacctcctcatagaagtggtgtctttacataattttttgtgtaggtgacactatggaaaaagaaaaaaaagacttaaaaatatctctcccctgattatttatatgaaaggggatattgttcattgtttaaaaacatttaattgagcacctattgttgataaattttctgggggaagcagtctttttcaagtttcccttttgaaaaaaaaaaagaagagttaagctcaatattttcaggttacattgagtacccacatttaatagaataaattagggaaggcctatagtagttagctcattcgtacagacattttcagtatatgcagaaaatttttggaaattgattttatacattttgtattaaaatccatgtgattgaaattattgtgatttatcatatacctttttggaatttaaatgggtatattataaaggagaaaagtaagaaccatagaaattagttgacttttctagaatcaaagatctatttcctagcaaggccagaatgagagatctgatattctgataaccagacaatgctctttttctcgtatgatttctcctgacagatttatgctttgtgttctatttgctacatgcctgtcagataataagttataccatctggaaataggtggtacaattcctgcataaataatattatcctaaataatgtcctaaatgatgcttttttggtataagcacccaaatagtaagcaaacttgactaaacttttcctaatagggattggagagtgtgtctttacaatgtgtccgttaaagtaattcaggacaccttagtgtgtcctaaagacattggttttcagaatgtcctgagcttgtctcttcctttttgttttttaatgaacagcaaaaactaagggatttattataaagggaaatggaaggtgcttcatatatgtttaagaaactcaagtacgtgttcatatagatgactctgtgtgtgtgtgtgtgtgtgtgtgtgtgtgtgtgtgtgtgtgtgtgtgtgaaggctagacttttgctggtaagacagaatgaggaaatcttcctgctcttccttttcatactgaaacacaatccttaagatttactggtatgctgtggtgcaaacaacactaggatatttttattttattcgttctctgcaaataaatgagaaactcagataaaaaatggaaactttttatttcatttataaacagctgttgtgtattttctttgtattcagctactaaagtgttagaagaaaaacgaacctttcataagaggctaaatattaatattttgtgaggcacctaaatcttacagtcataggaaaatatgaacactgccactaaattattatctttaccttgatttagaggatacttgccagacacctaaaaatgttctattttctttatttttcttatcttttattaaccggctagttgatagtattgtgtgtatatctcagaagttacaaatggcattattttcttcactgtcaatgataaaaggtacacaattgtatgccaaagacatgtaatatcaagagctaggcagactccctgaaatgagttgtaaccccttacatattcttctgggaatggctttctaaagatcagctattggtgtctatcaatgtcttaaaaatgtttcaagaaacattgctgagggtagcagtgaagttggatgtttgctaggaaattatgaaaacaaatgtgactcagagaggtcatttcacattttatctttatatcctctctttactaaacctgtgtttggataagttggtcaatcatccaaggatcctctatgttttctttacagttgacactgggtcaattttctaaggaaaacaccttgacaaataaagcatcttcattagaggtcaggaggaaaaataactattctctttcaaaagaaaatctgaacaatttttttagcatggcccaatgttctatttcctatatttagaaactttgaataagggtctagtaatcttgtctcagaggcatagaaacaaaagtacagttattaggtttaactatactcaaactatttgctatttttaaacatttttgctgtaagtttatatatatatacatatataatacatatatacatatatataatatatatatacatatatatataattttctttgttaaaaataacaattgaaaaagactggcatgagacatgaatggctgagtcatttaattgccatacaaataaaatgctgacaggtttcaagcaaaaaatacagtatgcaccttaaataatgcctcagaattgtataatttaagctcactaaaaaccttacttagtcttaaaattctccttaggggagccttttcagcagttatggacatcaaagaaaaaagtatcttgtaaaagcacaatgaaatttagaaaatacacattttagtggcaatcacaaatgtcaatataaaagatacataaaatatgttaatgcaagaactttttcatattcattgaaaactataactttgtgctatttataaagtagatattttccaggtatgaaaatataatttggaaaccaacctgtcgtttagatctatttctttcatatagctacactatgagttgtgaacattccatttcttactgggccagtattctctgggaatttttataatgctatcatagaaaaactgttctgtataataattatataaaaaatgaaacaaacattttcaaattgtaatatatgatgtggtatggaaagtacctacatttttagatgctcaaatattggcatatttcatgtcagtatttgccaatttgtcaacaagtttatggcaaagaacatgataccaggattaacattgaaaacactacatccagtgccatctaacaattgaaggaaacagtgtgtaattctcttctttttccttgacaatacatccatcaacacagtaatggcatcatattactgagtaatagagctcacacttaaactttataatatttattatgggatctactgataaaatgatttaccgttttgtacaaattcaactgattttggggggtttcttgtaagatttaatattaattttaggataattttatcctgtttcttttgattcatgatcccaaactttctagatcttgcttctgtcattccacgtcttattatgcctcctcagctttgtgtttcaacaaattttatatgcatgccttttgtcttcatgggagacaaaacagaaggttcatacagacttgattttgacacccagttctgcattaccagcctcccaatatgaggaaatttacttaaccttcttgaaactcagtttctacatctgtgaataggaataattttacctcatatgtttttaaaggtagcaattttaccttgtagctccttgtagagctggaattgagataacataaactaggcacacaataaatatttgtttcctttttatccatgtcacgtatatgtaacaggatatgaccctggaaaacattaccagaggccttcattgtaatcaataacaattataaaatttactgccctttaaaaatgttattcagcctaccttttcatattttgtccagagaatatcatgtggaattatacagacactttcctaaaatcaatatatattcctgtcattctaatttattactctagaaaccttatcaaaaatatcaaaattgcccctagtgctctcatcacaaataataatattcatttctgttttaagaaatcttgatccatttacattgaaaaacaaagaaacataaagtcatttcctagtttctaagatgttgtttagaatctaccttaagctcagaaatgcagtcttcagaatctttttactttttttttttaatgtcaggatccggttctctggcatcttttctatcattggcaaaagttatcaatgcactgacctataaattaccttggcactgatgtttgaaataggtatcttatctgctagtctactttgagtttcattgttgagttttccattactttgaatttctttgttcagattggggttattctttttaggaagaaaaaggccataacaaaattcaatgtgattagttattgccatttattttttgtttgcttttaaactttttttttatttatcccaaacagaggatatatcttttattactttttggcatgctttgaaatgatttcattattgcatatgtgcatgtgtgtatctacatatggttaatctctcaatctgtgtgtatgtatatatacatatgtgtatgtacatatgtgtatatatgtatacatacttgaatattatgtgaatatgtgtgtatatttgtgtatatatatacatatatacatgtatgtatttgtatatgtgttgtgtaagtgtgtctgtgtgtatgagagaaagacagaaggatatgcaccatttgcattattttttagcctttacacctccacttattcttggattttcctgacacactgtcctcctggttgtgttcctcttctgaacttgcttttgctttcatgttctcactcaaatcttttatacatgacatcctttgaaaatcacagcacattagagatctttgtgcatccttttagatactttaaatttattaaaagtgtactagaggaggccatctctctcaaaacagaatttttcttttagagtttcaggtttatggtttttatttgaattctttaacattaaaagatcaaaatatgagttgcatagcattctctttctaagctataaaaatattaagataacaaggttgcactttcccaaagttctagtcccttccacctcattaatctgttcatcacatttactccaagtccagggtagaatttgcttcaataatcccaatattttctgagatgtttaatatcctatttttaacattgaaattgaaatgtatgtttgagaccatttgccagataactggatctgaatatcttttctgaaaaacatggatttgagaccaaagcagtttttgatttgactgttgtttcagctttcatttcactctgtctagacggtctcttagaagatttaccaaaaagttaaattgattatgtgagaaagtgataggtaaattgtatatgaccatagaagtacaattaaattaagaatatagcatgatcaaattttcacattatattggattaaaaagtaccctaagtagccatctccttaaagtaggtgagccaaagacataataataaaatattcaatatttttctataaaatacaaatttccatgaggcacacatacattaaatttaatataaagagaatcattactttatttaagagttgtttaaaggtgcacaacaacagtgagttaccaatattcagaaccttagtctataatttcaatgtactgtaagttactacagctttaaccacaatagctggcataacctaaatcattctgcccaaatacaggtaattatagttttgatgtataaaaattaccaaaataaatgcatatataaagcaatagaggctgagagtgttcataattgaaagctaactattgcaaaaatattttaaatatttaatttatagtgcactcgaagttctggaagagacgtaggatttgtctcttccaccctttccctcactttaccgtttattatgaaggtaccaaaagtatggcacagagatatgtggcagttccacatatctcaatcaacaaagctctaactctattagaaactagacatttaaaaagtactttttttgtaacttcatctgagtcaggtttctcattgaataataatctgtcagttttgtctatagtatgttccaattggaaaatgtttaaggtagtacatgcctcttttctccataaaataccccacatttgtttaactatttgacatagtcctattttttccatctttaataattgataaaattttccctacttttaaacatatgtatgtattttctgccacacttaaactttgttattccacgttgtaacttacttcatcaatgagtgaaagtatagttccaaaaagttagaataattatctcagatcctttw

SEQ ID NO: 94184 - DNA, 53641 bp, Homo sapiens
ttacagctgatgccggaatgagttaagattttggggatatttggatgtaataaatgtatttagcatgtcagaagaacatgaattttggagggctggggtagaatgctgtgaattgaatgtttgtgtctgatatggtttggctgcgccccaccgaaatctcaacttgaattatatctcccaggattcccacatgttgtgggagggacccggggggaggtaattgaatcatgggggccggtctttcccatcctattctcatgatagtgaataagtctcaagagatctgatgggtttatcaggcagtttctgcttttgcttcttcctcatttttctcttgctgacaccatataagaagtgcctttcgcctcctaccatgattctgaagcctccccagccatgtggaactgtaagtccagttaaacctctttttcttcccagtcgtgggtgtgtctttattagaagcatgaaaatggactaatacagtgtccctccaaaattattatggtgaaaccctaattgcccatgtgatggtagttggagacagggcctttcagaggtgattagatgagagtggaatcctcatgaagggattagtgcccttacaagacacatgagacagtgcgacctctctctctctctctctcaattcctctcagctctccaccatatgaggacacagcaagaaacaggctacttaaaaaccagaaagagggacctcactaagaactcaacaaggttggcaccctcgtctcggacttccagcctctagaactgtaagaataaatatttaagccactcattgtatgatatttttgttattagcccgaagtaagacaaagaagaaatattgctccaacaagatttatgagtatattttacagatctgcattggacaagttagctttccctgcaacgaccatttactgaatctttactatgtgccagaatctgagagtcatattagcatctgcaggtaaatcagccaaggttcaaagagatgactaaggccaggcacgatggcccatgcctgtaatcccagcactttgggagacccaggcaggaggatcgcctgagcagaggaattcgagactagcctgggcaacgtggtgaagcccttcctctacattaaaaaaaaaaaaaaaaaaaattagccaggtgtggtggcataagcctgtagtcccagctactcaggaggcagagatgggaggatcacttgagcccaggaggtcaaggttgcagtgaaccatcattgtgccactgaacaccagcctgggtgacagagcaataccctatctcaaaaaaagaaaagagagagagagatgaccagatttgcccagggacaccgagtgagttagtattcacactgggatttaaccccagatctgtatgactccaaagctggggctacctctattccactgggttgcgtctgcatatgtaaaaattagctgcattttaaatatttgtctaaaataaaccttaacctatcgcagggcgtgctgccccagcctgagactggctgcttcatctacagttgtttctctayttgtccttgcgtagggaagttttatcaccacaaggaccgtttctcctctgtttaatctaacacctgctagtctgagattctctaaatgtcccacaataaatatgaaaaacagtctcaggcatatttttcccctcttaaataatggagtctaaatgccaagtggccaaaagcaggcctttcagccattggcggctgaacactgtctgaacatgaaatccgtctcttcaaactatgtcaaaattgcttaataagaactcaggggaccccacattaatgaaaggatgcatctgctttgggtttcacattattgggagtgatggttcagagccagccacctatgcttgactttcactctttaaaactctgcagttaatcacagccctcattatacaaaggtyacatggatataaagtttgaaagattcggttcaagactgcgagcggtggccaggaaaaaaaaaaaaaaggagaagacacaaagacaatgatcaaagaacaatgaataacattcaagactaagtcggtgcaaaattttcagaatgagaaatgaaacggaaaacttagaggataagtaccaagcacaagttttaggtattctggagacaggaaactcagaatattttagcaaccgattatgtctatgagggggatgaataatttattatctgataaagaatcttccctgagcctgtgacaagaaaggtcaaataggcaactgaagtagaacagtaaatacacgatatactactcgaaaaggaagtctggaacggaaggcgaaggaaagagcttccttggcccatgttcatcaactccctcagattacaagaagcgcagcggatgtactttttaggtaccctcatattaggaacccagaagtattcatacaaataaatgcaaataatgtatgagtacaatacttgtctaagtccttgaaaaaggccaatcttccggcatcacccacacaccagctgcaaatcttggatccaccccgttatctcccagctgtgtgagcctgggaaagtctatgcctcttccagcctctaaactgcctcatctgcacaatgggtttcacacataatataaatactttactgttaaatgctaagcacagtacctagtacaaagacaaataggaatatccaaccccccacctgcaggtgacaataataggacattttgcaaacgccccaaagaagaacttcagaactttacgttcctttgtgagcrtgcgcttattgacttgagcaagtggcttatatagttcttgctggtttgcagacttgttmatatcatmctttatttattgaaaatccaatactatacagaaaaacaatttgtaaagcaaagaaatgaggaacaaatctaatggctgatttaggatgcgytcttcccggtaatctacaactattaataatattaatagcttttatctttttgtttagctacagatcgttcagaacaatggagataagccctgtgacttgtgatgcgttgacgaatgatcatcttttccaagccaagtcaccagcttagacaggcatgaggctcgtattttacccgccccacataccacatgcctccccccaacacatatatcataaaagaaggccaaggccttccatccacaaaggcaaatcatgggacttaagcttttagtgtcaaaggagattgcatggaattcccacaaacagtgaagctataccagctcataaagtcactgaattttaaggagcctaaaagtaggtggagttttgcagaagtctttaaaagtgcgagcaatttactcctcagcatcctacccatcgttccttaatatcatgccatgaaaacacaggatgcggcagtttcccggcagggaaaacaacaacaacaacaaaatgaaaacacargtgtcagtatctatgaaaagcacagcaaaatgttgagcccatgagcctaatataatggttggtactgagtgctccctatctgaaaataatgttaaagtcattatttccgatgcttatcaatgaggctgcaatcacataatgctgtcagtactatccctatcccttcactcccacaaaataaatagacccgatatcaactctattgaaaacctgaatcattacagcacttcagcagcaaaccgtgtggttgcaatcaactgagcatgcgctctctccctaaaacatgcacattccattacctctggctaataaatcttttatttttacccctcatctctctgctttctcaataatcattttgatataaaccattgcttgctgttcctgatgactaatcccttaatcatctttccaaaatatatgcagagtgtatttctttgtaaatacaaaagaaaaagcaatcacataaatagttaagatggcttttcaaatgacagttgagtgctaatatgagctacactggaaaatactaatcaacaaactaaatacacatccattaaaatgtaggagtccagacatatgaagacagaaaaagaattcattgcaactccactgaaatcaggctgataaacatctgccctagagctcctctttcagccagttggagaggttaagaaaagtaagcatcactttgcactttcatgcgtgaagaaaatattattattgttgttattaatagcagcagctaacatttaattgagcacttaatttattccacaatgggttaagactttatatacacagagttgatgtgtttaatagaaccacctgtatctctgaatagagatattatgatgtgcattttacagatgaagaaactgaggtttaaagaagttaagaaacttgcccaaggtcataagatgtatctgattctaatctttgccactataatacagcatgttttatagccgtggttatgaactggggacgatttgcacccccaagagacatctggcaatgcctggagacattttggttgccacaaacatacttgggtcacccctcccatatgagaggggaatagactcaagacacattctgggaagtcaggggtgagtcaaatagtaactctaagggagagccacctgcccctcttcccataccagccctctctgaccaacctgtggccatctcaatgtccagcagatgctgatgtttcacaacacttattgggcccctcgctatactaatggccagtccccaacagaagctcttctgcactctctgttaaacagatctagtgagggcctggcaggcatgaggaacattggttactcataacaatccctctcctctctctcaatccaccgcccctgcctcccagcctcagcctcatcccttttcctcctgcaaacaacgtagggagatggatgacatcaggtccatctgctcccactctaccctacctccttcttccacaggaccagagttttagatcccaagttccggggatctaaaatttagaaactaaaatttagaaatctaatagaaacagaagaaggaggaactcagagccccactggggtctttcaagagctctacactggaatgtcgaggtcttgctgtagctgttcatgaagtatgttttgatacctaataagctcttgttctttamatgcaatgcccctcagaggtcctgagatctcaagacagggagtgggatatgccagaccccgagaaataaagcaacagaagcccaactccaatagatactgggtaaaggaaagaataaaccatggtaatgcaggactcagacacacctatcgttgtcccagacttagagaactcacatggattcctaacacatagacactgctgctaaataaaagagagtccactgcatcttgaaaacaggaaaacatcttattccaccagccacactggcctcttggaatacacaggaaaacgataggtgcttgtcttaagaggtgagggcaccagtgtataattcacataaggatgtgaatgaggtagatcacatctgtgtgctgttccacaacataggaacaagccccactgccccgttttctttatttaaatatgaatgggggctgatgtgcctccatctcctccctctttttttaattatgccaaatggattggccttttaagacagtggtttacttctgtactgtccatgttatcctgttttaattgttttcattttttctcttctaactttggagcatctaaaacatctcagcaggagggcattttcccatgaaataattagtagtcatagtaattacatataggttcttaatatacttctatatggaatgtgttttcacttaagttgtattttattaaatagctccttcttcccaaaagtaatttgagagctctataaaggatatcttgaatataaagagacgacagggtagatcagagtggcttcctctaagaaataggatggatcctgaaattaatcactcaaaccgcagctagagagtttgaaagcaaaatctgcaaagtatgaacattgatactaaacatggtaaaaagatgggccatggggtggagcagacagacttgsagtttggaagccagatggaccaagcaaggagmctgactctgagctcaccagctgtgcaattcgggtgagttccttcaccyttctgagccatcycttggctcgtctggaaaatgcaaaaaaaaaaaaaagaaaaacaccaggtttttgcatcctcctggatgagggatataaagtgcctgacacagcatatgacagggatttgataaatgggggctrttagctgtcccattgtggatgtgagaatagcattctgctggctaaaaggcagacatgaatgttctagaacatggcgatcccggaatgtgcagtgaaggcaggaagaggaagaatgggcagggaagaacaagttgggatggaggaatgaactcttatctccagaagcagagctaagaatgcccacggagccttggcacatgacagcctccgctgagccaaatggcccaaagacttctgaatgagcttttgctgcaacaaaaaactttggatcattttgagagcctcccgtgaggygccaatatgttgcagtaccttcccggccccgacactgatgtgattcatcgtaggtaacatatgaatacgctcaagctggccagcagcttgaaaaattggagtctatcaaattgaccttgagaaacacaggaaggtaatatttagtgacataccagatgaaatccttgcgcagagatgtgaggtgaggaaggacctgaagtgaagtagaccagcaaatatcaagggtcaaggagttgggggatgatatagagacgaagcctaacagatgtcaccagagcaagaaggccttacracttcacatcctctctgcagggtatgaatggtgcaatggaatgaaatggtaactacagcttctggtgcaaaatttgagtttccataatcatcatcttgggaaaatgaggaacacaatataatggcatacacagagaacaagtgaaaagatgagagatgatgaacaggttgagtttcttcagcctacaacctatcaaatctaattttaaacatctggagccacgtgtattagttttgtttctgttccattttcctttttctgtgtccccgacggtgaatgattctgaataattcttagtctgggatcactggtctatctcaaggtactacatgttagagtaaaactataaaacagcaaattctatcatckgaaattgactcacagggacccaattaaggctcaaaatataagaaagaaagactgaacagtgggtctttgacatcatccatccaacctttttccttaaagatgaggaaacaggctccaaatagatccagaggcttacccaaggtctcatcgctaattggggcaggtccaggaatttctgctctaagcatcaaacaataattaaaataggataaatgcagatgaatgtgttctcatatatattgtgttctcagaaaagaagaggataaatttaatgatgcaaaaacagttgtgctacagcattatcttccaagactggtttaaacatgaatgtcactgtacaatcaggttaccatagtgtcactagcrtccctggaattttacctttctagtttcaaatattacatcaaataggcagagttttacaattttgacacgccctcctgctagtcccaagaacactgcaagccctcagcagttgtctgtctacactgtcagtgggaatggaaattggagcaacaagataagaaatgactcgggaggtcgggcacggtggctcatgcctgtaatcccagcactttgggagkcctaggtgtgtagatcatgagatcaggaggtcgagactatcccrgccaacatggtgaaactccgtctgtattaaaaatacaaaaattagctggrcatggtgacgcgtgcctgtagtcccggctactcgggaggctgaggcagaagaattgcttgaacgcaggaggtgaaagttgcagtgagtcgagattgtgccactgcactccagcctggtgacagagtgaaactcagtctcaaaaaaaaaataaaaaagaaaaagaaaaaaaagaaaaaagaaaatgactcgggaactgttaccaaaattttaaatgcatatgccctttgaatcaaggagtccagtgctaagattctgccccaggcatttactcacaaatacgtaaataaagaatgctcacagcagcatagtttaggcccaatatcagatgatatcgyaagaaagactgatgcaagaaagagagaactgtgaaacaccattgcttggaataacaaatagcaaaacaatgcaaacaacctaaatggccaccaaagggaagactggttatagcataagcacatgatggaatattatacagcagttaaaacaatgaagtagatctatatgcactaataacagatctcctgcagtactaagtttaaaaaaaaaaaaagtacagaacagaatgtgagtgtgtttgctggtatatagataacctttttctggaagaatacataatgtttatcttccaagagaaggaccaagaacgactttcacatttcatttttcaccttcccattctgcgtgtagattcaaataagatgcacgtattcccatttgtactcttctcaatacatccctaaaaatcccacctactagaggttactactttttaacattagtcagaaagacaataaaatgatcagaaaaagtaagactctgttttcttttttatttaacccaaaataataagctcagtgagctcaagataagggctcatttcaaatatactgaatttcaaatatttcatcataaatacactgaaaaagcagaaataaatcttccttttctttattttcactacttttcagtccagagtaccaaaaattttcttaagtacactgtagtctatttcttcaaatggcaagaaatctttcacagcattcaaaaatgaagacggcctccacagggtgtacccagcccccttcaggctctgctcccaaacacgctgctctatctcctcctccccctcctcccagggcctctgcacctgccattcccctaccccatctgacccttctccaccctcttcaggtctttcttcagatcttagttcaatcacttcttccttggggaccccaaaggtctcccaactccctggcatcattactgattcctaggaccactcactgctttttcaagtttacattaagatctgtgttttttgactaaatttgtcttccacaataggctgaaagctctacaaagacagtggcaacgtctgttgtccttaacagtagaccccagcacccatcacagaggtgcacttcatgaatatgtgaatgaatgaaaagtgaatgaatgcagtctggacttcattctgaaatccagcgatgtttcaaaaatcaaacagctcgcatcactctctagctcaaaccctctaatgtcttcctcaccgctayctcagagtctaccagatacccatcccccaacagcacctctcctacccactccattcatctccagccacactagcttccctgatgatccttgaaatctccaggcttgtgcctacctctgagccttagcatatgctcttctcactgctaagagaatacttctcttgacatctgcatggcttacccctacttcattcaggtctcagatcaaatgtcacaactttggaaggctccctgctgatgactccatcacactcacgctatcattccccccaccttcctctgctttacagtcctttatttactgacattatggcaaatattaaacttgattatggtctatttttcctacctagaaggtaagcctatgagggcagggattctgtttcgtttaatactatatccttggtcccaagactaakgcaagcccttagtaaatatttatgtagacacgtatcaacatcaacttctacatagacagagaaaagtaagaaatyagagatagggttaaagcytccttctttctaatcttaacaaccataagcataacagtctcctagttgcaatcatgggcgttcaccacgttttatttttcttaataaatgagttaaaggaagaaacattctcaaacccctgactaataaagcagatgacactgacaatgaactacaaacaaatgcgtgaataataatkgacttgctcatgctttcattcataagacaaacaaagtgaagatgactttaaaaataaagacatgattccaagagcaataaactttacacactccactraaatctccatatggttagccyggcatgtgtatttgacaattaaaaaaaacaacaacagtcaagcrcttacccattcttctaaaatgcgtgacactgcttcactcgcccttgccatgttcctgcaggccaagrtcacatgtgcaccatggagggcaaaagacttggcggtttcgaaccctatggtttaaaggaaagtcaatgttagaaaacataacatcaacacagtgagtcawgttgaatggcctttaccggagcaccacttaaattaccccaagttctcaaccaggggtgattttgatccccaggggacagaagcaaatgtctggagacattttcagtggccacrgttgtggggtagagtcctactggcatctagtgggtaaacaccaggcattacaaaacatcttaccatgaacagggcagcccctgacaacatagaaccatctggcccggactgtcaacactgtgatggtgagaaaacttgtcctagggatgcagtgatttcaaagatgaagactgggacatagaagagttcacggcatgtccagccatttaaccatcaataatgaccagatcctgtgcccacgataaggactttatgctctactctatggtaagtgtcgccagcacctctgcttctaccagtgttacctaggtttcttagccccatttcctactgagaacaattagaaaagatggacaaaataacacacgtgcatacacacccatatctgtttgaaggcatcagaagggcactatgactaagaattttkggggccaagatctgcaaaaactgcaaggccagcatttggcagcttttttccttcaaggcatatttcatttccaaacatagtggttggaagcctgagaagatgggctgagcttttggcaattttataacaaggaaaaagacataaatttgagctcaggacccaccaggaaagggccacggtaaacacaccaaaccttkggtcgggatcctaaagagttataccctcgctgtaataacaagagacagtccagccttcacaagagtggaaactcagcttcaggccatttcaattcctagtttgattaaagtgatcagtccctatctatccaatttccagaagcaagagaaaatgttctctggaggaagataccattatctagagtctcaaattaccactatgattatttcaaatactcatataaactctcagacattcaaacaaaatagctaagcatacaaaaagaaaaaacttcaccaaaagccagaggggaacaaatggaaataaatgcacaggagatctgtctaatcaagttattcagaaacagtgattaaaataagtctgactgacaaattcaaggaacaaaaaggcaagatggagaattttgccagggaattagaaacaataaaaaaattcaaatagatattctgaaacttaaacaaaataagagtaataagagtaaagaagaattcagcatatagtttaacagaatacaagacacagctgacgacaagattgaggaaactacaaaataagttaacaaaaaaatccaaagtgaagcataaaaagaaaaaaataacacaataaaacaaagcacaaaagagacatatgaaacacattctcccaggctcttacacatacatgtaatctgagttccaaaacaagtgaaatagactaagaaaagcaatatttaaagacagaatggctgataatgttacaaaatcaatgacgcatacacggccaaaaaaagaagtatcctgagccataagcagaaatatgtatgtgtatgtgttgacatgtatatgtataaatgtgtgtgtctacatgtatgtgtgtgtgtrtatatatatrkgtgcaagctacaagcagaaatgtacgtttgtatatatatatatatatttatgtctgtgtgagccgcaaacagaaatatatatgtgagtgtgtatctgtatgtgtgtatgtgtgtgtagatacacatatatacacatacatgtcaaagcaaggcacatcagagtaaaactgctaaaaactgcagatagttttagaagtagttagagaccagtagctacaagactgatagttatacctctcaggaaaatgatggaagccacagctgaaaamaaataaaactttcatcttagaattctatacctagtgaaaatattyttgaaaaataaaggcagagaacaaaaattttaagcaaacgaaagctgctttttgtttgtcacctacactacacctagtgtcacgtatagacccacactagaggaaacactaaaggatgctcttcaggcaggaggaaaatgaccttagctataaacccagagatgcagaaagtaacaaagagcaacataaagggtaacgacatgttaagayccaaatggtaagagtgaaatctgtgagttttaaaatatatagcaaaaattactatatcaataataataacaatgcttaacctaggaggtgagtaatggaagcaaagtatcctaaggttcttgtcttctccaggaagtgatataatactgatttatattagattttaataagtcaaagatgcaagatgtaaatctctacaaatttaaaaagctaatggagaagaaaagcagaatgataaaaaggcaagaaaggagagaagatgactaggtacagtggcctgtaattctagcaccgtgggcggccaaagcatgaggatcacttgtgaccagcttgggcaacatagcaaaactctgtctctacaaaaattaaaattaaaaaagaaatagccaggtgtggtggcaggtaccggtagtcccagctactcagaaggctgatgtcgagggattgcctgagtccaagagttcaagggcacagtsagctatgattatgccactgcactccagccagagtgacagagcaaggccctgtctcaatttaaatggaagaaagaaaggaaagagaaagaaagagagagagagagagaaaggaaaaaggaaaagaaaaaagagaaagaaaggatagaaataagggaaagaggaatatagaataacttaacaggaagccaataataaggtggtatatttaaacccaaactcaaatatatctgtcattacattaaatataaatggcctaaagatggcaattaaaagaaaaagtttgtcagactgaagaaaacataaatatacatatactgtccttaaaaaagaatgtacattatgttttataccttatttaaacataagcataaaaaaagtaaaagaatagaaaaggtatactgtataacacgggccaaaagaaatctgatatagctgtactaatttcagaaaaaaaagactctaaagcaagaagcattacaagagaaagtgctgaatatttcacaatggtaaatttcaatccaccaagaatacatgacaattctaaatttatatgtacttaataatagagcctctcatatatgtcaaaaattgacagaattaggacaataaatagacaaattcacaattataayggaagattttaacatatccctcttagtaacagataaaataagcagacaaacacaaagtatatagaagacttgaacaacttaattgataaactgaaaataattgaatatgataaacactgaaagcaacagcaaaatatactcaagtacttcaagaatacttaccaaaactgatgatttgcaggggcaaaagcaagtctcaatgaatttcaaaagattaaaattagaaagtatgctctttgaccgcaatggaattaaattacaaatcaataacaagatcccagaaaattctcatttctggaaatatatgtataaataaataagacattatggctcaaaaaattacaatgaaagttagaaatattttaaactcggtaattacaaacacatatacaaacttaaggagtatagctaaagccatggttaaaagaaaatctatagccttaactacatatattaaaaagaagaccaggcacagtggctcatggctgtaatcccaggaatcggggtggccgaggcgggtggatcgcttgagcccaagagttygagaccagcctgggcaacatggcaaaattccatctctacaaaaaattagttgggcgtggtggtgcacacctgtggtcccagctactcaggaggatgatcatgccacttcactccagcctgggtgacagagtgagatcttgctccaaaaaaaaagaaagaaagaaaaaatgatgatctaagcatccaagatgatctaagcatccattacattaggaaaataacccagcaaattaagcctaaagaaagcagaacgatggaaataaaaggagaaaggagaaacttataaatctaaaacaaacataaaatacagagaaaaaaagaagctaaaagtctgtcaattgaaaaaactaataaaattgataaagggctagcaagaatgacagagagagagacagagacagaaagagagggcttgaacaaccaatatcagggatgaataaaaggacaacattatgccacataaaagcataagcaacaaaagcaaaactagacaagtgaggttacgtaaaactaaaaagcttctgcacgttaaagaaaacaatcaagacactgaaagggcaagctacaaaatagtaaaaaatacttgcaaacctcataactgatagtgttcatatccaaaatatataaggaactcctaaaacccaatagcaaaaaaaaaaaaaaaaaaaaaaccacagattttaaaaacaagcaaaggaaccaaatagacaattctccaaagaaaacatacaaatagccaagtgtatgaaaaggggctcactgtcacwaattctcaggaaaatgcaaattgaaaccacagtgagatgtcacctcacacctcttaaggtggttctcatcataaaatgaaagataacaagtgtggttcagggtgtggaaacaagagcccccttatgcgtgagaaacttacattccttagtggaatgtaaattggtgcaaccattatgaaaaacagtatggaggttcctcaaaaaacgaaacaagaattaaaaattgctggattatgatccagcaatcctacttctggatacatatccaaaggaactcaaatcaggatcacaacaatatgtctgccctctcatgttcactgcagcattattcatactagccaagacatggaagcagcctaaatttctactgatgaatgaatggataaaggaaatgtggaagacacacacacaaacacacacacacacaaacacacacaatggaatattattcagccttaggaatgaaggaaattctgctatttgcaacaacatggatgaacctgaaggacattatgctaagtgaaataagccagacacagaaggacaaatactacatgatacaatttatatgaggaatctaagacactcaaactcatagaggcaaaaaatagaatggtgtaggcaaagggctgaggggagagagaaacaaggaggtattagccaaagggtatgaagtttcaggtacgccagatggaaaagccctagagatctaccatatagtactgtgctcatattgtatcatgtacttataaaatataatggtttcacaggtatatacttatctccaaacttatcaagttctatacrtcaaatacgtraggctttttgtacrtcaatcatacctcaataaagttgtttttaaaaatgaaaaataaagaaaaggactacagatcctatgaaccctaagaagatcttaagatatggtgaacaactttataccaatgaatttacaatacaggtaaaaaagacaaattcctagaaaaacactacaaaaaaagttgccacaagaagaaatggaaaactgaaaaagttctgtatatttaaaaaatatgaatctatattttaaagtcatctcaaaaaaggggaaaggagaggaggggaggggagggagggaggaaaaagaagaggcagtctaatccagagcttgaacaccaacccattgctctaaactaaaaaataccatattttgtaatctgtggtggaagaccctatagagtacagtacaataacaaagtagtcaattctactagagaaggcagctatgcaattcagccaaacccatgtcaaatggccataaattattgtttacaagataatgttaatatgcacgcaaaatcagcataccgttatcttcctgacatcaccatgtgaaagagcctagtaaagttcattcattcatatcactcccacaggcctaatcttcatagaaaacagtctatttatacagaatacttctcaaggaaaatcagcatagcacagaggaaaactcaagttggacacacttgtgttgctgccagttctaagcacgtacaagctgtgggatctaaggtcacgccttgaacccatgtgaaactcagttatcgtttctgtaaaatggggaataagtggtaaacatatattgagagcctaacataatcatagtaggtggaaaacaaatgttagttgcctgctttttgcaaaatccttggtgtcctatgcctcttmcccaattcgtacgacctaccaaatccagcacagtcactatgactaaaaaattaaaacttgctcctagatgtgctaccaatggtaacccgagggctgaatgactttaataccaaccagaattcaaagaaatcaacctcgggctccaccattccgtttgtctgaatatggactctggagcacaatttaacctcattgctgagacaacctgaaattatttcttgagattttgccaaatcccatattccaaaatacttacttattacctaaagatgacctctgatacttaaatcagatgctgaaataatgcacaaaggatttcaaacctgaagtatttaacacctaaatccatttgactccccttgggtgtgtgggtagtaaaaggtttttgaagctgtatctccaacctttaaagcaagacgacaataatctcaaatttactcayttttacctgtgataccaatgtcaccccttatcaccagtgagcaaaagacacctagatcatttggggaaaatgagagaagtaaaatgccaggttttgtagcccagctggctgggggcaggcaccgaacaaagtcttgctgactgatctgccccatcaatcaggctaatgagatgccaacagccatatgcaagcaacacagtgaccaaacacaactgcatttgtgagcccgggacttcacacacccagaagatcttggacggaatggtggactgtgggtccctttgaaatttccaggtcaaagcaatgatcaggaatatctttcttcacagtttcatcacagggtattaaaagaaaaaaaaaagatgtmagagagtggaaatgagagtaaacaattcttagtcattcaatagcagctacgtttttaacagattgagaaagcatcgatataacacaaggccaggcaggttccagaacttgattgattgactgattgactgactgagacagagtctcactctgtcacccgggctggagtgcagcggtgcaatctgcaacctctgctcactagaacctccaccgcagggattcaagcgattctcgtgtctcagtctccccagcaactgggattacaggcgcgtgccaccacacccagctaatttttgtatttttagtagagacgggatttcaccatgttggccaggctgctctcgaactcctaacctcaaatgacccacccacctcgacctcccaaagtgctgggattacaggcgtgagccaccacacccagtacagagctttatttatccagtttctcaggtaagctccttgagccttacaccctccaatctccgtatttcgccagactagcacccagtaggattcaataaatatctgctgaagaaacaaatggttcttgcagactgctaataggctgcagctctggactattttaaaacaatccaggctgtttcaaactgcaacacgatggccctcttccttcctttataataatgaataaatattaaaatcctgcaaagatactgctcactgtagttttgaatgatgctaccaagaaatctgtgggggaaaagcaygccgtttttctatcarattttattttcccaaacaaacctgttaagtcctgctatctcacttgacaaaataacccacggcaaaggactttttattaccagaaagggcacatctgacaagacagcagcaacaggctacaggctcaagcttccaccctctctcctttagagaattcctgactgtagttacgggtaagccatctgtctctgtgtcttgtgaaattacactctggttcttacatcttcctttatctaagcaatgcattacccgttgctagtctacttttaaaagctgcaatagacaactccattttcttaccctttacaattgcctttggaacagaaacaaagcgtggctatttcaaaagatgatagtttaacaggaaggacaataacacttttatagtaaaccatatctctagagtgtggagttttatataaaaaaagcttaataatgctacctactgttaaagtcctggataaaacccaagagaataacatccctcactcttgtaatactgcagctgacggccagtttaattagctaaatgtagtagtgctaagcctattctgcacagtgccaaagtttgtgcaaaataatgaaggcaatggtttactaaatttaataacctgattcatcttataaaaaattaactttatgacaatgtttaaattgaactagcttaactgcatggagatggcaagagtgtgttcggaagaatatgtaaacctaataataccaagaaaataaagaaagacgttttaaagcaatgaacagcatcagtttttctagcacttgttacatcagatgcaatcagaaaaatgacgtggccatggaggcttaatagctcactgtcttgggttttaagctttgaacacaaacattcaagttctatgaaatggaaaaggtgcaaagtaatttaaatacctacttatctkatactatcttacatagttttcactctttagaacagaggtcacaaactgatgatcagaggacaagtcaagcccacagacctgttttgtgtggcccatactttcttcccttcccttccttccttccctttcccttccttccttttctttccttccttcctccctcccttcctccttctctcctttcttttctcctttgctccttctttctctctctcccttccaacctctcttccttccttccttcctaatttgaattagttgccagcattaaaacattggggagatcacaggtccaaaagctagatgtgtagcttctctgaaaaagcttacaccactgggggcccaatcccacgtrgtgacaggttagctgagaagccactgtcagctagaggtggggtttgggctttctagttggtcatgttgaccatgatcatcacccgtgctgctggcattacccgccaggccactgcaggcacttgatgctcagtgcacattatycaggaaacatccttgctacagacatgactcaagccttaccacaaaacaccctcagtccataygttcacaactcaatcaccgaatctcaaagaacatctcccactgatctggttgagattttatttaaaccatgtcaaaccctactmtgtcaagtgtgagactattaggatgctagctatgccttggaaaaccccgcagtagcacttggctttgcgtggacagagaagcacaagggtagcaggctcagggatctgcaggagcttgaacccatggtgcaagctcccttgcatttcacaaatgtcaytgagtggcagcagaacctctgggccaagaactttactggaaggagagataaagacgaaacagacaagcaaaaaggcagggtgcttggcaaaaaaaaaaaaaaaaaaaaagatcaaggattggggagcaactccgtgtaaataaatcacatgaatacaacagagatgaagctccatgaagcaagcgaaaactgtgggactcctctgtaggcagcgggagcctgtggatttaggcagggagtaaacactatgagttattattcatattattattttatccatttacagtacctccagtggtcacaatggactcgctcaagatactgtggccttgtgaccagccagaaatggacgaggtgccctcttatcccgagcagctcaaggtataaattagaaaatcatgtaggaagcaaaaaaaatctacaaagccagggactgcctaagtctaggtgtccaaggtgccctgtgggccactggtgagcttggcaagttgtttacccagacagggaacacaaagggagaaatggcttgggcatggtggtggagagcatcggagcaggcagccgcacaccatgagactcactggtaggctggacaggtggggacagtcgcccacagaatcctcaggcacaaaaaacatgaaggtgggaacyctgtcccctcaaatactgacaaagctcccacagaggtaggagctaagaaaaaggcagcttctttccccgatgccaggaaggttccttctggtttaagttttttaattttctccatattgtggatgtacttgggcagtgtccccatttactgtaaattatggttttaattatcatttttattaagacgcccaaaggagttggggcttacaatacccgtaatttctaatgggtggttattattaatttataattgtgaaacactggggacaaatgttacttgtaactgggcacaattaaaaggccacagagatggtgatttccagccccctccagccccgccccacaaacatagcactaaaacsatctttaggaaccaatcaacaagttgtagaatcttccagcacacatcctctccctccctggagatctgccattatgcataaagcaagaagataggcctaatgtctttcagcttgggttagatttggggacaatgcaaatgtggggactgtttttgtattaacagactactatctttaaggatgagtttctcctatatcctcctaaaagtaggaagaccatactttccaaactaatctgattaatgtaaatgaaattacagtgacatgacattgacgatgatcttgaaatccaactcccccacaggcatttccagatgaagttctaagawgtacaccacgcytatatgctcaatgccacatctgcaatgactagctaatccatacctctgtttctgtagttactttgattacctgaatgatcacayttgcctcccaggccatttcaattacatagttctgagttccaaagagttagagatcgtgcttactaaacacgatccacagctgccaaatcttaagaacttacaaaactacacaggtctctctagagaaaaataagtcatagccagccctgctttttaaaagtatgtgttatatacagcaagcaacaaatccctacagagcttcctaaatagccctaataacataaatacatctcaaatatattaatcaaaaaaaacataccaactcaagaagtgggaaacgggtcagttcatgtggaatatctttaaaatacaccaggcggcatctgcatgctttgggcagtacaaggctgaggccgtaatgttttgtaaagctgtacaataaatcccagttgactgcatgagatctctcgagaggcaagactgaccccaggctggctactagtgctgccactgtgctgggtgaataagttctcatttaacctgccagtgacagtcctggttaggaatgagtgagaaaaatgcccaaagattacaattaacatggtcctagacaggcacatgcagacagattctacaagggtaactacattgagcggcagtcctgtcggtaaagatgtggggcaaccaggcaacttcatagattaatgagggatgggggataggaaatggcttaacatatttgggggcagttgggacatagctatcaaatttgaagtggacatgctctttgacccagccacaaccagaaatttatcctacaaatagacttgcaaatatgtgggagkaatattcagtacggcattatctacgacagactgcaatcaaccaaaatgttttatcaattaggttatataaattatattgcatgaataggacaaaatactgtgttacacctaaaaagaatgaggagaaatgatacggagatgcaaggaaacatttccatgttataattttttttttttttctcttgagacggagtctcgctctgtcgcccaggctggagtgcagtggcgcgatctcggctcacttcaagctcygcctcccgggttcacgccactctcctgcctcagcctcccgagtagctgggactacaggcgcccgccaccacacccggctaattttttgtatttttagtagagacggggtttcaccgtgttagccaggacggtctccatctcctgacctcgtgatctgcccgcctcggcctcccaaagtgctgggattacaggcgtgagccaccgcgcctggcctccatgttataatattaagaaaaaaagtcaaagtaccgaacagcgtgcacgtaagacacaaaagtggttaaacaggtgccaacattgattactgcaggagagagttaccggttgggggcaggaaaacttcttgtgcatttcataatgtcgacgctacttccatttttaacacatgcatacatgcctgctataggaagaaactaaaaataacaaaccaaatgctatctaattgataattcatgrgcctttatgaattttaatacagagcaatcaaggcaagtgagaaaaaaagggaggagcctattcctattccaaacaaggtatttcctgagcatcctgatttatacaaaggatgctgtaatgtccaggtaaggaggagcacttcagagtgttactcttggctgggtaccacgccatgtgctttatgaaacacattaactaattctaaggtgttctctacagaaaccctataaagtgtcattgtcatttcatgtaagagaaaaaccactgatccccaatgttaaggaactcacaagatcagagggcaaaaaagggggaggaccccaatgggcatggtagcctgacttcaagcaggtgtaccccaccatcaggccccccamactaccacaatcaccatgtgactgtgsatttgtgatattgtgatataataagaaatacataytgggtcttcatccaggttcctggcacagagctcctaaaatccttgaaattggccaggcatggggtctcatgcctgtaatcctagcacattgggaagctgaggcaagaggatcacttaaacccaagggtttgagaycagcctggacaacacagtgagatcccatctctaaaaaaaaaaaaaaaattgtggagcacagtgccatgcacctgcagtcccagttactcaagaggctgaggtgggaggatcacttgagcccagaagttggaggctgcagtgagctatgactgcaccactacactccagcctgggtgggtgacagagcgagaccctgtctaaaaaaacaaaaacctttgaaattttctgagcaatgtgggtgaggggagagtcttttattattcacaattagagagttgtgaataattgataacccccacattccccgccttgggggaagaggaggggctggagattgacttaatcaccaatggccaatgatttaagtaatcatgcctagggtaacaaaacctctctaagaatcctaaatggagaggcacagtggctcacacctgtaatctcagcactttgggaggccgaggcaggaggattgcttgagctgaggagttcaagaccagcctgggtgacatattgagacctcgtctctaataaacaaaacaaaaaaacttagccaggcatggtggtgtgcaactgtagtcccagctactcaggaagctgaggcaggaggatggctttagcctgggaggtcctggctgtaatgagccatgattgcataattgcaccactgcactgcagcctgggcaacagagcgagaccctatctcaaaacaacaacaacaaaaacctaaacgatagggtttggagagcttccagattgctgagcatgtggtgcctggagaggggcatgccrggagggggtatggaagctccacatcccctccgcatgcctggccctatgtaccgcttcatctgtactctttgtaatatcctttatcataaacaggtaaacataagtaaatatttccctgagttttatgagccattatagcaaattatcaagcctgaggagatggtcgtgggaaccccaatttgtagccagtgagtcagaagtgcacttgacaatcttgaacttgctactggcatttgaagtaggggatgatcctgtaggactgagccctcaaccatggggtctgtgctgactctgggtcgttagtgtcaaaactgaattgtaggacaccaagctggggtccagaaaattggagaattacgtaaaaggagggaacactccacacattkgtcatgggaagggctctgtatgagagaagaggaagacacagtgtttccttcctttagggttaagagcacacactagaagcagctcctkgaggcaggagaaaccagcctggaatgcccccaccaggctcacaccccacagggtcttgactgtcagtcaaatacaaatcatgggatttgccatctattctctgtggatattaygagatataggcttctcatatgtgtacatgcttggcatgtgtataatttaagctaaacctactaagcagctgtcckgaaagagggagaagtggtccaaataccacctgtttcatcaacagcctaccagtgctcccttcggtgtaatcccatcaaggcacagaattgaggtctcttcagctactgtattacataaacctacctgctgtatggaatccattcccagacagtgatgcattggcaaatgttcttctcttttacttgatatttcatcttggggctcagaattaacactgtcctttgcttttacaaacatttatctgtaagggctgtgagatgggatcaccagtccacaggaataagtttctctctatgttcttccaacatcaatagtttacaattatagacttaatttaaccccacttctatacttccaaccagtaaaaaatgatctttacaccatgaccgttacaagttatactcaattttttttctttaatttccaaaagtcttcactgtcaaactttaaagaaccaactgtattaacgtccaacacaaaggccagccaggcacagtggctcaaagtataatcccagcactttaggaggccaaggcaggaggatcacttgagcttaggaattcgaggttacagtgagctacgatcctgccactgccctccagcctgagtgatggagcagattctgtctcaaaaaaataaaacataaagaccctcyaccaataaaaagaaagtaacaccgcatgaaattttttgtaatcaaaatatacatggcacttttttttttttttttttttttttttttgagacggagtcttgctctgtcgcccaggctggagtgcagtggcgcaatctcggctcactgcaagctccgcctcccaggttcacgccattctcctgcctcagcctcccgagtagctgggactacaggcgcccgccaccatgcccagctaattttgtgttatttttagtagagacggggtttcaccgtgttagccaggatggtctcgatctcctgacctcgtgatctacccaccctggtctcccaaagtgctgggattacaggcgtgagccactctgcccagccaacatggcacttttataaacttgtctgagaaccttaggaagaaaaataaaacagcacaaaataaaacataaaaaatttaggcctcctgttaaaaaaaaaaatgtaatggagctttttagaggcagagacctctgtgtcttttaaaggttctcaagaagacacagctcttttgctccctttcttcttaatacaagaaagtaacaattgctccataattccaccccctacacgtgctgtctggcccaagttcatgttcttcagagggcaatccttttgttaactaascaatgacacacacaggcatgcgcacacacgtgcacacacacacccatggtctcacttcgtataattctgtactcacactcctatctactaagacaaccaaagtgtttctggttgtttagaagtagaaagatttatcctgaagtttggccttttttattttgatgaattaatttatagccacttcaagagaagaagggaacccaactctgaatttgtaagcacactatattctattactgaaygtgtctcattgttttcacagctggtacaggatttcctttcaccattgaggcctccgttactctttctcgtctgctcgagacagggttctttatgatttagagcaagcaggccagccaccaggattctacacgcacacactcatccaaagagaccccgttccttgactttcttaatgaccaaaagggctgtgatccctcttggcaacatagtttccacccctgtcaattaagaaatgcttaggagggaattgtttaaaaaagaaaaattaagaaaaaaaaaaagaccttcattccattgccagctctcagaaatgaaaaagccagccccatcctgcactgtccatgtggacartgtgctacctttctaattcaagcaccttttttttwwwaaaaaaaaaaaaaaaaaaaaaaaggaagaaagaaaaagaaaaattcagattgaccttggctctcaccattaaaaaagcgaaaagtggtatattactttgcctcttgaaaagactaaagtctttatgctaccaaagtcacgtggaagtgctcaaaacacaatgttgggaaaattcagcagttttttgaggctcacttttaaagtgtccaaattgacttttcattctccatcgctagtaactttttaagacgcaacttttcaaaaatatgacttaaattcaggcttcraagctacatcaacggccagagttccattaactctgtgctctgtgggctcaccatcaccttgcctaaaatcaatgactcctccaactccaaaccggacatttattgtgattggttaggaagtggtactcaaacatacaaaaaagaggcaaaatgtaaaaaactttaaagcaaattgagtttaatagaaaaacactaaattaamggataatccttaccttgtagttgcttttttaaaagtatctctgataatcaaaaaaaaaagtatctctgataatctatgtaaccagatcactatcttagatatctttaagataattactttttaaagttttgtaaaatctaacagtggcttgtgtgtgtttgttactmttgttgttttggtctttaaaaaaataatgctgacaccatctcaattcacactgataacatttaaagcaagccctaagtttctgcttctgtgagttttcttgcagtggtcaaatatccacaacagtcccgcgtggaaggcaygggcaatgctagctttaaaacaaggaagtaaattrtactctttacctcacttctttcacatgccaggatgcacggaacaaaacacaccgaatcattgcgagtttgacctttttggttataacatattcagtgattacagcacccaggttcccacagggcatacaattggtaaaagaaattctccatcactttttamgctatctgagaagccatctgagcttgaataaaatcagacactcagaagggagagctgggaaggagttyttcatttgataacattttgtttggggataccatgatgagggacgggtgaaatacaccaattttgaaatctatacctctcaggaaacgtgtaatctaaccatcagctgtgatcaggcacctgcttgtgtgaatgtgagggatgcacggaggagcttccagctgaggctgattttacatgacttctggagactcgacagctataaatttttgtttcattcccctcaccccgctgctgcttctgggccaaaaagagggtcttggtaggatccccaacataggtaatgtgaacattgtgactaggatcaatttaaattcaaaaaagagaaacagagagagaaagagctctgagttggtgaaggctttggaaccctaacagaggattccaacctgcasggcttsccaggcagagggtcttgtcagcagcgggagcctaagcacttgggaggcaagtactccccaaaagatcccaacagagattctccttcctagagtaaacagcttatggaagcatgcgcaactagaattgttatctggctcaaagctgcccctaagcacacaccattttagcaaacaccattttaaagtccttatcagggcaagggggacttgattttcttcagtgctttgagacagatagggaaaaggagataaaatcaacatgaaaccaaacaatttcttggaagagaaacagatcaggaatcttacgattctyacgagctgaactgctcccctgccatcccaaactcatacactgaagccctaacccccaacatgactgcatytggagatggggcctttatggtcataattaaggataaatgaggtcataatgggggagccctaatccaataggactggtgtccttatgaaaaggggaaatctggacacagcacacggtgaggagactatgtgaacacgaagaagcctrctgagatggttratattgagtgtcaatgtgattggattgaaggatgcaaggtgctgttcctgggtgtgtctgtgcgggtgtttccaaaggaggttaacatttaagtcagcggatgaagagagacagacccaccctcaatttgggttggtaccatctaatcagctgccagcgagccaagagaaaagcaggcaggagaagatggaacaacacacttgctgagtcttccggcctttatctttctcccatgctggatccttcctgccctggaacatcggactccaagttcttcagcttttggactcttggacttacaccagtggtttgccaggggctcttggggcctttgaccacagcctgaaggctacactatcggcttctctatttttgaggtttgaggactcaaactggcttccttgtccctcagcttgtgattgtgggagtcaatactccttaataaactccccttcataaatattaatgcacctatcctattctgcccctctagagaaccctaatacactcatctacaagccaaggagagaggcctgtaacaggtatctcctcccagtcctcagaaggaaccaaccctgccaacaccttgacttcaaccttctggcctacagaactatgagacaataaattttgttgtttaagctacccaatttgtggtgctttgttacagcagctctagcaaactaatagacttaacttctgtgaacctcaatttcctcatctgtgaaaggggaataataagatgtactcttaagagctgttaggaaaattgaataaaataactgcagagctcttggcaagcagcaaattcttattaaaagaattatttcaaattttaattattaaaagaattatctttgccattaaaagtaacggcaggccaggcacggtggctcacgcctgtaatcccagcactttggtaggccaaggtgggcggatttcttgaggtcaggagtttgagactggcctggccaatacagcaaaaccccacctctactaaaaatacaaaaatcagccgggcatggtagcrtgcacctgtaatcccagctattgggaggctgaggcaggagaattgcttgaacctgggaggcagaggttgcagtgagctcagatcgcgccactgtactccagcctgggcgacagagtaaaactccatctccaaaaaaaaaaaaaaatatatatatatatatatatatatgtgtgtgtgtgtgtatatatatatatatatatgtgtgtatatatatatatgtgtatatatatatatatatagtaatggcaaaaaccacgtttgcaccaccctaataaaacatcaggctatcaggctatccagcttattaattattgctacattagctaaaaggctctccatgtgagctgtatctcagattctcccatggaaacctaaaaatttgtactgaagactaaatagaataaatgaatcttaacttctccagctgtgctattcaactattaatcattagtgccccagccactaccgaaaactatttaaaacagcttgtaatagacaattgcatacaacccagggttttaaaataacgcaataatcagtagtaagactgacaaattgcctgagccaaggggcaggtggaaaatttcttacagatgtgaatattctattatcttgactggggtggtggtttatgtgtgtgtacacacttgtcaagaccttcatgtgtatgatttaaatgtatgggttttacaacatgtaaattatgcttcaaaaagttgatttttttttaaagtgaaaatgtatccccgtgttaagaaaaagaaagctgatccgaaacgtgaagtgagctggttacttaaacattttaatgtttaaagttctgagcttcctggcaaccaaggtaaggaaacgaaatataatactttataatgtcctcctcattaaacaaccaccaccaaaaaaaaaaaaaaaaaaacataccaattcttttagaggaatgagctttgttttcttaataattctgaaaacttattagaggaatccttatataggaaacatgttaacagaataaaccaggggttgccaaactttttctgtaaagggcaagagaataaacataaatacagtaaataaatgcagtaaatatcttgggctttgctggccatagggtctcacagctactcaattctgctgttatgatgtgaaagcagccatgggcgatatgtaaacgatgagcacccgtgttccaataaaacctgatttacaaaagtgggcctcggggggctggatttggtccacgtgccacaatctgacccttcgaatagacaatatccttttaacattcggttctaaastgacctgaagcaaaacaagaactaaagacgtgaagatgaccttgayctgtagattttcactgcaagaaaatgtgaataattataacagcaagttcagaacccatgtggatgacaaccacagaaaatttaattttagacaatttacaagtttctatgaaagcagatataaagagaatctcattaaaacaaatataaaacaaattttctaagtattcaatatgcatcaaaatcttattacacagtttgtttcacccagaatttcattcagtgtgctatagctacattggcttttcattgcaaagctggatgtttaactataaactacatcctgcctctccttttgtgtgtaaaactgacaaatgtgttgtttttggattctagaattctggagaaagccaacttaaatgaattaagatgactaatatgttgattctgtttccagtccaacaaaatgtgaatgtaagactccatgtcatatgatgctatgtgttttagttcaaatttaacatcgaatattgaataaggcagtttctaagtaaattactaagctaaaaatattccttcaacatagcaaaaactctatcttgtttaaataagtggaaatttgaacatctttgctcagatcagcctaaataagaaattagaaaaactgtaaacctccattacagtcaagagcattgattccatctttctgtggaaagtagcacaatattgtatatcaaggaaaacgatttatttatttaaagttattcacccacaatcatgatttcacacaaagttcttcctaaatacaacacttgcacaagacgatgcttttctggcatacttgaggaatcacatccaaggtgaatgaccactaagataccacaaatataactgtgagaatgacaagtgtttttgaacacccagctactagggagtatctagcatttctagttcttttgcagcttgataatgtttttacaaatgttttcattgcattaacttaacatttggctgaggagttcctgtggctataacacactgctacacagttttgttttaagtaaaccaacattagtttttcattacataataggtgggtaatttctatttccacagaggcagtaactattttgctttttaaaaagctgttgaaagtgttgcaaagcctcaactcaattccataaatattgaccatgttgcttccataaataagactcttagatgttcacctaattctaataacaaatatttctagttttcttaaactaattatatttattgactaccaaaggaagcattttaataattaccttcattgtgaaaatcaaatctgttatgagataataaaatgaaggaaatcagttagggagcaccatctttaaaaaaaaaaaaaaagaaatttaaaattttataaggaagaatttagaaatccagggtctagaaatggaaactacatagaatatatgtattttgcccctagctcttagattcaactatgacaggctgtcagtaactgaattttttttccattacctgccagttatttaggaaatttccattgtttagcaccgtataattctgaaatcaatactactttattaattacacactgataaatttctatccaaaaaaaaccattacaatgaaaaagtaacaaatatttctatgcatatttttattcctaatcctattcaatgaatttttatgaataaacacactctctaaagcaagtatgtgtatttaatggaagtatgtctacgtaactgctactaatgattacaattcccataaagtgtagggatttcttaattcagtgtctatgaacaatcctttcctcccctacaaaattgtacacaaatgcctggctaggaatacatttatttttcccttgtagaatgggccagaggttccactatattctcaaaggagtacaggatgcaaaaaaaaaaaaaaaaaaaagaagggggatggtggggttgacatccagtggtctagaatctttttatttaagcagagacctgtgaaaacactatttgttccctttaaagataaacagaagtgttgtatacttgacaaaacagacagaggcccagaacctgtccatttgtacaatcataccatctccgcagtggaaatggactttaaccatcacaaacccaaagccctgctcggcatttaaattgcctctgcaacatcctcactaagcagccaccaagctatgcttaaacacctttgcaattcgaactcacttgctcaaggcagcttgctctgtgatccaaaagcaggcaatccccccttggttcctaatgtctgatgataacgaggcaaaagaacaattacttctgaaaatcatgctccataagaaagtaagctgcacgtaggcaggagcactttgttcactgctgtaatcaccaggtcctagagcagagctgagttacatactagaccctcaggaaatacctatttctttcgaatgacttgttgaatgattgctatgcatctggatagcatcaatgataaaaagcaacatctcttttatagcacagttgctattggtctaattgtgtccccccaaaaagatatgttgaagtcctaagcccagtacctcagaatgtcaccttacttggaaacagggcctttgcagaggtcatcgagttaaactgagggcattaaggtgggctctcacccagtaaaactgtcacccttagaagaagaggagatcagaaaacagagacaaacagtaatagagggaagatgatgtgaaaagatacagggagaatggcttgtgcagatggaggcagagactggaattaccctgccacaggccaatgaacatctagggcyaccagaagctgaaagaggcaaggaagggtccttccctacacattttaaagggagtatggccctaccaacaccttgatttcagacttctagcctctagaacttggaaacaataaatttctgttgtcccaagccacccagtttatggtactttgctacagcagccccagaaaactaataccacagcagaaaaggctaaagccccagaattcatcaaactgggactcatttatagtcccatcagagagccttttaactttaaggatacactgtggtagattctgcttactcttaagagacctgagcatggtgcagggggtggactgtatcgggcacctctcatgcaccccttcaaattctcacagctccattttactcaaaccatttttacgcycaccatgcagttttcaaccaacttgacacaaatgcaaccagatggcctcacctggggctacaatatggatccccccatttccatcctagagattctctgactctgcagcatgggatgcctacaagaacctgcttggcacttgcacatgtgcaaacccaaaattctgggacatcaaaacttatgggacgcccttgtccaacggggtcagaagccggtggataaatgccctttattccgcaggcagacagctatgagatgcatttcctaaagtgcctggagttgagcactagttgcctctagtaatgactaactaaaaaacacatttttatattgcctctccttccttcctgaattccccatccctctctttgtaatcacatcccaaattatgcataaatatgtctttttctctggttctgtttttggaggaacctaaggtaagacaaagaactcttaaaacattttcaatacagaaaacttactctctacttttatttatttatgtatttagagacagagtctcactctatcgcctgggctggagtgcagtggcgcaatctcagctcgctgcaacctccgcctcctgggttcaagcaattctcctgcctcagcctcccgagtagctgggattataggcgcctgccagtacgcccaactaattttttgtatttttagtagagaaggggtttcaccatgttggccaggctggtcttgaacccttgacctcatgattcacctgccttggcctcccraagtrctgggattacaggcatgagccaacagtgccagacctactgtctgctttttatacaatgtgaatcattagaaaagcaacaccctctcgccaaccccacccccgacaattctaatcagttaaatgctgcctccttgcagattytgtccattggtcctggttctgtcccttgaagaaagctaggattatctctctcctagatagctactgagagaactaatttacataaatcttttcttctaccaactaaccagccattcactcttcctttaagggttgctcctaggacatgacccaatgactttgccatcctttagcctgtctatgcgccacccctaaatgaacgtaatattctagatacggtctgattggtgggactgtgtacctttctttacaacaaaccatgaaggtttcaaccacccagaggtataaacgggttgtctgcatcagaggcctcgttgcaaatgttaggagttgcaagaaacagttgcatggggggaacatctttgagcagctgtaggtaatagagatgccaaatgatgattgcaattcagaagccccattttgagcacttgctccccactcacatccgtggagtggcgcattaagcacttcgctgggactctcccgcagcgtgctgcacgtggttcttgaaagcttgattacggtctacagcagttgggtgattgctactgaaggcaggcagatgcctggtgacttctcagggtgggctgtccccagtgtgttttatgaccatgcagraaggaaaaataaggaatttaaaaaatcttctttcaaaagatayggattcttatcggactttcattccttagtaaagttgcattaaacccagagacatttattctttaattttccctattctctcatatggaaggtaggaagaatttgcactcaggccccactgaaagataagtgccagattcactcctgtcctcctttcccttttggttttcacatccttattctgagctaaccacatcacgagcacatctttactgctcaactgagttctcctgaagcattayaaaaaacaaatcagttacatgttttaaatatccgttggcaagcatcatagcatggctcttaatctgagaaataatttyaattaaactaaaaagaggtaagtcattgaacacacaataattaaacagcagactgtgctgtcagcaaaactgggctggctcttgcaggattatcagagggactggcgttgtcatgtgatgttttgtgactcttctacagtcctaccatcagctctcgtgaagaggatgcagcgagccatttagacagttggccaagaacagtctgctagacaactttcctcattgcatccattatagaagctgatcagaagaattctcattttccttgagcgaggttctgtttcctttgaacaatggtttgctcacccactctgttcctttcacttcctcttgtgctgtttgtgatatccacacactatggataagatttaggtctaaacggataaggaaaaagacctgctttcatatatcaattctattaagagtatggatactgctcaagtacagcacatagagccatagctttgcaaaaaacttttattatctgttgacaattttgcacactacctaagagctgtcaaataaaacaggccaatttttatcaaactcccaaagtggaacagagaccacaacaactttagaatccctcagcagactgtttcaggaatctaaaacccaagcaaaccctttttccctgtttcatatgacggtgcatcttaacccagctcctttttacctacaaagaaaaacggtaattccctctgtggcggcatatatatgaagtcatccataagaagaaaataagaacttggtcctagacacaaaacaatacgtaaggaaattcctcatggactaacrcaagcggtcagacaccacactagttgctttcattccaccttgtcgaattctcacaactctgtgatgcygacgtcatggttcccattttacagatgaggaaactgagactccggggtgaaagatactgtgccaggccccagaattggcaagctggaaagcatagacgtcaaaacagcacgtctagttatcggagggtgaggattcacaatccaaaagaaaactagggggtggacacacatttacgttgcagtcttatttcccaaggcgtcataattttcatcactctcttattggttgcaggaggaaaaargcatcttctccatttcagatgtgtctttctgggtgaagggatctccatttgcgttaacatccctgaccccctctgccactcacttattcctgctcaagggagctgatccaacttatgttgtgaatggtatgtgaatggtaattccaggattgagaaccgggcacacgcagctctgcctctcctctcctcttacagagagcacacaccctgctctcctgcactgtcttgaacatgctgcatgaatggggtctgccctctgcgaaggtctggcctgacctagcactgacccattaccctgtctaattgtggtggtcaggattagaaagcccaccagctcacacagctatacatattctccagtatcagcttcatgaatgactcaggtgatgttttggtcttccatttgcctaatgggtggtcttactgctcagttaggtagtaacttgggaaagggaaactgtgttatttgatagacctcttaaaacccaaacatctctttacaggttaacgaaccaacctgtgcttagatttctctagtgagagtaaaaagctctacgttcctcaagtctctgtaatttaagaataacacggctacacatttcatttcagtttgaaactcataaacagatgtgatatgacagcactttattaggttttgtcctctagatttgaaagagctcacaggccccatgatgaagactagatccagtaaggtctaaagagagagacatgactcaatgaacaccaaagcagacacccaggaaacagcatcctttgctcaccctgtcctgggaatcaaataagcctrttatgaatctgaatgtatattacaagcaaatactatttttccagctacacgttcttccttgtttcactgtatcacaataattttttaaaagcataggsatatcatgaaatcccttgctttgtagaagattccattataagagtaatcattattgaaccttttagcccagatgtaatttcttacatgttacaacaagtttggcacgcattgtgaatttcagccaaggttgataaagttcaataacttggctaaccaaccatgtgtactactcattatagaagtaataaatagattcatcaaaatggacatgaaaaagccataagaaaatcggatgccatttccagcctgcctcataaaagcacctcttggactttaatataattttatatatagttatcacaactgcccatcattcaacaccaggcatctataaaacaatcacccacccacatttgcatgctgaataaattccagctacaaaggtgaattctctattctagacgtctcaaaagtcacatagaggtacatgtgcttatatgttcaactcccaaaaggactgacaagtaaaaaaggaatcacagaycgacatgtcattttccctgctattatctttttgagtcagttttagtggaaggtgttttttttgttgtttgttgttgttgttttgtttttttttcagtaatactgtcagtctaattattctcatagcctattggtaattgaaaaatttagtagaaagaaaagaaagcctgatttagataaatgtcatggatagaaaaaagaaatctaagttcacagaatggaagaatctcctatgattaaatgtgcagaagtcagtaaagctggcttctataataatatctaaacaacattaacaaaattgaatttagaagatttgaattgaagataacttcagcaactgtatagttaaaaatccagattctgcctactgtacgtcttttatgcttctaaaaggaaactcagactctattagacattcaaggaaactaaagcttcccctccttctcagaaagaaatagtccctcacacttggtaaaccacagtagagctctagtgtcaagctctaaactaaacatgaaaaggcacgtggtacatttcaaacactgtcatgtgaacactttgctaggtaaataacgactcttgagttgttgcacgtgggtgagttttctctgcatcccaagacgggaagcctgagggtggaatctgcatcctctatttctcagcaaggccccatcttcatttacaggaatggtgggagtcaggtttgtctgtattgcagggactgcattgttatggcactgggatttttcaatgcgcaggtgacaccctttctatctgtgcattgcttctgccctctcccgttctcactgtgccatcagcaccatttgtcaccagaaatgtccccaggcttcagtgaaatgctttcttctggattttctctcttgcgtatctatccacagtgggatcaccatatgacaatattaccaatatcctcacactctcctggttcttttcacatctaacatggagaaaaacatagatcaagctttctaaaaccaacgttatactcttaacaacaaggaaaatatctcctgccattaattgcaaacaacacctaaatgatcccaagtttggccaaatattgtgagtttttcacttgccataagcagctcataacaacagtggagtgctttattttctcaacaagttaacaaatgcctgatgtttccaagagcttaaatactataatggcagatattgatgtacagaaattaaagtaaaatatgaaactaaacagagaatgaagagataagmcagaggtgtgctctgaataaaagaagtaatgaaaaggaaaaatttcataccaattgtcataataaaaacaaaggctaaaggcaactaagagaagaggggctcaacggttcccaaaaagacttacagaataggtaaaattcagcaggcattgcgaagtattcactgcaccccaaaaaaaaaatagtctttgcaaagtctgtactattgttgactgcaatgcccaccattaaaaatatggttaaatttctaaagaaagacttctgacagccatccagaaatgctatcaataatagcagatagctttctatcacatggttttaaaataaagccatcctgctagcatgttgactctaaaatccaatgctaatatttgagcaactagtaaagtcaacattaacaatgtttgccatttcttattcgtcacaagggttagttctcctaaccaacatgagaaacacagacacatagagccgtaccatacaaaagcaattctttaaggaaacagtctaggtacattgaagaaaacacatcttagggataatacctgtgcaagaggcacaaaatctcttaagaagatggaaggcatctacagtccattgactgtaaatttggaatcacttatttctaaatgtgacaactctctaatatttttcttcccttgcaagctcagctcagccttgcaggtatctcccttgcttttgtgagctagcttccccaggattctacttctaygcatgacatgcagtctggaggttctagcagtytgatttttctattcattgaaagtcatgagcatttgttcctcaggggttaatttgaaattatttcaggccaggcatggtggctcatgtctgtgattccactactttgggaggccgaggcgggtggatcacctgaggtcaggagttccagaccagcctggccaacatggtgaaaccccatctctactaaaaatacaaaaatcagctaggcatggtggcgtgagcctgtaatcccagcactttgggaggccaaggcgggcagatcacttgaggttaggagttcaagaccagcctggccaacatggtgaaaccccgtctctawtaaaaatacaaaaattagctggacgtggtggcacacacctgttgtcccagctagttgggaagctgaagcaggagaatctcctttacccaggaggtggaccttgcactgagccgagattgagccactgcactcaagcctgggtgacagtgcaagactccatctttcaaaaaaagtaaaaataaataaaattttcactttcaggtacttctcagtttaaacataacacgcggataaggttttttaaaaagcatcctttgaaaagttaaatatgattaaattcttcaatccaaacaagactagctttataaccagtaatacayggcatgtagaagtcactccctcaaggttgatggtgagatcttaatttggctaacccttccattttacataataagaagtaaaaagtttgcttggaatttgtagatccaaataccatccagaaacatgaccgctttccctgcagccttgacagaatgtaaaatcataagctgaagtgacgattctctacttcatgttcaaatactgtgctttgcagctgccaccccatttgagaagctgggaaatggaatggagcaaataagaattatggcaattataaaacctccctggtatagattgtcagattaataaccagcattagcagagctcagctacaccatcagcacgtgagaatcgaagagcycagagctacagggctaagtcgtaayaggagcaaagcaaagaagccaactaaaagaaacccagccagaactgtaaaagaaatctgcccacaaaataaaatgggtaaggctgccactcagactagctactcatttttagcacataccatctcaagagtacataaactgctcaggttataagcatggactggacatcaagatactggatgaccttttaaaaaatcatcacatggccgcatacgtattaacaaaaggcaagcaatggaagcgtgattaatataaattacagaagaagcaattaaacttgaccacagatacacacatttgttcaagctgatggtgactctgcactcactccatacctacygtagattttgcttttctttatagttactcagaagatgcataattggaaataaaggttaagaaaaatcaaggccgggcgtggtggctcacgcctgtaatcccagcactttgggaggctgaggtgggcagatcacgaggtcaggagatcaagaccatccttgctaacacggtgaaaccccgtctctactaaaaaatacaaaaaaattagccgggcgtggtggcgggcacctgtagtcccagctactcgggaggctgaggcaggagaatggcgtgaacccgggaggtggagcttgcagtgagccaagatagcaccactgcactccagcctgggcgacagagtgagactctgtctcaaaaaaaaaaaaaaagaaaaagaaaaagaaaaaagaaaaatcagagactagtagtaagacttaatgagagtgtcattcaaaatagcaaaagttctttttaacttataagaacatatttgctgttagatgtttcctcaagtatgaaaaaaaaaaaatccttgccaggcgcggtggctcacgcctgtaatcccagcactttgggaggccgacgtaggaggatcacgaggtcaggagttcaacaccgtcctggccaacatggtgaaaccccatctctactaaaaatacaaaaaaaatagctgggcgtggtggcacacacacctgtaatcccagctactcaggaggctgaggcaggagaatcgcttgaacctgggacgtggaggttgcagtgagccaagatcgggccattgcactccatcctgggcgacagagtgagactccatctcaaaaaagaaaaaaaaaacattttagtatcctgtacttttaaatacaaatagaaatacagaaataattagaaactacccagagtttcgccagatgtggtggctcacacctgtaatcccagtactttggkaggctgaggcaagtggactgcttgagcccacgagttcaagaccagcatgggcaacatagcaagacctcatctctattaaaaatacaaaagaaattagccaggaatggtggtgcatgcctgtagtccaagctactcaggaggctgaggtgagaggatcacttggcccaggagggagaggctacagtgagctatgatcacgctgatgcactgaagcctgggtracagagcaagaccctgtctcacaaaagcgaatcaatttaaatgttctctagaagcacaaagatcaagctgctggtacagtcacacactgcataacaacacattggtcaacaatggagtgcagatacaacggcggtcccataagattacaacactgtatttttactgtaccacttctgtgtttagatacacaaatacttaccattgtgttatgactgcctatagtattcagttcrgtaccatgctatacaagtttgcagcctggaagcaacaggctatcccatacagcctctgtgtataatgggttataccacgtaggatttgtaagtacatcctatgagggtcgcacaacgatgacactgcctgacacacttctcagatcatatctctgtcattcagtgaagctgactgcattttggtgtgttttgtatcctccacaagggcagggaccctgcctgtttctacactgaagtcttagcacctggtactcagtagtcaataaatgtttgttaattgcacaaaagactgaataagggcgtggcagtggctatgagccagtgagtccaatatcatcacacagttttcattgcagactctaaaccaagctcaagcctctacaggaagcaggcaggtaaactgaccatggaaaatagcctgtgcctgcctacagggggtcagcctataggaacagctctgttcaacctcagtgcaactatgttccttgatagacataagccatagtcagctgaagctgcagcaacaaaatatcatggaccgagtggcttaaatagcagacatttctttaacacagttctggaggcttaaagtccaaggtcaaggtggcagcatggtcacgttcttggggagggccctcctactagttacagatggctgccttcccactgtgttctcacmttcacatagcttaaggaaagttagctacctttctatcctcttctcatcagggcacaaatcttacttatgagggctccaccctcatgatctaatcacctcccagaggcccctgtattagtctgttttcatgctgctataaggacatatcgaagactgggaaatktataaaggaaagaggtttaattgactcacagttccacgtggctggggagacctcaggaaacttacaatcatggcaggagaggaagcaaacacgtccttcttcacatgacagcagtaagagaagtgccaagcaaaagggaagaaagccccttataaaaccatcagatctcatgagaactcactcattatcgtgagaacrgcatgattcaattatctcccaccgggtccctcccacaagacatggggatcatgggaactatagttcaagatgagatttcagtggggacacaaccatgtccaaataccatgaccttaagattagggtttcaacataggaatttttggggaagacataaacatttagtctmcaatactcattctgatttttcaaaactgtcataaatctacatttaagtaaaatatcctgattttagtatgctggcaagtagtctgacaaaaaaaaaaagaaaaaaaatcccactatagaccatttttgtgtggtccatacaaaaaacatctggaggccagatccaggctccaggccaccaaccagttcttacctctgtcctaaaggctgattgggaagctttacccttgagcttatggaaataagcaaacacaaaaatgtccacctcccttaatcactatcacatgacaatggactgcacacacaacggcagtcccataagattacaacactgtatttttactgaaccatttctatgtttagatacacaaatacttaacactgtgttatgactgcctataatcttaggtttgcagcatagaagcaccgagtttgtggtggtccattatagyagcaacaggacattaatacaccttcccaataattaagtaaacatgtaaggaacatacaagtgagatgcaaacatgtgtacactcgggtaagtcaatcactaacagcgtcgcgatgatgacacaccaacaagactagctttcccaaatccctcccggatcaggccagcaggaaataaaaaagaaacactgggcaagtggcgacgctaaccctgggaggaaaaaggtcctcgtgcacacaggctgacagctcccaagtcagcttttcaggctgaaaggatggtatcccttgccaaaaatctgactccacaccctgactgagatgttccccatatggatctactacagagctctctaccttgtcaaacactcaatctagtaactgtacgtgaacttagaattgaaacttcctttgctaatagataaagctgtaacagcatttttaatgccatttggaatgtactgatgatctctcagctgatagaagcttctcaaacctagctgctgaatttagaagccacagctgccttgctgtatcacacagccacacagtaaaatcaaaggcagttggaagacattatattgcaagatacaaaaagttttgagagttcatccttatagccaatggtggctgacacagcggagtctctccatttgaaagagattgattattttcattcttttgctttgtgtgatcaccaggaaaaagagtttctataatcaagatgtggccagcaattctgttgatgttatataagcaaggagcatcccgtttgtgtctgaatccccaatcagtatctaaattcgtgctgcactgtgagcagaagtaaggacctgggcaggtgaaacttaaggcaagcaggaagaaatcgcatcacccaagaactcgcaacatttccacctgtgtaatctcaacacaactgcaacccacagaagtttctgcctctgcaggttcccttcttattgaatcaagtttctgctcctgaatatctggctagagtcagagcctgtcaactttaaatgagatcgcatcattaaaattttagtcatcaccacccagtcaattgcatgacatgcaaccctgttaccggacatccggttcacttcgtaaaccctgaagaagatatttgcagaaacctctccccatatcctaacaacaacaamaaaaaaaagtcaagagctcttattttattctttccattaaggaattaaattactctcttcctccatcttcttccaaccctaatcttccctttaggagtctttcttctataactatgatttttccccaaacgccagcaaccttatattcatacactattggacttcttcattacagcatttcacacattgttttacttgatctgtacaaaacagtatgtgacagagaagttattattctcttgaatttacaaacgaggaaattaaggctcagatggttaagtgacttgccttaagtcacccaagttaaggacaatctgtgtcaaattacagctctcttcctaccatgtccagtagacgccaataaaactgtcctacctttttaagtggcaataaaactatattcaaacactgacactttttggatatgatcaaaaaaataggacagcaaagttgagcatttctacttaatacaccaggcagtcctataaactatcacaaacttgggtgaacaagtgtgctaatgcagaactctcagtaaaaaagatgttaccatgatgcatggtataacggttttaaagaataatagttttccttctctttttcccccaagtttaatatatccctttttgttccttgactgtaacaaaaataacctcgtctcggtggtttttttttttttccgttgattattcttttctggatgaaagctactgacctccagccaaaaaaattctaaaatgttttccttcataccaaagacaagccagtgtctaaagcagttatttatacaggtcattttaggacaaattcacagagattatggcagcctcttgaggatctgggaaccaggaagctaggaaaataccaaactaatttcactggtaactcgatcctcttgcctcccattccagaaatggctacacgttattaaacgcctgcaatgatgagtagacaattccctgggcactctggagttcccatctttaacaactttgcaaagtaggagtactgtccatattgcacagaggtggaacaggagttctgagaaggaaagtaacttgctcgggtcatacagataggaagtggttatcccaggtttcaaaactaggtcacgtctgcttccagagtcagtgttcctstcctacatctttccagatagaaacttgctaccaatgaagcttgccctaactgtcagcgaagctattttcagcaatggtacaatttctccacctgaaagcaggctcatcaaatgagagaatgcatagaaaagctctgaagcgctgttactgtcattaatagaagatctaggggaaatttgcataaccaaagtaatcaaatcttgcctactgtgtcatcttgggactccaccaccattgcaaagccagacaagtttaagttttttggggtattccctccttaaatgcgggtaccaaagcaacagtgcctttgatttgagttgcagctggcataatagacaagatgtgtgcttaaaagattttagtgaagcaaactgaggagttaggccaatttctttctctgtgaatttcctcttgatcacaggattgaacaggtacttaaagtaatagacactttataaattaacttctaagggacattttgaaaattaaatkatagcacatgaggcaagcaatcaattagtaatcgatacatatccaayagtcatgcatataagatgaaagggcaattcgttaaaaaacaaatggcccgacataagaaaagcctatcaatcttgctaatcatcagagataggcaaatttaagtgatattttttaaaaattctaattctcaagtttggcaaggatgctgggcaaaggagcattcaaattggtacaatcttccagggcagtttgacaaaacaaatcaagatattaaggttggggagcaaatcacttcattcagcaattccacttccacaaaataaaactatagaagagtcacggatgggtacaaacatttaattacaaaatgtgcttctccattccacagctattaaaaagctggaaaccacccgaatgtaccacactgggagaagagctggaaccacataatggaatactatgcagccatttaagatgtggagtatttaacaacacagaaagataatcacaatttaaatagaaaaatcacgaaagaagggaaaacatgcttacaatcatacatgctaaatattaatagtatacttctaactggtaagaattggggtttttttaaatcttttattcttatttttatttttcttcgctttctaaattttccataaggaatacatgttaatcacaataacctttaaaataattacttatattaaatgagaaggcacatcaagctaatctagcctaacacctggcatatacaggcgcttgatgaatgctacttcccattcccccagacttattccttaatgtttgttttacaatcataataccaaagtggttttggtaaagaaagcttcagcttttaaaaaaaatttgatttggtagagatggggtcttgctatgttgcccaggctgctctcgaacccctgagctcaagcaatcctcctgcctcagcctcccaaagggctgggtttacaggcgtgaaccaccatgcccactcctaagcttcagcttctgaatccaggatccaatgcagtctggaaatgacatctgccttggccctccccgcagatgccactcccagcacttgaccgggcacagagcgaggcttcacgggtttaaataaattggttgattccaaactcaggattaacaaaatgaatgagctgcttagaaagagctcattcaggagtgtgctgttattcctcccaacaggatggtggcatgtacagtggaaggggccccaggcacagactcaattaccctttgatctatcctgcaggcacccgccgcccaagacctgtatgatctcaagcacgttacctcacctcccttctctttcctttcgacattatcacaagacagctgtaagcacggtgctgagaattaaatatgacaagtacggaatcttcataaattttaaacggctatcaatgtaatacaayatgataatcaataaatacgaatctgtaacaattaagtacattgtagaggtaagggtaaaaatgaaaaacattgtattagctttaacttcagtttctgtgcaactacagaagaaatttgattctgattttgttcctctttatatgaaataaacttcatacaaaaggcttagctccgttcatctggctagttatcctccacctaggtagaaatagtagagacactgaaataggtttcctccccgcccccatctctctgtctcagatctcctcttagagtctagtgaagaaaccttgtcttgctttcagagagcaccatatgactatggcttctaacatgaaggctccaaaaatcacaaaaagtaaaaccatcaagcacagcctggtgagcaaataactcaaagacttaaaacaattagatttaaaccttgtcacacaatgcaacccttcctatgtaccccattcagttaggcttgtgtagactgagaccagctcttcatgaaatgtaccgttatttatgaagccaaagggagatcacaaatttaggcaagaaactaaaagcgagctattggaacctgctttttgatccatctactggtgccttaatttaagacatctttccaagaaggcctcctagtgaccccaaccttattttggagaaggctgaggattcatatctactcatgtataggctacaaaagtccaagaaggtctgtgtcataccaaacaggcaacggtcaagggggtttcaactgtcagcatcttatttattatgaagtctataataattcccagaatcgccatctagttttaacaatttattagataaacaacgaacacactcgtatatgaacaaccaaaatatctttactctggtgaaatagctttgcaatgttacaagtatattcacaatgtttttcaggctcttgcattttcaaaagagaaaaagttgctgaaaaaaaaattatataaataaaagtatataatatagcatattcgtttttgtccccatttaaaaatttgaaaataagcagttttgtaaagccaaagtgtattcctttctgggccaaatttctatttgacagctgaaatatgcgattaatgggctgcctcaaaccataattacacagccaaaacaaaaattaccctccctaagattgtacatggagaacactggctatctgcttcacattaagtagctggtttaatatgatccctcttacttaagaaacatatactgtactgagcccaaaaggacacgttttcttctacagcaagaatgtatcattaataaacaatttaattacaataaattatgtaacactgggtaaggcttgtagcagggggcaagggacactatattcttagaaaaaaacatagggttgcgggtgcagtagctcacgcctgtaatcgcagcattttgggaggccgaaacgggtggatcatgaggtcaggagttcaagaccagcctggccaagatggtgaaaccccatctctactaaaaatacaaaaattagccagacgtgttggcaggtgcctggactcccagctactcgagaggctgaggcagaagaattgcttcaacctgggaggcgaaggttgcagtgagccaagaatgcgccactgcactccagcctgggcaacagaggaagacttcatctcaaaaaaacaaaaaaaaaaaacaaaaaaaaaaaaaacaaaacaaaaaacaaagaaaaaaacatagggtcaccaaggcgttcaaaatgaaccttaaacagaggtattaatacttaaatattacaatttccacttaggaaaaaaaaatcatattattgctaggccagcacactcaaaagcaataatgtcatgaaaacacatgcccttgtgtgatttggcagaacaggctgctccctgaacacaatgggcctttttattaagtggatcccttcatcccyggcattttatacaaacaaaacaaaagagagagaaaaagaaacaaacacgacactagtaacagtcttcagtttgaacttcatcacagagaattagaagacctaaaagatatgttagaaaagtaaaagacattatttaaccaaaatgaaagcaagatggactgagaggaacagaactatattgcaatgctgcctcttttgtttaattatatcaaagggcaacagagccctctagtggaaaaaaataaaaatatataaagatggttctgcttttagattaaaggaaatatgtacaacacccccgggcatggtggctagtgtctgtaatcctagcactttgggaggccaaggtgggcggatcacttgagttcaggagttcaagaccagcttggccaacatggtgaatccctgtctctacgaaaaatacaaaaattagccggacatagtggctcacgcctgtaatcccagctattcaggaggctgaggcaggagaatcacttcaacccgggaggcggaggttgcagtgagctgagatcacgccactgcactacagcctgggtgacagagcaaggcaccgtctcaaaaaaaaaaaaagaaaaaaaatgtaaaataacatcttccattacaatttttattgtgccactctatgatgtaaaagcaaaagatcaaattattttaattgggttttaagtaaaacaatttccaagttttcaagctttacgtaatgctacaaaacctcaagtagaacaaaaatctattattaatttttttaattatgggtttgacccactttgtcattaaacaatagtttgtatgactctcatttgttatgctgacaccataaaaaagtaattaaaatctaaacctacatgcaggcatgaaattcaactgatggcctcatgtgacaaaaaagtttcagttgagatctaatcaggttcacactgacagtagcccccccttatcctcgggagatgcgttccaagacccacagtgatgcctgaaaactggatagtaccaaaccctatgtattctatgctttcacctatacatacatacctaggataaattttaatttataaattaggcacagtaagagatcaacaataataataaaatagaactataacaatgtactgtataaaagttatgtaaatgtggtctctcacactctctctctctcaaaattagtattttcagatgcctgttgacctcaggtaactgaaacctcaaaaagtgaaacacgggccaggcacagcggttcacacctgtaatcccagcatttggggaggttgaggcaagcagattgcctaatgtcaggagttcaagacctgtatggacaacatggcaaaaccttgtctctactaaaaacataaaattagtagggagtggtggtgtgcacctgtaatcccagctactcaggaggctgagacatgagaatcaccaggccctgggagacaaaggttgcagtgagctgagatcacgccactgtactccagcctgggcaacagagtaatactctgactcaaaaaaaaaaaaactgaaacaccacggataaggggggactactgtatacatgattacaaatttattttaaaaatatatataacatacacacacccctattataagcattttacatgagattaccaaattatgagatgatgctcattagaatgttttaaattggtctcttcctttagatatttacttctcaaatactttgatcacgtgatttccatgtacactcaatgtccaataatatctcagtgtaaaatggttaagtcataaggtactaattctcaatttttatataatgtcatttaaggactttgtctaacactgtcaagaatctccatagtttcttagaacaaagtaacttcaaaataattttacttacaatacctgggtataatttagcataagataatagtaggcacaaatgtttttaatttaaaatggagttccaatgcccaaaaggttatttcgattatttcagaatattttcctttccttaatgagcaccaggtttttaaaaagataaatgccaagatcccactagtttaagtctggtcaacaatcagaaaggaaactaatcaggcatttcaagatcccaagtgcaatgatctcatatgagtgtgttttacccatgaaaatgactaaatgtaagttagctatggccccagatttatgggaccttttggaataactagaaaaaaaaaaaccatcaatgacatgctttaggctcaaaggcaaaattta

SEQ ID NO: 94185 - DNA, 12683 bp, Homo sapiens
gcagcgggaagaggcgctcagaagagaaggcgggaaccccccgcctcggggtcctggcggggaggaggcgccgcttctccggagcagcagcgggaggccggcgcgtctcagacctagcagaagtccggagcgtcaccctccgaccctcgctccgcctcccgctaggccctcctgccccgccctgcctaggttgagcatgagcgctggctgaggtgaaaacccagctaggaagctgctggagagcggggaatacgtatagctgcgcgccggctggcacttccgcttccggttgcgcacggcattaagtgtaggggccgagccccaagagctttggaatgaggatgatgtgaagctgagagaagagctggggccacctcttcgacacgcgtacagaaaagtcccgttttctcgcatcccaggtggaccaggatccagatcaatctgtcgatattgggaacgacgccggaccaggaaacccagcgccaagggccgggttggaggcggggactggcgcagcgggcggggcacgcgtggaggcgtcacctaaggcttcgattgcagacagcgggatgctcatcgagtgcttttcttttcttttttaatttctctttttagttttttgagataaggctccggtctgtcgcctaggctggagtgcagtggctcggtcatagatcattgcagcctggaattcctgcgctgaagctatcctcccgcctcggcctccggagtagcttggaccacagttgggcccatcacgcccagctaagttatctttttctagacacttgggtctcactgtgttccctaggctggtctcgaactcctgagcctaaaggatcctcccccctcggcctcccaagcagcttggaccacaggtgtgtgccaccacgcctggctaatttatttttattttatttttatttttttgtagagacagggtctctctttgttacccaggctgatctggaactcctgggctccagtgatccttccaccttggcctcccaaagtgctgggattataggcgtgagccaccaccctagggaaattcttttctgcaggattttctccttgtttcttcaaccctctgcagggatataaacatatttacaaagataatcccgctgtagtcctagctactgcgggagaatcgcttgagcccaggagttcgagaccagcgacaccctgtttgaaagattaacctgatggggctgggggcagtggctcacgcctgtaatcccagcactttgggaagccgaggcgggtggaacacgtgagttcaggagttcgagaccagcctggccaacatgccgaaaccccatctctactaaaaatattttttaaaaaatagccgggtgtggtggtgggcgcctgtaatcccagctactcgagaggctgaggcaggagaattgcttgaacctaggagactgaggttgcagtgagctgatacgatgccacagtactccagcctgggcgacagagtgagactccgtctcaaaaaaaaaaaaaaaaagattaacctgttaatccataaaatgctctgtgcctctgatacattcagttccttctttaggcctttagttttgttgtgatacaattatcatagcatacaattaacctgtttaaagtgtacagtttcgtggctttttgtatattcatatatttgtgcatcgatcatcacaatcaattttagaacattttcatgaccacaaaaataaacccagtaccctagccatgatcacccaatctgctcatccagccccacccccacccccagagtccaaagcaacagctaatctttctgtctgtatagattgcctactgtagatattgcctgtagaattagaatataaaacacgtggtgtttggcttgtttcattcaatgttttcaaggttcatccaattagcatgtatcagtacttaatttttttttactaaataagattccattgtatggctgtatcataacatcagttgttggatattgggttttctcttttttttttttttttggcttttttggataatacaagacgcattttaagcagtggtcaaaggaacattcatattcctaaacacttttgtcaataaaaataagaatagctgggtgcagtggctcacacctgtaatcccagcattttgggaggccgaggcaggcggatcacctgaggacaggagtttaagaccagcctggccaacatggtgaaacacggtctctactaaaaaatacaaaaaccagcagggcgtggtggtgcgcacctgtaatcccagcttctcgggaggctgaggcaggagaatcacttgaacctgggaggcggaggttgcagtgagctgagatggcgccacggcacttcagcctgggcaactgagcacaactgtctcaaaaaaataaaaaataaaaaataaatccccagctcaaaaaataaaacctagaaaaagaatataaatgtaaaccaaaatggaaaaaggtttatttatttatttattttttatttcaatagcctttgggaaacaggtggttttgggttacatggataagttctttagtggtgatttctgggattttggtgcacccatcatccgagcagtgtacaatgtacccaatgtgtagttttttatccacttttatccctcacccttctcccacccttcccccagagtccccaaagtgcattctttctttctatccttttttgttttgttttgttttttctttttgagatggagtctcattctgttgcccaggctggagtgtagtgacatgatcttggcaacctccgcctcccaggttcaagcagttctcttgcctcagcctcctgagtaagtgagattacagacatgcgccaccatgcttggctaatttttgtatttttagtagagatggggttttcccacgttggccaggctggtcttgaactgctggcctcaagtgatccacccacttcggcctcccaaagtgctgggataacaggcgtgagccactgcgcccacccaaagttcattatatcattcttatgcctttgcatcctcatagcttagttcccacttataagtgagaacatatatatggttttccattcctgagttacttcacttagaataatagtctctatccaggttgctcagaatgctatgactttcttgctttttatagctgagtggtattctgtggtgtatatataccacatttttgttatccccttattagttgatgggcattgagactggttccatatttttacagttgcaaattgtgggctgtaaacatgtgtgtgcaagtgtcctttttttttttcttttttgagatggagtctccactctgctgccaggctggagtgcagtggcctatcttggctcactgcaacctccgcctcctgggttcaaatgattctcctgcctcagcctcccaagtagctgagactacaggtgcacaccaccatgcccagctaatttttgtatttttagtagagacgaggtttcaccgtgttggtcaggatggtctcggtctcttgacctcgtgatccacccacctcagcctcccaaactgctgggaatacaggtgtgagccaccatgcccagcctgtttcagacatttttaagactatgtcccattcatttaaaatactatttttccccattgaattgttttgacacctttgtcaaccatcattagactgtaaatgtgagcttagatgttttaaatggagaattataccaaaccttccaagttcaaatattcccagtgctccataacttaagaacaatgaaaatgaagaaatacttcctaattccttttatgaagaaagtataacattgatataaaatgtggtagaggctgggcatggaggctcacacctgtaatcccagcactttgggaggccgaggtgagtgggtcacctgaggtcaggagtttgatactggcctggcaaacatgatgaaaccctgtctctactaaaaatacaaaaatcagccaggtgtggtggcacgcacctgtaatcacagctacttaggaggctgaggcaggagaatcgcttgaacccaggaggcagaggttgcagtgagctgagatcataccgttgcactccagtggtgacagagcaagactccgtctcagaaaaaaaaaaaaagtggtagagtacaaaaaatgaaaaattgcagaaccatatcaattatgaatatggattcaaatatgctgttagctattagcaaataaaatacaagaccacattaagaaaataactatccccacatgaaatttagcataaaacagcagtattagtgcagttattagaaaatccattaaatagtccaggtgcagtgccttatgcctgtaatatcagcactttgggaggctgaggtggaggttgcattgcccaagctcatgagttccagaccagcctgggcaacatgttgaaaccccatctctacaaaaaagacaaaaattagtcgtgtgtgatctcagctactcaggatgaagtgggaggattgcttgaacccaggaagtggaggctgcagtgaactaaaaccgaccatgcccctgcactctagcctgggtgatagagccagaccttgtctaaagaaaagaaaagaaaaaaaatccattaaataatgcaccataaaaatacatctacaagaacaagtcatgtgactttctccatagatgctgatgaagcctttggaaaaaattcaacactcatttattattattgttattattattgttgtttgagatagggtcttcctatgttgtgcaggctggatcaaactcctgggctcaagggatcctccttcctcagcctcctgagtagctggggctataggcgtgcaacaccacacccagtgcaatgtcccttattgatatcagcactccagaaaaatagaaattagtgaatactttcttaagatgattgcctgtacctatagctgagtgtgtgtgtgtgtctgtgtgtgtgtgtactggaagcattagctaatacaattcagtaagaaaaattaattttgaaacatagaattgcagctgggcacggtggctcacacctgtaatcccagcaatttgggaggccaaggtgggaggatcacctgaggtcaggagcttgagaccagcctggccaacatggtgaaatcccgtctctattaaaaatacaaaaattagccagacatggtggcatgctcctgtaatcccaactactcaggaggctgaggcaggagaatcacttgaacccggtaggtggaggttgcagtgagccgagattgcaccactgcacttcagcctgggcgacagagcgaaactccatctcaaaaaaagaaaaagaaaaagaaaaagtaaataagcatagaattgcaaaagaaggaaactatctctttttgcagatgatgtgatattatatatggaaagccctagagaataaaataataagttaacagaatgtgaaattgctatctaaaaaccaatggcattcatctaccagtcaaaagccagtaaggtgatgtaataaaacttatgtagaataacataaagatacttaggtttagacttatcaaaaaatgtgtaaaacatacatgaagaagctttaaaacaaacattcttgaaagacacaaaatagacttgaacaaatggaaaattccttgttcttctataagatgacttaacatcatatagatagcaattcttaacaggttaactcaaaaatataacaatcccaggccgggcgcagtgtcttatgcctgtaatcccagcactttgggaggctgaggcaggaggatcaggaggtcaggagatagagaccaccctggctaacacgatgaaacccagtctctactaaaaatacaaaaaattagccaggcgtggtggcaggtgcctgtagtcccagctactcgggaggctgaggcaggagaatggcgtgaacccgggaggtggagcttgcagtgaactgagattgcgccactgcactccagcctgggcaacagagcaagactccgtctcaaaaaaaaaaaaaaaataccaaatccaagatggcggccagcaggaggctgattaagagcttgaggaaatctgcaaatgtgggatgaaaaacttcccgtaacatccaggttgatgaagctaatttattgacttagcaagggcttattgttcctgacaactctccatatgattaggtgaccttcagaatcgaaatcaactttccagcagagtatccattcaaactaccaaakatcacatttaaaacaaagatctatcacccaaatatcgacgaaaaggggcaggtctgtctgtcagtaattagtgctgaaaactggaagccagcaaccaaaaccgaccaagtaatccagtccctcatagcactggtgaatgacccccagcccgagcacccgcttcgggctgacctagctgaagaatactctaaggaccgtaaaaaattctgtaagaatgctgaagagtttacaaagaaatatggggaaagtgacctgtggactaaaatctgccacgattggttccagcaagtgtaagcagaggccccatgcagtgcattcagacacccggcaaagcaggactctgtggaaattgacacgtgccaccgcctgacattcacttgtggcagttactaactttctacagttttcttagtgaaaaatggtgtaggtaatctgtaaagaaaggattaaaatctaagatgttttaaatatatatacatatatatgtgtatatatatgtgtgtgtgtgtgtgtgtgtatatatatataacaatcccaataaaaaaccaaactttttaatggagttttgtaaattaattttaaagttcacatgggagcacaaacgtctgataatacccaagaaaactctgaaaaacaaaagtgacaatgccctacagatattaagacatactataaagcctctacaattaaaactgtggataggaacaggaacaggaaacagacaaatgggataaaatggaatatctagaaatagatccaggaacatatgggaattcagttcagaaaggtggtatttcagatcaattggggcaaaaatgcagtttgcaatgaaaggtgctaagattaagtggttagccatctggaaaaagacaaaattacatggataactcacaccattcacaaaataaactccaaatgaatcagggaactaaatgtgaaaaacaaaaatatatgcatatgtagggtatttgaatgatttttgggtgattaacgtaaaatatgtgaccacaaggcagcagtagctcacttgggcagtgctttgatgggtttgtgtgtggggtcccttgtgggcagcaagccacccaggtgctgaagcaagagaccgaggacacgagctgttccagtataataaaacataaaacaagaatagttgtaccagatatagatcatagacatgattatatatgaatatcattaatcattagtttgtggcaattactctttattccaatattataataatccttgctctataatcataacctaggaaaaatcaggctatacagagataggagctgaggggacatagtgaggagtgaccagaagacaagagtgcaagccttctgttatgcccagacagggccaccagaagggctccttggtctagcggtaatgccagcgtctgggaagacgtccattgccaggtggaccatggtctagcggtagcgaaaactgtcaaggaacaacacccgctacttagcagactgagaaagggagtctccttttccccgggggggtttatagaagactctgctcctccacctcttgtggagggcctgacatcagccaggcttgcccactgttatctggaggcccaaccgtctccctgtgatgctgtgcttcagtggtcacactcctagtccgccttcatgttccatcctgtacacctggctctgccttctagatagcagtagtaaattagtgaaagtactaaaagtctctgatatgcagaaataatggcataagctgtctttctctctgtctcctctccctctctgcctcaactgccaggcagggaagggccccctgtccagtggacacgtgacccacgtgaccttacctatcattggagatgactcacactctttaccctgccccttttgctttgtatccagtaaataacagcgcagccagacatttggggccactaccggtctccgtgcattgggggtagcggtcccccaggcccagctgtcttttcttctatctcttagtcttgtgtctttatttctacactctcttgtcgccacacacagggagaagcccaccgaccctgtggggctggtccctgcagtccctcatagcatgagaatatccaaaggctacagacttggaggtcactactcagaatgggaggagagcaagagaactccagggaaagaatgggagttgagagggagcttatgtgctaggtgaagttgcttagcagcctagtgggaagtttctaaatcagaaagctctgaagagcagcaagggattggggtcctttttatagctggagggtttatcttctctgtggtcatcaaatggttggcacaatttcaccggggtatgcagagcaggcaggccctaaaggactaaaaaatctgcttgtttggactatgtttaaaacaattgattcaggatcattaaaaaaaagaagaagaagaacgaaagaaaacacacacacacgcacacacacacacacacacacacacacaattggatggccaagcatggtggcttgcacctgtaatcccagctacttgggaggtcaaggcaggaggattgcttgaacccaggagtttcaggctgcaataagctgtgatcctgccactgcactccagcctgggcaacaaatcaagaccctatctttaaacaaacaaaccaaaagaaaattaaaaacaattgggtgtggaaaaacttgagtttggagccgggtgcggtggctcatgcctgtaatcccagcacttttggaggtcgaggtgggcagatcacgaggtcaggagatcgagaccatcctggccaacctggtgaaatcccgtctctactaaaaatacaaaaattagctgggcgtggtggcatgtgcctgtaatcccagctacttgggaggctgaggcaggagaatcccttgaaccagggagtcggaggttgcagtgagcccagatcgtgccactgcattccagcctggcaacaaagtgagactctgtccaaaaaaaaaaatttaaacaattggatgtggaaaaacttgagtttggggccaggtgcgatggttcatacctgtcattttagcactttgggaggccaaggtgggtggatcacctgaggtcaggagtctgagaccaagctagctaacatggcaaaaccccatctctactaaaaaatacaaaaaaaaagccagactaaaacttgagtttgacactggcagctattgtgagtaacggtgctatgaacactggtgtacaaaccaaaacaatacagaaaaaacccagcaaacactggacaaaggagagaatcagctttccagagttacagtattatcagattcaaatgtccagtttttaacaaaaatctcaaggcacacaaacaggaaagtatggcccattcaaagaaaaaataaataaatataaattttccctggaagagacctaatggtatatctactagacaaggactttaaaacaactgccttaaagatgttcaaagaactaaaggaagacatggaaaaactcaagaaaatgatgtatgaacagaatataaataacaatcaagagatagaaaacctaaaaagaaaccaagaagaaattctggagctaaaaaatacaataattaaaatgaaaaattcactacagggattcaaaggagatttcagctgttgcatcccagacctctccatggatgatgtcaaaggcatccccagtagtgacaaccaaaaatgtctccagacattgctaactgtcccccaggagtaaaatcatccccattggaaatcactgctctagacctacctcccaatttacagaaaatgcaggtgacagaaaaacaagctaaaagaaaccatgagggggccgggcactgtggctcaggcctataatcccagcactttgggaggccaaggcggatggatcacctgaggtcaggagtttgagaccagcctggctaacatggtgaaaccctgtttctactaaaaatacaaaacagccaggtgaggtggcatgtgcctgtaatcccagctactgaggaggctgagacgggagaattgcttgaacccaggaggcagaggttgcagtgagctgagatcatgccattgcagtgcagcttgggcaacaagagcgaaaactcgtctcaaaaaaaaaaaaaaaaaaaaaaaagacgcaaggtctcgctatgttgcccaggctggattccaactcctgggctcaatccatcctcccaactcagcctccccagtagctgggactacaggtgttagccaccatgccctatcttcaaagtttaatactatgctagtatataagaaaactgatactttataacccaatgttgaaacaatattcctctggaatcagactgcctgagattgaatctaggcttaaactctctgtgcataatatttttcatttgtaaaatgagggttagattaatatccactttctagctctgagggtaaatagttgaatagaatgctcatgtgagacgatttaactctgacatttcagccaactgtagcttcggggtgtcaccttgaaaagaggttggttcctttggaagaaatgttacttccagaagttagaataaaaggaatttatttatttatttatttatttttgagactgagtttcactcttgttgcccaggctggagtgtaataacacgatcatggcttaccgcaacctccgcctcccgggttcaagcgattctcctgcctcagcctcccaagtagctgggattacaggcatgcgccaccacgcctggctaattttatatttttagtagagacagggtttctccatgttggtcaggctggtctcaaactcccgacctcaggtgatctgtctgcctcagcttcccaaagtgctgggattacaggcatgagccactgcaccccaccagaattttttttttttttttgaggccaagtttcactcttgttgcccaggctagagtgtaatggcgtgatctcagctcactgcagcttctgcctcccaggttcaaggaattctcctgcctcagcctcccaagcagctgggattacaggtgcccaccaccacacccagctaattttttgtattgttagtagagacgaggtttcaccatgttggccaggctggtctcgaactcctgaccttcaggtgatccacccacctccaactcccaaagtgctaggattacaagcatgagtcaccacgcccggccatcacgacttttttttttttttagataggctgtcactcctgtcactcaggctggagtgtagtacagtgatcttcactcactgcagccttgacctcctggtctcaagagatcctcccacctcagcctctcaagtagctaggactacaaatgcatgccaccatgcccagctaattttgtttttttttttgtttttttttttgtagagatgaggtctcactatattgcccagcctggtctcaaactcctgggctcaagcaatccccctacctcagcctcttaagtgctggaattataggcatgagccactgcacctggccactctttttttctttctgtttaaagacagggtcttgctatatagcccaggctggagtggagtggtcattcacaggcatgatcatgtacactgcagcttacaactcccaggctcaagtgatcctcccgccccagcctccccaataactaggactacaggcatgtgccaccacacccagcaagtttcccttagttctctgaaatgttttaagactccactcaaatcttcttaaacagtcttaaattttcatcatgatattacctagtgatttttttttttaagatggagccttgctctatcacccaggatggagtgcagtggtgtgatctcagctcactgcaacctctgcctcccaggttcaagcgattctcctgcctcagtctcccgagtagctgggactacaggtgtgcaccatcatgcccggctaatttttgtattttagtagaggtagggtttcaccatgttggctaggctggtcttgaactcctgacctcaagtgatccacctgcctcagcctcccaaaatgctgggattacaggtgtgagccactgcactcagcctgacctagtgatgttttactcccagttctaatgttccacagttagagactccagacataccaaaatcagttaactttcatgaattcaccatggcccttatgcagtagttttcaacagtggctgcacattagattcactggaggacttttaaaaacactgatacccatgacacatccccataaatgctgttttaattggtctgaggtaggactcagcccttagtacatttctcaagtttccaggacattctataaggattaggttgagaattactgacttggcttctgcattcatatgctcttcttgtccacttgatatagtcctacacatctttcagaacttaagtcaaccttgcctcctctggagaaaatatcctgttaggtgtttttttgtttgtttgtttgttttgagatgga
